(19) United States
(12) Patent Application Publication
(10) Pub. No.: US 2013/0330799 A1
(43) Pub. Date: Dec. 12, 2013

(54) CRUDE OIL DEGRADING MICROORGANISMS AND METHODS FOR THEIR ENHANCEMENT

(71) Applicant: Dmitriy Ovcharenko, Austin, TX (US)

(72) Inventor: Dmitriy Ovcharenko, Austin, TX (US)

(73) Assignee: ALTOGEN LLC, Austin, TX (US)

(21) Appl. No.: 13/490,508

(22) Filed: Jun. 7, 2012

(51) Int. Cl. C12N 1/20; C12N 11/00; A62D 3/02; C12N 1/26

(52) U.S. Cl. 435/174; 435/248; 435/252.1; 435/262.5

(57) ABSTRACT

Certain embodiments are directed to methods of enhancing the petroleum degrading abilities of bacteria and the resulting bacterial composition. In certain aspects the bacteria are selected for degradation of a petroleum having a particular composition profile and/or for environmental robustness.

### STATEMENT REGARDING FEDERALLY FUNDED RESEARCH

[0001] none

### REFERENCE TO SEQUENCE LISTING

[0002] A sequence listing required by 37 CFR 1.821-1.825 is being submitted electronically with this application. The sequence listing is incorporated herein by reference.

### BACKGROUND

[0003] The present invention relates to bioremediation. In certain embodiments, the invention relates to crude oil-degrading microorganisms and methods for enrichment and isolation of crude oil-degrading microorganisms.

[0004] Crude oil refers to a mixture of compounds that can be categorized into four fractions: (1) saturates (or alkanes); (2) aromatics, including for example benzene, toluene, ethylbenzene and xylenes, and polyaromatic hydrocarbons (PAHs); (3) resins, which are compounds containing nitrogen, sulphur, and oxygen, that are dissolved in oil; and (4) asphaltenes, which are large and complex molecules that are colloidally dispersed in oil. The relative proportions of these fractions are dependent on many factors, including for example source, age, and migration. Of these fractions, the shorter alkane chain compounds and the lighter aromatics tend to be more readily biodegradable.

[0005] Biodegradation refers to the chemical breakdown or transformation of substances through biochemical reactions, such as those carried out by microorganisms. Bioremediation refers to the use of a biological process to degrade chemical contaminants in the environment, for example crude oil that may be released after an oil spill. Bioremediation has shown promise as a supplemental treatment option for oil spill cleanup. Bioremediation agents include microbiological cultures, enzyme additives, and nutrient additives that significantly increase the rate of biodegradation to mitigate the effects of oil discharge. The addition of known oil-degrading bacteria to a contaminated site to effect or enhance biodegradation of crude oil and its components has been referred to as bioaugmentation.

[0006] Hydrocarbon-degrading bacteria can assimilate and metabolize hydrocarbons that are present in petroleum. Some oil-degrading bacteria are naturally occurring in soil and water environments. Rhodococcus spp. are the most abundant alkane-degrading bacteria, in many natural environments, and Pseudomonas spp. and Alcanivorax borkumensis may become enriched following contamination events such as crude oil spills. Upon contamination with crude oil, the concentrations of these bacteria may increase. However, the natural bioremediation process is frequently inefficient, because the bacteria require nutrients and oxygen and are often effective only at the edge of the oil spill. Also, indigenous microbial populations may not be capable of degrading the wide range of chemical compounds such as those present in complex hydrocarbon mixtures.

[0007] Recently, considerable efforts have focused on isolating microorganisms that can degrade polycyclic aromatic hydrocarbons (PAHs), with the goal of understanding the fate of these toxic compounds after they are deposited in natural environments. The EPA has listed PAHs as priority pollutants in ecosystems since the 1970s. Although many PAHs are recalcitrant to biodegradation, numerous bacteria are known to catabolize PAHs as their sole carbon sources, making them good candidate species for site remediation.

[0008] The last few decades have seen the discovery of a number of bacteria capable of degrading PAHs, particularly low-molecular-weight compounds (e.g., two- and three-ring PAHs such as naphthalene and phenanthrene). Most of these bacteria belong to the genus Agmenellum. Few bacteria are known to degrade higher-molecular-weight PAHs (four- and five-member fused aromatic rings), such as fluoranthene, pyrene, and benzo(a)pyrene; these bacteria include members of the genera Bacillus and Mycobacterium. Degrading high-molecular-weight PAHs is more difficult and generally occurs through co-metabolism during growth on simpler substrates.

[0009] A need remains for improving crude oil breakdown by microorganisms and for improving the process of bioremediation through the discovery, enhancement, and application of novel bacterial species that are capable of degrading crude oil components.

### SUMMARY

[0010] Certain embodiments are directed to methods of isolating an enhanced crude oil degrading bacterium. In certain aspects, the methods comprise the steps of: (a) selecting a crude oil degrading bacteria and selecting for enhanced crude oil degradation. Selecting an oil degrading bacteria can comprise (i) isolating a crude oil degrading bacteria by culturing a sample containing bacteria with a medium having an initial concentration of crude oil or crude oil derivatives, (ii) introducing the isolated bacteria of (a) to a target environmental condition, and (iii) re-isolating the bacteria isolated in (a) from the target environmental condition. In a further aspect, enhancing the crude oil degrading bacteria can comprise by repeating selection steps (i) to (iii) one or more times using an increased concentration of a target crude oil or crude oil derivative composition during the enhancing process. As additional selections are performed the level of crude oil for selection is increased. The increase need not be incremental or continuous, e.g., the one or more selections can be carried out the same crude oil level with the increase in crude oil level being initiated at some point after 1, 2, 3, 4, or 5 selections.

[0011] In certain aspects, the initial concentration of target crude oil is 0.5, 0.75, 1, or 1.5% or more. In certain aspects, the increased concentration or level of crude oil is 1.5, 2, or 3 times greater that the previous crude oil level. The crude oil composition can comprise at least 5, 10, 15, 20, 25, 30, 35, 40, 45, 50, 55, 60, 70, 75, 80, 85, 90, 95, or 100% polyaromatic hydrocarbons (PAH).

[0012] In certain embodiments the sample is from a contaminated site. In other embodiments the sample is from a non-contaminated site. In a further aspect, the non-contaminated site is at risk of experiencing a contamination event, such as an oil spill. Such sites include, but are not limited to refineries, beaches, area around pipelines, area around wells and the like.

[0013] Certain embodiments are directed to bacterium isolated by the processes described herein. In certain aspects, an isolated crude oil degrading bacterium has a genome comprising a nucleic acid segment that is 90, 92, 94, 96, 98, or 100% identical to one or more sequences selected from SEQ ID NO: 1 to SEQ ID NO:187 (Altogen 322075), or SEQ ID NO:188 to SEQ ID NO:559 (Altogen 635822). In certain aspects the isolated bacterium is Altogen strain 635822 or Altogen strain 322075. In a further aspect, the bacterium is attached to a substrate (e.g., a particle) or comprised in a foam.

[0014] Certain embodiments are directed to methods for reducing crude oil contamination comprising contacting a crude oil contaminated site with a bacterium described herein or isolated using a method described herein. In certain aspects, the methods include proactively treating a site at risk of crude oil contamination comprising introducing bacterium described herein or isolated using a method described herein to a non-contaminated site.

[0015] Land that is contaminated contains substances in or under the land that are actually or potentially hazardous to health or the environment. Areas with a long history of industrial production will have many sites that may be affected by their former uses such as mining, industry, chemical and oil spills, and waste disposal. These sites are known as Brownfield Land. Contaminated land will have a detectable level of a substance, e.g., crude oil or crude oil derivatives, that is potentially hazardous life and the health of an organism, such as humans or other mammals.

[0016] The terms “isolated,” “purified,” or “biologically pure” refer to material that is substantially or essentially free from components that normally accompany it as found in its native state.

[0017] The term “providing” is used according to its ordinary meaning “to supply or furnish for use.” In some embodiments, a bacterium is provided directly by contacting a particular site with the bacterium.

[0018] Other embodiments of the invention are discussed throughout this application. Any embodiment discussed with respect to one aspect of the invention applies to other aspects of the invention as well and vice versa. Each embodiment described herein is understood to be embodiments of the invention that are applicable to all aspects of the invention. It is contemplated that any embodiment discussed herein can be implemented with respect to any method or composition of the invention, and vice versa. Furthermore, compositions and kits of the invention can be used to achieve methods of the invention.

[0019] The use of the word “a” or “an” when used in conjunction with the term “comprising” in the claims and/or the specification may mean “one,” but it is also consistent with the meaning of “one or more,” “at least one,” and “one or more than one.”

[0020] Throughout this application, the term “about” is used to indicate that a value includes the standard deviation of error for the device or method being employed to determine the value.

[0021] The use of the term “or” in the claims is used to mean “and/or” unless explicitly indicated to refer to alternatives only or the alternatives are mutually exclusive, although the disclosure supports a definition that refers to only alternatives and “and/or.”

[0022] As used in this specification and claim(s), the words “comprising” (and any form of comprising, such as “comprise” and “comprises”), “having” (and any form of having, such as “have” and “has”), “including” (and any form of including, such as “includes” and “include”) or “containing” (and any form of containing, such as “contains” and “contain”) are inclusive or open-ended and do not exclude additional, unrecited elements or method steps.

[0023] Other objects, features and advantages of the present invention will become apparent from the following detailed description. It should be understood, however, that the detailed description and the examples, while indicating specific embodiments of the invention, are given by way of illustration only, since various changes and modifications within the spirit and scope of the invention will become apparent to those skilled in the art from this detailed description.

### DESCRIPTION OF THE DRAWINGS

[0024] The following drawings form part of the present specification and are included to further demonstrate certain aspects of the present invention. The invention may be better understood by reference to one or more of these drawings in combination with the detailed description of the specification embodiments presented herein.

[0025] FIGS. 1A-1B. Degradation of Texas crude oil by natural oil-degrading bacteria. (A) Altogen Labs strain 322075 plated on LB agar with 1% tryptone, and (B) control plate with no bacterial culture. Both plates were covered with 2 mm crude oil and incubated at ambient temperature for 15 days.

[0026] FIGS. 2A-2B Growth of Altogen strain 635822 on solid agar medium with crude oil. (A) shows the surface of LB agar plate with crude oil following inoculation with and growth of a pure culture of Altogen strain 635822. (B) Surface of LB agar plate with crude oil after incubation with no bacterial inoculation.

[0027] FIGS. 3A-3B. Growth of a mixed culture of Altogen strains 322075 and 635822 on solid agar medium with crude oil. (A) shows the surface of LB agar plate with crude oil following inoculation with and growth of a mixed culture prepared from pure cultures of Altogen strains 322075 and 635822. (B) Surface of LB agar plate with crude oil after incubation with no bacterial inoculation.

[0028] FIG. 4. Graph showing C18:phytane ratios in crude oil contaminated soil samples, over a period of 25 days following treatment with Altogen strain 322075.

[0029] FIG. 5. Graph showing C18:phytane ratios in crude-oil contaminated soil samples, over a period of 25 days following treatment with Altogen strain 635822.

[0030] FIG. 6. Graph showing C18:phytane ratios in crude-oil contaminated soil samples, over a period of 25 days following treatment with a mixture of Altogen strains 322075 and 635822.

[0031] FIG. 7. Flowchart of method 1 for reactively selecting an enhance bacterium.

[0032] FIG. 8. Flowchart of method 2 for proactively selecting an enhance bacterium.

### DESCRIPTION

[0033] Bioremediation includes the use of microorganism metabolism to remove pollutants. Technologies can be generally classified as in situ or ex situ. In situ bioremediation involves treating the contaminated material at the site, while ex situ involves the removal of the contaminated material to be treated elsewhere. Microorganisms used to perform the function of bioremediation are known as bioremediators.

[0034] The term crude oil as used herein includes crude oil and all liquid, gaseous, and solid (e.g., paraffin) hydrocarbons, or derivative thereof. A “crude oil derivative” refers to a physically or chemically modified crude oil that still retains at least a portion of the crude oil that existed prior to the physical or chemical modification. Crude oil derivatives, therefore, refers to a physically or chemically modified crude oil or crude oil component, including any refined or isolated components or products of crude oil. Such derivatives may have the addition, removal, or substitution of one or more moieties or chemical moieties of the crude oil or a crude oil component. An oil well produces predominantly crude oil, with some natural gas dissolved in it. Because the pressure is lower at the surface than underground, some of the gas will come out of solution and be recovered (or burned) as associated gas or solution gas. A gas well produces predominantly natural gas. However, because the underground temperature and pressure are higher than at the surface, the gas may contain heavier hydrocarbons such as pentane, hexane, and heptane in the gaseous state. At surface conditions these will condense out of the gas to form natural gas condensate, often shortened to condensate. Condensate resembles petrol in appearance and is similar in composition to some volatile light crude oils.

[0035] The proportion of light hydrocarbons in the petroleum mixture varies greatly among different oil fields, ranging from as much as 97% by weight in the lighter oils to as little as 50% in the heavier oils and bitumens. The term “light hydrocarbons” refers to C1-C6 hydrocarbons, for example, methanes, ethanes, propanes, butanes, pentane, hexanes, and the like. The hydrocarbons in crude oil are mostly alkanes, cycloalkanes and various aromatic hydrocarbons while the other organic compounds contain nitrogen, oxygen and sulfur, and trace amounts of metals such as iron, nickel, copper and vanadium. The exact molecular composition varies widely from formation to formation but the proportion of chemical elements vary over fairly narrow limits. Thus, the composition of crude oil will vary based on the geographic location from which the crude oil originated.

[0036] Described herein are methods of isolating, enhancing, and/or producing bioremediation agents. In certain aspects, the bioremediation agents are selected for a contaminant having a particular chemical profile or classification. The petroleum industry generally classifies crude oil by the geographic location in which it is produced (e.g. West Texas Intermediate, Brent, or Oman), its API gravity (an oil industry measure of density), and its sulfur content. Crude oil may be considered light if it has low density or heavy if it has high density; and it may be referred to as sweet if it contains relatively little sulfur or sour if it contains substantial amounts of sulfur.

[0037] The geographic location is important because it affects transportation costs to the refinery. Light crude oil is more desirable than heavy oil since it produces a higher yield of petrol or gasoline, while sweet oil commands a higher price than sour oil because it has fewer environmental problems and requires less refining to meet sulfur standards imposed on fuels in consuming countries. Each crude oil has unique molecular characteristics that are understood by the use of crude oil assay analysis in petroleum laboratories.

### I. ISOLATION OF ENHANCED MICROBIAL STRAINS

[0038] In certain embodiments bacteria are selected for degradation of a crude oil or crude oil derivative having a particular composition profile and for environmental robustness. In certain aspects, one or more isolated bacteria are tailored for use in a particular geographic area and/or for a particular contaminated site. A site can be defined by the geographic location and the type and content of material that is contaminated, e.g., a site can be defined as Texas crude oil contaminated soil or beach on the Texas gulf coast. Such a site can be a few square feet to several thousand square feet or more.

[0039] The enhancement methods include a positive selection of microbes that degrade crude oil. In certain aspects the crude oil has a composition that is similar to crude oil at a contaminated site. The enhancement process can be carried out prior to a contamination event or during or after such an event. That is the bacteria can be produce as a proactive measure or a reactive measure. Certain embodiments include a first selection at an initial concentration of crude oil. In certain aspects the first selection can be carried out at 0.25, 0.5, 1, 1.5, to 1, 1, 5, 2, 3% crude oil (including all values and ranges there between) or more. In a further aspect, selection can be repeated 1, 2, 3, 4, or more times. The amount of crude oil present in subsequent selection procedures can be increased. The crude oil content in the selection medium can be increased to 2, 2.5, 3, 3.5, 4, to 3, 3.5, 4, 4.5% (including all values and ranges there between) or more.

[0040] In another aspect, the bacteria after any of the selection steps can be re-introduced to the site at which the original sample was taken or exposed to an environment that mimics the environment in which the enhanced strains are to be used. This step is to select those bacteria that demonstrate an environmental robustness for the site to be treated. Thus, this step is a negative selection in that those bacteria unable to survive in such an environment are selected against. In certain aspects a molecular marker is used to identify those environmentally robust bacteria that are derived from the bacterial selection process prior to re-introduction or exposure to environmental robustness selection.

[0041] Bacteria isolation and selection processes includes “positive selection” where individual bacterial strains with high efficiency oil degradation capabilities are developed, and “negative selection” process when cultures are exposed to environmental stress to enable selection for cells that are efficient oil degraders and thrive in a particular environment. The positive selection process can be repeated with increased percentage of crude oil. In a non-limiting example increased percentages can be 2%, 3%, 4%, 5% or 6% to select for individual strains that provide highest bioremediation capacity. In certain aspects, these selected bacteria will be capable of bioremediation from within a spill and not limited to the periphery of a spill.

[0042] Using a reactive positive-negative selection method (i.e., bacteria are selected from a contaminated site) (Method 1) the inventor has successfully isolated two site-specific, oil-degrading bacteria (Altogen Labs strains #322075 (SEQ ID NO:1 to SEQ ID NO:187) and strain #635822 SEQ ID NO:188 to SEQ ID NO:559) from contaminated soil near Galveston, Tex.

[0043] The inventor has also developed a proactive positive-negative selection method (Method 2) for generation of highly efficient oil-degrading bacteria for potential oil spills in a particular environment. In certain aspects, the bacteria produced from method 2 can be stock piled in a particular location and dispersed upon a contamination event. In a further aspect, a site that is at risk of contamination can be periodically treated (i.e., a prophylactic treatment) with bacteria produced by method 2 (i.e., a site having little or no significant contamination can exposed to the enhanced bacteria, thus augmenting the natural flora at the contamination site to protect or prepare a site for a potential contamination event).

[0044] Method 1—

[0045] Contaminated samples are collected from a contaminated site. Samples are collected, for example, into sterile sample bottles and used within about 12, 24, 36, 48 hours or so for microorganism isolation. In certain aspects, samples from contaminated sites may be stored for extended periods until needed. The sample is suspended in 100 ml of distilled water in a sterile glass cylinder, vortexed, and allowed to settle. A portion of the supernatant is inoculated into a growth medium, e.g., LB containing peptone and an initial crude oil content. The flask is incubated at an appropriate temperature (between 30 and 42° C.) for an appropriate amount of time (e.g., 24 to 72 hours) on a rotary shaker at an appropriate speed (e.g., 50 to 200 rpm).

[0046] Multiple sub-culturing steps (2, 3, or more) are performed to increase cell number using the same growth medium (e.g., LB containing peptone and initial crude oil content). The growth medium is then centrifuged to collect cell pellets and cell pellets are washed with a sterile solution (e.g., 1×PBS).

[0047] Cell pellets are dissolved in mineral salt medium having initial crude oil content. The suspension is then sprayed on an agar plate (Petri dish) having a crude oil film (0.5, 1, 1.5, or 2 mm) absorbed over entire Petri dish surface. Petri dishes are incubated at an appropriate temperature (30 to 42) for an appropriate amount of time to allow colony formation (about 5 to 14 days or more).

[0048] Single colonies are picked and inoculated into a growth medium (e.g., LB containing peptone and an initial crude oil content). The flask is incubated at an appropriate temperature (30 to 42 C) for an appropriate time (12 to 72 hours) on a rotary shaker (e.g., at 50 to 200 rpm).

[0049] Multiple sub-culturing steps (2, 3, or more) are performed to increase cell number using the same growth medium (e.g., LB containing peptone and an initial crude oil content). The broth is then centrifuged to collect cell pellets and the cell pellets washed with a sterile wash solution.

[0050] Cell pellets are dissolved in mineral salt medium having an initial crude oil content. The suspension is used for “negative selection process” by spraying or exposing the suspended cells to target environmental conditions (e.g., oil contaminated soil at the same site where original samples were collected or an artificial environment that mimics a target environmental condition or location).

[0051] Sample are collected (e.g., from 7 to 40 days after spraying or exposure) at the environmental site or a mimic thereof and the “positive-negative selection” process repeated with increasing contents of crude oil relative to the initial crude oil content above (e.g., 2, 3, 4, or 5%), followed by the “positive-negative selection” process repeated with the increase in crude oil content. Enhanced bacteria from each selection process are identified by using a molecular marker, e.g., bacteria specific nucleic acid probe, and processed. In certain aspects, a bacterium derived from the original selected bacterium is identified and processed throughout the reminder of the selection process(es).

[0052] At the end of two or more selection processes, dry bacterial product is prepared. In certain aspects, the dry bacterial product is prepared at a ratio of 0.0001. 0.001, 0.01, 0.1 to 0.01, 0.05, 0.5. 1 kg of bacteria (including all values and ranges there between) per 100 liters of solution. In one example, the product has 0.2 kg of dry bacteria product suspended in 100 Liters of aqueous solution. This aqueous solution can then be sprayed over contaminated soil (1 gram of dry bacteria product contains approximately 7×10⁸ of bacterial cells). In certain aspects, 100 liters of bacterial product is sprayed per 0.01, 0.1, or 1 acre of contaminated site.

[0053] Method 2—

[0054] Non-contaminated soil is treated with crude oil (2 mm crude oil film applied) for 2-4 weeks. Non-contaminated soil samples (100 g) are collected from an area at risk for a contamination event (e.g., beaches along known oil shipping routes, refineries, pipelines, well locations and the like). Soil samples are collected into sterile sample bottles and used within about 12, 24, 36, 48 hours or so for microorganism isolation. A sample is suspended in distilled water in sterile glass cylinder, vortexed, and allowed to settle. A portion of the supernatant from upper fraction is inoculated into a growth medium (e.g., LB containing peptone and an initial crude oil content). The growth medium is incubated at an appropriate temperature (30 to 42° C.) for an appropriate time (12-72 hours) on a rotary shaker.

[0055] Multiple sub-culturing steps (2, 3, or more) are performed to increase cell number using the same medium (LB containing peptone and an initial crude oil content). The broth is then centrifuged to collect cell pellets and the cell pellets washed with sterile solution (e.g., 1×PBS).

[0056] Cell pellets are dissolved in mineral salt medium with an initial crude oil content. The suspension is sprayed on an agar plate (Petri dish) with a crude oil film (0.5, 1, 1.5, or 2 mm) absorbed over entire Petri dish surface. Petri dishes were incubated at an appropriate temperature (30 to 42° C.) for an appropriate amount of time (5 to 14 days) to allow colony formation.

[0057] Single colonies are picked up and inoculated into a growth medium (e.g., LB containing peptone and an initial crude oil content). The flask is incubated at an appropriate temperature (30 to 42° C.) for 12 to 72 hours while being aerated (e.g., a rotary shaker at 50 to 200 rpm).

[0058] Multiple sub-culturing steps (2, 3, or more) are performed to increase cell number using the same growth medium (e.g., LB containing peptone and an initial crude oil content). The broth is then centrifuged to collect cell pellets and the cell pellets washed with sterile solution (e.g., 1×PBS).

[0059] Cell pellets are dissolved in mineral salt medium with an initial crude oil content. The suspension is used for “negative selection process” by spraying or exposing part of the culture to a target environmental condition (e.g., soil at the same site where original samples were collected).

[0060] Sample are collected (e.g., from 7 to 40 days after spraying or exposure) at the environmental site or a mimic thereof and the “positive-negative selection” process repeated with increasing contents of crude oil relative to the initial crude oil content above (e.g., 2, 3, 4, or 5%), followed by the “positive-negative selection” process repeated with the increase in crude oil content. Enhanced bacteria from each selection process are identified by using a molecular marker, e.g., bacteria specific nucleic acid probe, and processed. In certain aspects, a bacterium derived from the original selected bacterium is identified and processed throughout the reminder of the selection process(es).

[0061] At the end of two or more selection processes, dry bacterial product is prepared. In certain aspects, the dry bacterial product is prepared at a ratio of 0.0001. 0.001, 0.01, 0.1 to 0.01, 0.05, 0.5. 1 kg of bacteria (including all values and ranges there between) per 100 liters of solution. In one example, the product has 0.2 kg of dry bacteria product suspended in 100 Liters of aqueous solution. This aqueous solution can then be sprayed over contaminated soil (1 gram of dry bacteria product contains approximately 7×10⁸ of bacterial cells). In certain aspects, 100 liters of bacterial product is sprayed per 0.01, 0.1, or 1 acre of contaminated site.

### II. BIOREMEDIATION METHODS

[0062] Bioremediation is typically defined within the context of biodegradation, a naturally occurring process. Biodegradation is a large component of oil weathering and is a natural process whereby bacteria or other microorganisms alter and break down organic molecules into other substances, eventually producing fatty acids and carbon dioxide. Bioremediation is the acceleration of this process through the addition of exogenous microbial populations, through the stimulation of indigenous populations, or through manipulation of the contaminated media using techniques such as aeration or temperature control (Atlas, Int Biodeterioration & Biodegradation 35(1-13) 317-27, 1995; Hoff, Marine Pollution Bulletin, 26(9):476-81, 1993; Swannell et al., Microbiological Reviews 60(2):342-65, 1996).

[0063] Many microorganisms possess the enzymatic capability to degrade petroleum hydrocarbons. Some microorganisms degrade alkanes, others aromatics, and others both paraffinic and aromatic hydrocarbons. Often the normal alkanes in the range C₁₀ to C₂₆ are viewed as the most readily degraded, but low-molecular-weight aromatics, such as benzene, toluene and xylene, which are among the toxic compounds found in crude oil, are also very readily biodegraded by many marine microorganisms.

[0064] The biodegradation of crude oil in the marine environment is carried out largely by diverse bacterial populations, including various Pseudomonas species. The hydrocarbon-biodegrading populations are widely distributed in the world's oceans; surveys of marine bacteria indicate that hydrocarbon-degrading microorganisms are ubiquitously distributed in the marine environment.

[0065] The initial steps in the biodegradation of hydrocarbons by bacteria and fungi involve the oxidation of the substrate by oxygenases, for which molecular oxygen is required. Alkanes are subsequently converted to carboxylic acids that are further biodegraded via β-oxidation (the central metabolic pathway for the utilization of fatty acids from lipids, which results in formation of acetate which enters the tricarboxylic acid cycle). Aromatic hydrocarbon rings generally are hydroxylated to form diols; the rings are then cleaved with the formation of catechols that are subsequently degraded to intermediates of the tricarboxylic acid cycle.

[0066] There are several different bioremediation techniques. The underlying idea is to accelerate the rates of hydrocarbon biodegradation by overcoming the rate-limiting factors. Indigenous populations of microbial bacteria can be stimulated through the addition of nutrients or other materials. Exogenous microbial populations can be introduced in the contaminated environment. The addition of extra bacteria is known as bio-augmentation. In certain aspects, the contaminated media can be manipulated by, for example, aeration or temperature control.

[0067] One approach often considered for the bioremediation of crude oil pollutants is the addition of microorganisms (seeding) that are able to degrade hydrocarbons. Most microorganisms considered for seeding are obtained from previously contaminated sites. However, because hydrocarbon-degrading bacteria and fungi are widely distributed in marine, freshwater, and soil habitats, adding seed cultures has proven less promising for treating oil spills than adding fertilizers and ensuring adequate aeration. Most tests have indicated that seed cultures are likely to be of little benefit over the naturally occurring microorganisms at a contaminated site. However, certain aspects described herein are directed to selection methods to increase the likelihood and success of bio-augmentation.

### III. EXAMPLES

[0068] The following examples as well as the figures are included to demonstrate preferred embodiments of the invention. It should be appreciated by those of skill in the art that the techniques disclosed in the examples or figures represent techniques discovered by the inventor to function well in the practice of the invention, and thus can be considered to constitute preferred modes for its practice. However, those of skill in the art should, in light of the present disclosure, appreciate that many changes can be made in the specific embodiments which are disclosed and still obtain a like or similar result without departing from the spirit and scope of the invention.

### Example 1

### Methods for Isolating Crude Oil-Degrading Microorganisms from Crude Oil Contaminated Sites

[0069] Crude Oil-degrading microorganisms were selected and isolated from a crude oil-contaminated environmental sample. In certain aspects the methods include one or more steps shown in FIG. 1 and described here.

[0070] (a) Sample Preparation.

[0071] Contaminated soil samples were collected from numerous sites in Galveston, Tex. and Texas City, Tex. Soil samples were collected into sterile sample bottles. The samples were used for microorganism enrichment and isolation within 24 hours. Soil (100 g) was suspended in distilled water (100 ml) in a sterile glass cylinder and vortexed. The suspension was allowed to settle.

[0072] (b) Initial Culture in Liquid Growth Medium.

[0073] Supernatant (10 ml) from the upper fraction of the settled mixture was removed and used to inoculate sterile LB broth (200 ml) containing peptone and 1% crude oil in a conical flask. The inoculated culture medium was incubated at 32° C. for 48 hrs on a rotary shaker at 100 rpm. Crude oil used in the enrichment steps described here was ‘Texas Crude Oil” obtained from ONTA, Inc. (Toronto, Ontario, CA).

[0074] (c) Subcultures in Liquid Growth Medium.

[0075] After incubation of the initial culture in liquid growth medium, a portion of the original culture was used to inoculate a second flask having sterile LB broth/peptone/1% crude oil (first subculture), and that flask was incubated as above. A second subculture was prepared with a sample of the first subculture and incubated. Then, a third subculture was prepared with a sample from the second subculture and incubated. All incubations were at 32° C. for 48 hrs on a rotary shaker at 100 rpm. Growth medium in the third subculture was centrifuged at 5,000 rpm for 15 minutes to collect bacteria, and the bacterial cell pellets washed with sterile, 1×PBS solution.

[0076] (d) Outgrowth on Solid Growth Medium.

[0077] The washed cell pellets from one or more of the subcultures above were resuspended in mineral salts medium (100 ml) (Mittal et al., Ind. J. Exp. Biol., 47:760-765, 2009) having 1% crude oil. The suspension was sprayed onto petri dishes having solid LB medium/agarose (3%) and a 2 mm film of crude oil previously absorbed over their entire surface. Inoculated LB plates were incubated at 32° C. for one week to allow for growth of bacterial colonies.

[0078] (e) Outgrowth of Bacterial Colonies in Liquid Growth Medium.

[0079] Following colony formation on the solid growth medium, single bacterial colonies were picked and used to inoculate sterile LB broth (200 ml) containing peptone and 1% crude oil in a conical flask. Cultures were incubated as in (b) above.

[0080] (f) Second Set of Three Subcultures.

[0081] After incubation in Step 5, three additional subcultures were prepared and bacteria were harvested and washed as described above in Step 3.

[0082] (g) Reintroduction of Enriched Oil-Degrading Bacteria to Contaminated Site.

[0083] Cell pellets from Step 6 were resuspended in 100 ml of mineral salt medium (Mittal et al., 2009) with 1% crude oil. The suspension of bacteria (100 ml) was sprayed onto a region (0.1 acre) (dry bacterial product is prepared using following ratios: 0.2 kg of dry bacteria product suspended in 100 liters of aqueous solution and sprayed over 0.1 acre of contaminated soil (1 gram of dry bacteria product contain 7×10⁸ of bacterial cells) of the contaminated site from which the original soil sample was harvested as described in Step 1 above.

[0084] The inventor performed a second round of enrichment for oil-degrading bacteria. Twenty one days following reintroduction of enriched oil-degrading bacteria from the first round of enrichment (Steps 1-6 above), soil samples were again collected from the region of the contaminated site that had been inoculated with bacteria from the first round of enrichment. The soil samples were processed and bacteria were enriched as described in Steps 1-6 above, except that 2% crude oil in the growth media (instead of 1% crude oil) was used throughout the process. Following the second round of enrichment with 2% crude oil, bacteria were prepared as in Step 7, but were suspended in 100 ml of mineral salt medium with 2% crude oil then re-introduced onto the same region of the contaminated site from which the original soil sample was harvested as described in Step 1 above.

[0085] The inventor performed a third round of enrichment for oil-degrading bacteria as described for the first and second rounds, except that crude oil was added at 3% to growth media or suspension media as described above.

[0086] Following the third round of enrichment at Step 6, the bacteria were harvested, washed with PBS, suspended and plated onto LB agar medium with peptone, previously saturated with crude oil.

[0087] Using the methods described in this example, the inventor isolated 32 different bacterial strains from soil samples collected at twelve crude-oil contaminated sites near Galveston, Tex. and Texas City, Tex.

### Example 2

### Degradation of Crude Oil by Bacterial Strains Isolated from an Oil-Contaminated Environmental Site

[0088] Bacterial strains isolated from oil-contaminated soil were evaluated for their ability to degrade crude oil. Bacterial strains were inoculated separately onto LB agar solid culture medium having 1% tryptone. Each agar plate was covered with a thin (−2 mm) film of “Texas Crude Oil” (ONTA, Inc.; Toronto, Ontario, CA). Agar plates were incubated for 15 days at room temperature and evaluated for oil degradation. Two strains, Altogen Labs 322075 and Altogen Labs 635822, demonstrated the ability to break down crude oil, as indicated by a lightening of the darkly colored crude oil on the surface of the agar medium. FIG. 2 shows LB/tryptone/crude oil agar plates incubated with (FIG. 2A) or without (FIG. 2B) Altogen Labs strain 322075. The agar plate with strain 322075 shows degradation of the crude oil and the control plate with no bacteria exhibited no degradation of the crude oil. FIG. 3 shows LB/tryptone/crude oil agar plates incubated with (FIG. 3A) or without (FIG. 3B) Altogen Labs strain 635822. The agar plate with strain 635822 shows degradation of the crude oil and the control plate with no bacteria exhibited no degradation of the crude oil.

[0089] Using the same methods, the two bacterial strains were mixed prior to plating and evaluated for their ability to degrade crude oil as a mixed culture. FIG. 4 shows LB/tryptone/crude oil agar plates incubated with (FIG. 4A) or without (FIG. 4B) a mixture of Altogen Labs strains 322075 and 635822. The culture having the mixture of the two bacterial strains shows extensive degradation of the crude oil and the control plate with no bacteria shows no degradation of the oil.

### Example 3

### Field Test of Crude Oil Degradation by Bacterial Strains of the Invention

[0090] Generally, hydrocarbon-degrading microorganisms degrade branched alkanes such as pristane and phytane at much slower rates than their straight chain isomers, C₁₇, heptadecane and C₁₈, octadecane respectively. In contrast, most non-biological processes such as for example physical weathering, volatilization, and leaching do not cause differential losses of normal and branched hydrocarbons that have similar gas chromatographic and chemical behavior. (See Pritchard et al., Biodegradation 3:315-335, 1992)

[0091] The inventor used a field test and examined the C₁₈:phytane ratio in treated soil samples following treatment of crude oil-contaminated soil with the bacterial strains individually and with a mixture of the strains. Bacterial cultures were grown in LB broth (200 ml) containing peptone and 3% crude oil in a conical flask. The inoculated culture medium was incubated at 32° C. for 48 hrs on a rotary shaker at 100 rpm. Bacteria were harvested by centrifugation and suspended in an aqueous solution of distilled water having 12% (w/v) sucrose, 0.2% (w/v) agar, and 1.3% (w/v) gelatin, then dried by lyophilization. Dried bacteria (0.2 kg; 1.4×10¹¹ cells) were suspended in 100 L of an aqueous solution. The 100 L of bacterial solution was sprayed over 0.1 acre of crude oil-contaminated soil. The application day was designated Day 0. On days, 3, 6, 9, 12, 15, 18, 21, and 24 post treatment, samples of treated soil were collected and analyzed for C18:phytane ratios in the crude oil by gas chromotography (Mittal et al., 2009).

[0092] The C18:phytane ratios steadily decreased over the 24 days following treatment with Altogen strain 322075 (FIG. 5), Altogen strain 635822 (FIG. 6), or the mixture of strains 322075 and 635822 (FIG. 7), indicating that the straight chain C₁₈ alkane was degraded at a higher rate than was the branched-chain phytane. The lowes C18:phytane ratio at day 24 was observed in samples that were treated with the mixture of strains.

### Example 4

### 16S rRNA Sequence Analysis of Altogen Strains 322075 and 635822 and Species Identification

[0093] The inventor determined the sequences of the 16S rRNAs from Altogen strains 322075 and 635822. The genomic sequences of the strains are represented by the scaffolds that are represented in the sequence listing. A scaffold is a portion of the genome sequence reconstructed from end-sequenced whole-genome shotgun clones. Scaffolds are composed of contigs and gaps. A contig is a contiguous length of genomic sequence in which the order of bases is known to a high confidence level. Gaps occur where reads from the two sequenced ends of at least one fragment overlap with other reads in two different contigs (as long as the arrangement is otherwise consistent with the contigs being adjacent). Since the lengths of the fragments are roughly known, the number of bases between contigs can be estimated. The BLAST algorithm (Altschul et al. 1997) was used to identify closely related bacterial 16S rRNA sequences. Two phylogenetic trees were generated from the sequence relationships between the fifty highest scoring BLAST results. An alignment between these sequences was used to generate a Weighbor-Joining (weighted Neighbor-Joining) phylogenetic tree using the RDP (Ribosomal Database Project) Tree Builder tool at Michigan State University (Cole et al., 2008). All sequences from both trees are part of the Enterobacteriaceae family except for the two species used as outgroups. Both outgroups belong to the Vibrionaceae family, Vibrio mediterranei for the analysis of strain 635822 and Vibrio diazotrophicus for the analysis of strain 322075.

[0094] The 16S rRNA sequence determined from Altogen strain 635822 (1,021 nucleotides) was found to be most closely related to that of Serratia fonticola ATCC 29844 (1,490 nucleotides), accession number AJ233429. There was 99.5% sequence similarity and 0.7% ambiguities. The next most closely related species was determined to be S. proteamaculans with a distance score of 1.7%. Based on these data and guidelines, Altogen strain 635822 was determined to be a strain of Serratia fonticola.

[0095] The 16S rRNA sequence determined from Altogen strain 322075 (1,010 nucleotides) was found to be most closely related to that of Morganella morganii, ATCC 25830 (1,502 nucleotides), accession number AJ301681. There was 97.8% sequence similarity and 0.9% ambiguity. The next most closely related species was determined to be Providencia rustigianii with a distance score of 3.8%. Based on these data and guidelines, Altogen strain 322075 was identified as a strain of Morganella morganii.

### Example 5

### Genome Sequence Analysis of Serratia Fonticola Strain Altogen 635822 and Morganella MorganII Strain Altogen 322075

[0096] The genomes of Altogen strains 635822 and 322075 were determined by a shotgun sequencing method. For each genome, a paired end DNA library was constructed using 5 μg of genomic DNA sheared to an average size of 300 base pairs using a Covaris S2 sonication system (Covaris, Inc., Woburn, Mass., USA). Sheared DNA was treated with a mixture of T4 DNA polymerase, DNA polymerase I, large (Klenow) fragment, and T4 polynucleotide kinase to create blunt-ended DNA. A single adenine base was added to the 3′ end using DNA polymerase I, large (Klenow) fragment (3′ to 5′ exo-) and dATP. A-tailed DNA was ligated with paired end adaptors using T4 DNA ligase. All reagents came from the Paired-End DNA Sample Prep Kit (Illumina, Inc., San Diego, Calif., USA). Size selection of adaptor-ligated DNA was performed by isolation and purification of the target fragment size range (400 bp-450 bp) following agarose gel elctrophoresis of the DNA fragments. The excised fragments were amplified using in-gel PCR with the Phusion® High-Fidelity PCR kit (Illumina, Inc.).

[0097] Genome sequencing was performed by Cofactor Genomics (St. Louis, Mo.), USA using the Illumina Genome Analyzer IIx. Cluster generation and sequencing were performed according to the Cluster Station User Guide and Genome Analyzer Operations Guide provided by Illumina. Primary data (sequencing reads) were generated using the Illumina Pipeline version SCS 2.8.0 paired with OLB 1.8.0. The configuration file used as input to Illumina's GERALD software in the GAPipeline 1.5.1 for fragment runs was “USE_BASES Y*, SEQUENCE_FORMAT, —fastq, ANALYSIS sequence”. The configuration used for paired end runs was “USE_BASES Y*,Y*, SEQUENCE_FORMAT, —fastq, ANALYSIS sequence_pair”. Novoalign version 2.07.05 (Novocraft Technologies; Selangor, Malaysia) was used for all sequence alignments. Alignment parameters were: “-o SAM -F ILMFQ -r all-130-t 140-e 10”. The Cofactor Genomics (St. Louis, Mo., USA) assembly software pipeline is optimized to obtain the most contiguous assembly by filtering low occurrence observations. The software uses SOAPdenovo 1.05 for assembling the ILMN reads and determines the optimal assembly for each respective dataset.

[0098] The genome sequence determined for Serratia fonticola strain Altogen 635822 had a total assembly length of 5,681,221 bp in 185 scaffolds. For comparison, the genome sizes of four closely related organisms are (1) Serratia sp. AS13; 5,442,549 bp, (2) Serratia sp. AS12; 5,443,009 bp, (3) Serratia sp. AS9; 5,442,880 bp, and (4) Serratia proteamaculans 568; 5,448,853 bp.

[0099] The genome sequence determined for Morganella morganii strain Altogen 322075 had a total assembly length of 4,098,746 bp in 152 scaffolds. No complete genome sequences from closely related species were found to be publicly available for comparison.

[0100] For annotation of sequences, genome sequencing assemblies were uploaded to the automated annotation platform Rapid Annotation using Subsystems Technology (RAST) server maintained by the National Microbial Pathogen Data Resource (Aziz et al., BMC Genomics 9:75, 2008). For Altogen strain 635822, the genome sequence was found to have 5,078 protein encoding genes and 49 RNA encoding sequences. For Altogen strain 322075, the genome sequence was found to have 3,915 protein encoding genes 48 RNA encoding sequences. A single rRNA-encoding sequence was found for each organism.

### Example 6

### Genomic and Proteomic Analysis of Serratia Fonticola Strain Altogen 63582′2 and Morganella MorganII Strain Altogen 322075

[0101] Analyses of the genome sequences of Altogen strains 2635822 and 322075 were performed to identify potential genes and proteins that have significant sequence identity or similarity to genes and proteins that are known to be involved in petroleum oil degradation pathways or biosurfactant production pathways in other bacteria. Gene sequence data from related species were gathered from the literature, SEED Viewer (Overbeek et al., Nucleic Acids Res. 33:17, 2005) and the NCBI Biosystems database (Geer et al., Nucleic Acids Res. 38 (database issue):D492-D496, Epub 2009 Oct. 23, 2010). Subsequently, these sequences were used in a BLAST+ (blastp) query against a local database of the genome sequences from Altogen strains 635822 and 322075.

[0102] Biosurfactant associated proteins predicted to be encoded by genes from Altogen strain 635822 or strain 322075 and having significant sequence identity with similar proteins known to be produced by different bacterial species are shown in Table 1.

[0103] The biosurfactant, serrawettin W1, is produced by Serratia marcescens and its synthesis involves genes including pswP (phosphopantetheinyl transferase), swrW (unimodular synthetase, a nonribosomal peptide synthetase (NRPS)), and hexS (LysR-type transcriptional regulator). The proteins encoded by these genes were found to have significant sequence identity with predicted proteins encoded by similar genes in Altogen strain 635822 (Table 1). Altogen strain 322075 possesses a gene encoding a protein with significant sequence identity to HexS. HexS has been shown to simultaneously down-regulate swrW and prodigiosin synthesis while leaving pswP unaffected (Tanikawa et al., Microbiology and Immunolgy, 50:587-596, 2006). Genes encoding the prodigiosin synthesis pathway, starting with the pigA gene, are present in both Altogen strains (data not shown).

[0104] Quorum sensing systems are also known to regulate biosurfactant production. In Serratia liquefaciens, the quorum sensing genes swrI and swrR and N-acylhomoserine lactones (AHLs) have been implicated in the regulation of biosurfactants. Proteins encoded by swrI, swrR and AHL synthesis genes were found to have significant sequence identity with predicted proteins encoded by similar genes in Altogen strain 635822 (Table 1).

[0105] Serrawettin activity is generally temperature dependent in species of Serratia. Temperature dependent proteins derived from the genes tdrA were found to have significant sequence identity with predicted proteins encoded by similar genes in Altogen strains 635822 and 322075 (Table 1). Another temperature dependent protein, encoded by yhcR, has significant identity with a predicted protein encoded by a gene in Altogen strain 635822.

[0106] The bioemulsifier alasan found in species of Acinetobacter is a complex of a polysaccharide and the proteins AlnA, AlnB and AlnC. Both Altogen strains were found to have genes encoding predicted proteins similar to OmpA-like protein precursors involved in alasan biosynthesis. Furthermore, both strains also had genes encoding predicted proteins similar to AlnB Although AlnB by itself is not known to have emulsifying activity, it is known to stabilize oil-in-water emulsions generated by the OmpA-like protein AlnA

[0107] Rhamnolipids are well characterized bacterial surfactants. Both Altogen strains have genes encoding predicted proteins with significant sequence identity to known proteins involved in the rhamnolipid synthesis pathway (Table 1).

TABLE 1
Predicted biosurfactant-related proteins encoded by genes present in Altogen strain
635822 and Altogen strain 322075 are shown. Acc. No., accession number.

| | | | | | |
|---|---|---|---|---|---|
| RAST Protein | | | | | |
| Prediction for | | Bacterial | BLAST | % | |
| Altogen Strain | Protein | Species | E-Value | Identity | Acc. No. |

Biosurfactant Regulators - Strain 635822

| | | | | | |
|---|---|---|---|---|---|
| transcriptional | transcriptional | Serratia | 7e−160 | 85 | BAD11811.1 |
| regulator IrhA | regulator HexS | marcescens | | | |
| | (hexS) | | | | |
| probable | hypothetical | Serratia | 9e−31 | 94 | BAB85653.1 |
| membrane | protein for | marcescens | | | |
| protein YPO3684 | temperature | | | | |
| | dependent | | | | |
| | production (yhcR) | | | | |
| LysR family | putative | Serratia | 1e−163 | 91 | BAB84544.1 |
| transcriptional | temperature- | marcescens | | | |
| regulator QseA | dependent | | | | |
| | regulator A (tdrA) | | | | |

Biosurfactant Regulators - Strain 322075

| | | | | | |
|---|---|---|---|---|---|
| LysR family | LysR-family | Serratia | 7e−106 | 63 | BAD11811.1 |
| transcriptional | transcriptional | marcescens | | | |
| regulator IrhA | regulator HexS | | | | |
| | (hexS) | | | | |
| transcriptional | putative | Serratia | 2e−40 | 33 | BAB84544.1 |
| regulator, LysR | temperature- | marcescens | | | |
| family | dependent | | | | |
| | regulator A (tdrA) | | | | |

Biosurfactants - Strain 635822

| | | | | | |
|---|---|---|---|---|---|
| 4′-phosphopant- | putative 4′- | Serratia | 3e−78 | 62 | BAD11765.1 |
| etheinyl | phosphopant- | marcescens | | | |
| transferase (EC | etheinyl | | | | |
| 2.7.8.—) | transferase | | | | |
| [enterobactin] | (pswP) | | | | |
| siderophore | | | | | |
| Enterobactin | putative | Serratia | 6e−155 | 33 | BAD60917.1 |
| synthetase | serrawettin W1 | marcescens | | | |
| component F, | synthetase (swrW) | | | | |
| serine activating | | | | | |
| enzyme (EC | | | | | |
| 2.7.7.—) | | | | | |
| Alkyl | Peroxiredoxin, | Acinetobacter | 3e−29 | 38 | AAS77881.1 |
| hydroperoxide | alasan | radioresistens | | | |
| reductase subunit | biosynthesis | | | | |
| C-like protein | (alnB) | | | | |
| putative | OmpA-like protein | Acinetobacter | 5e−14 | 41 | AAK57731.1 |
| lipoprotein | precursor, alasan | radioresistens | | | |
| | biosynthesis | | | | |

Blosurfactants - Strain 32205

| | | | | | |
|---|---|---|---|---|---|
| Putative outer | OmpA-like protein | Acinetobacter | 7e−11 | 34 | AAK57731.1 |
| membrane | precursor, alasan | radioresistens | | | |
| lipoprotein | biosynthesis | | | | |
| Alkyl | Peroxiredoxin, | Acinetobacter | 2e−82 | 75 | AAS77881.1 |
| hydroperoxide | alasan | radioresistens | | | |
| reductase protein | biosynthesis | | | | |
| C (EC 1.6.4.—) | (alnB) | | | | |

Quorum Sensing - Strain 635822

| | | | | | |
|---|---|---|---|---|---|
| Quorum-sensing | SwrR (swrR) | Serratia | 6e−62 | 46 | AAO38761.1 |
| transcriptional | | liquefaciens | | | |
| activator YspR | | | | | |
| N-3-oxooctanoyl- | SwrI (swrI) | Serratia | 8e−62 | 69 | AAB18141.1 |
| L-homoserine | | liquefaciens | | | |
| lactone synthase; | | | | | |
| N-3-oxohexanoyl- | | | | | |
| L-homoserine | | | | | |
| lactone synthase | | | | | |
| Regulatory | putative quorum- | Serratia | 5e−15 | 32 | ZP_08039640.1 |
| protein RecX | sensing regulatory | symbiotica str. | | | |
| | protein (spnT) | Tucson | | | |
| Homoserine | SplI (splI) | Serratia | 4e−44 | 40 | AAR32908.1 |
| lactone synthase | | plymuthica RVH1 | | | |
| YpeI | | | | | |

Quorum Sensing - Strain 322075

| | | | | | |
|---|---|---|---|---|---|
| Regulatory | putative quorum- | Serratia | 2e−29 | 42 | ZP_08039640.1 |
| protein recX | sensing regulatory | symbiotica str. | | | |
| (oraA protein) | protein (spnT) | Tucson | | | |

Rhamnolipid Synthesis - Strain 635822

| | | | | | |
|---|---|---|---|---|---|
| Phosphomanno- | Phosphomanno- | Pseudomonas | 2e−52 | 33 | P26276.4 |
| mutase (EC | mutase/ | aeruginosa | | | |
| 5.4.2.8) | phosphogluco- | PAO1 | | | |
| | mutase, PMM/ | | | | |
| | PGM (algC) | | | | |
| 3-oxoacyl-[acyl- | rhamnolipid | Mycobacterium | 1e−30 | 38 | YP_884537.1 |
| carrier protein] | biosynthesis 3- | smegmatis str. | | | |
| reductase (EC | oxoacyl-ACP | MC2 155 | | | |
| 1.1.1.100) | reductase | | | | |
| 2-deoxy-D- | NADPH- | Pseudomonas | 7e−29 | 34 | AAD53514.1 |
| gluconate 3- | dependent beta- | aeruginosa | | | |
| dehydrogenase | ketoacyl reductase | PAO1 | | | |
| (EC 1.1.1.125) | (rhlG) | | | | |
| Putative lipase | Esterase EstA, | Pseudomonas | 2e−27 | 27 | O33407.1 |
| | Autotransporter | aeruginosa | | | |
| | esterase EstA | PAO1 | | | |
| | (estA or papA) | | | | |
| Septum site- | MotR | Pseudomonas | 3e−12 | 27 | AAC62540.2 |
| determining | | aeruginosa | | | |
| protein MinD | | | | | |
| COG1720: | RcsF (rcsF) | Pseudomonas | 5e−51 | 51 | AAD53515.1 |
| Uncharacterized | | aeruginosa | | | |
| conserved protein | | PAO1 | | | |
| dTDP-rhamnosyl | rhamnosyltransferase- | Pseudomonas | 6e−23 | 29 | CBI71058.1 |
| transferase RfbF | 2 (rhlC) | aeruginosa | | | |
| (EC 2.—.—.—) | | | | | |
| Cyclohexadienyl | Cyclohexadienyl | Pseudomonas | 4e−68 | 47 | Q01269.2 |
| dehydratase (EC | dehydratase, | aeruginosa | | | |
| 4.2.1.51)(EC | Prephenate | PAO1 | | | |
| 4.2.1.91) | dehydratase, | | | | |
| | Arogenate | | | | |
| | dehydratase | | | | |
| | (pheC) | | | | |

Rhamnolipid Synthesis - Strain 322075

| | | | | | |
|---|---|---|---|---|---|
| Phosphoglucos- | Phosphomanno- | Pseudomonas | 2e−25 | 27 | P26276.4 |
| amine mutase | mutase/ | aeruginosa | | | |
| (EC 5.4.2.10) | phosphogluco- | PAO1 | | | |
| | mutase, PMM/ | | | | |
| | PGM (algC) | | | | |
| 3-oxoacyl-[acyl- | rhamnolipid | Mycobacterium | 8e−24 | 33 | YP_884537.1 |
| carrier protein] | biosynthesis 3- | smegmatis str. | | | |
| reductase (EC | oxoacyl-ACP | MC2 155 | | | |
| 1.1.1.100) | reductase | | | | |
| 3-oxoacyl-[acyl- | NADPH- | Pseudomonas | 6e−29 | 33 | AAD53514.1 |
| carrier protein] | dependent beta- | aeruginosa | | | |
| reductase (EC | ketoacyl reductase | PAO1 | | | |
| 1.1.1.100) | (rhlG) | | | | |
| Septum site- | MotR | Pseudomonas | 3e−12 | 25 | AAC62540.2 |
| determining | | aeruginosa | | | |
| protein MinD | | | | | |
| COG1720: | RcsF (rcsF) | Pseudomonas | 3e−49 | 49 | AAD53515.1 |
| Uncharacterized | | aeruginosa | | | |
| conserved protein | | PAO1 | | | |
| Cystine ABC | Cyclohexadienyl | Pseudomonas | 8e−15 | 27 | Q01269.2 |
| transporter, | dehydratase, | aeruginosa | | | |
| periplasmic | Prephenate | PAO1 | | | |
| cystine-binding | dehydratase, | | | | |
| protein FliY | Arogenate | | | | |
| | dehydratase | | | | |
| | (pheC) | | | | |

[0108] Both Altogen strains were analyzed for gene sequences and predicted protein sequences that may be involved in crude oil degradation pathways. Proteins involved in hydrocarbon metabolism that are predicted to be encoded from genes present in Altogen strain 635822 or strain 322075 and that have significant sequence identity with similar proteins known to be produced by different bacterial species are shown in Table 2.

[0109] Protocatechuate dioxygenases are known to cleave aromatic rings such as those present in PAHs. Benzene, toluene, xylenes, phenol, naphthalene, and biphenyl are among a group of compounds that have at least one reported pathway for biodegradation involving catechol dioxygenase enzymes. Thus, detection of the corresponding catechol dioxygenase genes can serve as a basis for identifying bacteria that have these catabolic abilities. Sequence analyses revealed that the protocatechuate 4,5-dioxygenase protein (extradiol catechol dioxygenase that catalyzes the oxidative cleavage of substituted catechols; part of the bacterial aromatic compound degradation pathway) produced by Serratia proteamaculans has significant sequence identity with a predicted protein encoded by a gene in Altogen strain 635822 Table 2.

[0110] Serratia proteamaculans 568 produces three proteins used in the degradation of aromatic compounds. The enzyme 4-hydroxy-2-ketovalerate aldolase catalyzes the formation of pyruvate and acetaldehyde from 4-hydroxy-2-ketovaleric acid and is involved in the degradation of phenylpropionate. The enzyme 4-hydroxy-2-oxovalerate aldolase, encoded by the gene mhpE, is also involved in the catabolism of phenylpropionate. Beta alanine pyruvate transaminase catalyzes the formation of pyruvate and beta-alanine from L-alanine and 3-oxopropanoate. Both Altogen strains were found to have genes encoding predicted proteins with sequence identity to each of these three proteins (Table 2).

[0111] Rubredoxin and rubredoxin reductase proteins are known to have roles in alkane metabolism. A rubredoxin reductase from Acinetobacter has sequence identity with a predicted protein encoded by a gene from Altogen strain 635822 (data not shown). Two predicted proteins, rubredoxin and rubredoxin reductase, encoded by genes in Altogen strain 322075, were found to have significant sequence identity with proteins produced by Acinetobacter sp. ADP1 (Table 2).

TABLE 2
Predicted hydrocarbon degradation pathway proteins encoded by genes present in
Altogen strain 635822 and Altogen strain 322075 are shown. Acc. No., accession number.

| | | | | | |
|---|---|---|---|---|---|
| RAST Protein | | | | | |
| Prediction for | | Bacterial | BLAST | % | |
| Altogen Strain | Protein | Species | E-Value | Identity | Acc. No. |

Aromatic Hydrocarbon Degradation - Strain 635822

| | | | | | |
|---|---|---|---|---|---|
| 2,3-dihydroxy- | protocatechuate | Serratia | 7e−11 | 27 | YP_001478327.1 |
| phenylpropionate | 4,5-dioxygenase | proteamaculans | | | |
| 1,2-dioxygenase | | | | | |
| (EC 1.13.11.—) | | | | | |
| Putative O- | putative O- | Yersinia | 4e−140 | 65 | YP_001005235.1 |
| methyltransferase | methyltransferase | enterocolitica | | | |
| | | subsp. | | | |
| | | enterocolitica | | | |
| | | 8081 | | | |
| 2,3-dihydroxy- | 2,3-dihydroxy-2,3- | Pseudomonas | 5e−47 | 42 | YP_534824.1 |
| 2,3-dihydro- | dihydro- | putida | | | |
| phenylpropionate | phenylpropionate | | | | |
| dehydrogenase | dehydrogenase | | | | |
| (EC 1.3.1.—) | (nahB) | | | | |
| Dihydrodipico- | Trans-O- | Pseudomonas | 4e−12 | 25 | P0A144.1 |
| linate synthase | hydroxybenzyl- | putida | | | |
| (EC 4.2.1.52) | idenepyruvate | | | | |
| | hydratase- | | | | |
| | aldolase (nahE) | | | | |
| Long-chain fatty | aromatic | Serratia sp. AS12 | 0 | 80 | YP_004501990.1 |
| acid transport | hydrocarbon | | | | |
| protein | degradation | | | | |
| | membrane protein | | | | |
| 2,4- | 2,4-dihydroxyhept- | Serratia sp. AS13 | 1e−137 | 89 | AEG26382.1 |
| dihydroxyhept-2- | 2-ene-1,7-dioic | | | | |
| ene-1,7-dioic acid | acid aldolase | | | | |
| aldolase (EC | | | | | |
| 4.1.2.—) | | | | | |
| 5-carboxymethyl- | 4-hydroxyphenyl- | Serratia sp. AS13 | 4e−139 | 92 | AEG26377.1 |
| 2-oxo-hex-3-ene- | acetate degradation | | | | |
| 1,7-dioate | bifunctional | | | | |
| decarboxylase | isomerase/de- | | | | |
| (EC 4.1.1.68)/2- | carboxylase, HpaG | | | | |
| hydroxyhepta- | 2 subunit | | | | |
| 2,4-diene-1,7- | | | | | |
| dioate isomerase | | | | | |
| (EC 5.3.3.—) | | | | | |
| 2-oxo-hepta-3- | 2-oxo-hepta-3- | Serratia sp. AS13 | 9e−153 | 96 | AEG26381.1 |
| ene-1,7-dioic acid | ene-1,7-dioic acid | | | | |
| hydratase (EC | hydratase | | | | |
| 4.2.—.—) | | | | | |
| 5-carboxymethyl- | 4-hydroxyphenyl- | Serratia sp. AS13 | 4e−139 | 92 | AEG26376.1 |
| 2-oxo-hex-3-ene- | acetate | | | | |
| 1,7-dioate | degradation | | | | |
| decarboxylase | bifunctional | | | | |
| (EC 4.1.1.68)/2- | isomerase/de- | | | | |
| hydroxyhepta- | carboxylase, | | | | |
| 2,4-diene-1,7- | HpaG1 subunit | | | | |
| dioate isomerase | | | | | |
| (EC 5.3.3.—) | | | | | |
| Transcriptional | transcriptional | Serratia sp. AS13 | 3e−160 | 89 | AEG26384.1 |
| activator of 4- | regulator, AraC | | | | |
| hydroxyphenyl- | family | | | | |
| acetate 3- | | | | | |
| monooxygenase | | | | | |
| operon, | | | | | |
| XylS/AraC family | | | | | |
| 3-dehydroquinate | 3-dehydroquinate | Serratia sp. AS13 | 2e−69 | 93 | AEG30273.1 |
| dehydratase II | dehydratase | | | | |
| (EC 4.2.1.10) | | | | | |
| Phenylacetaldehyde | Phenylacetaldehyde | Serratia sp. AS13 | 0 | 90 | AEG26721.1 |
| dehydrogenase | dehydrogenase | | | | |
| (EC 1.2.1.39) | | | | | |
| 3,4- | 3,4- | Serratia | 6e−164 | 94 | ABV39734.1 |
| dihydroxyphenylacetate | dihydroxyphenylacetate | proteamaculans | | | |
| 2,3- | 2,3- | 568 | | | |
| dioxygenase (EC | dioxygenase | | | | |
| 1.13.11.15) | | | | | |
| 4-hydroxyphenyl- | 4-hydroxyphenyl- | Serratia | 0 | 92 | ABV39738.1 |
| acetate | acetate | proteamaculans | | | |
| symporter, major | transporter | 568 | | | |
| facilitator | | | | | |
| superfamily | | | | | |
| (MFS) | | | | | |
| 5-carboxymethyl- | 5-carboxymethyl- | Serratia | 4e−65 | 87 | ABV39735.1 |
| 2-hydroxymuconate | 2-hydroxymuconate | proteamaculans | | | |
| delta- | isomerase | 568 | | | |
| isomerase (EC | | | | | |
| 5.3.3.10) | | | | | |
| 5-carboxymethyl- | 5-carboxymethyl-2 | Serratia | 0 | 98 | ABV39733.1 |
| 2 hydroxy-muconate | hydroxy-muconate | proteamaculans | | | |
| semialdehyde | semialdehyde | 568 | | | |
| dehydrogenase | dehydrogenase | | | | |
| (EC 1.2.1.60) | | | | | |
| Benzoate | benzoate | Serratia | 0 | 86 | ABV41331.1 |
| transport protein | transporter | proteamaculans | | | |
| | | 568 | | | |
| Aldehyde | phenylacetic acid | Serratia | 0 | 90 | ABV42172.1 |
| dehydrogenase | degradation | proteamaculans | | | |
| (EC 1.2.1.3), | protein paaN | 568 | | | |
| PaaZ | | | | | |
| Esterase ybfF | alpha/beta | Pectobacterium | 8e−102 | 69 | YP_003016794.1 |
| (EC 3.1.—.—) | hydrolase fold | carotovorum | | | |
| | protein | subsp. | | | |
| | | cartovorum PC1 | | | |
| Acetaldehyde | acetaldehyde | Klebsiella | 2e−147 | 84 | ACI11884.1 |
| dehydrogenase, | dehydrogenase | pneumoniae 342 | | | |
| acetylating, (EC | (mhpF) | | | | |
| 1.2.1.10) in gene | | | | | |
| cluster for | | | | | |
| degradation of | | | | | |
| phenols, cresols, | | | | | |
| catechol | | | | | |
| Monoamine | Primary-amine | Enterobacter | 0 | 79 | ADO48675.1 |
| oxidase (1.4.3.4) | oxidase | cloacae SCF1 | | | |
| 3-phenylpropionate | 3-phenylpropionate | Escherichia coli | 1e−20 | 76 | CBG35577.1 |
| dioxygenase | dioxygenase | 042 | | | |
| ferredoxin subunit | ferredoxin subunit | | | | |
| | (hcaC) | | | | |
| 3-phenylpropionate | 3-phenylpropionate | Escherichia coli | 3e−110 | 55 | CBG35579.1 |
| dioxygenase | dioxygenase | 042 | | | |
| ferredoxin-- | ferredoxin-- | | | | |
| NAD(+) | NAD(+) reductase | | | | |
| reductase | component (hcaD) | | | | |
| component (EC | | | | | |
| 1.18.1.3) | | | | | |
| Transcriptional | Transcriptional | Salmonella | 1e−61 | 80 | P40676.3 |
| regulator SlyA | regulator slyA, | enterica subsp. | | | |
| | Cytolysin slyA, | enterica serovar | | | |
| | Salmolysin (slyA) | Typhimurium | | | |
| Oxidoreductase | 3-hydroxyisobutyrate | Pseudomonas | 6e−43 | 40 | P28811.1 |
| YihU | dehydrogenase | aeruginosa PAO1 | | | |
| | (mmsB) | | | | |
| 2-octaprenyl-3- | 3-(3-hydroxy- | Escherichia coli | 3e−13 | 27 | P77397.1 |
| methyl-6- | phenyl)propionate/ | K-12 | | | |
| methoxy-1,4- | 3- | | | | |
| benzoquinol | hydroxycinnamic | | | | |
| hydroxylase (EC | acid hydroxylase | | | | |
| 1.14.13.—) | (mhpA) | | | | |
| Phenylacetate- | oxygenase | Rhodococcus | 2e−47 | 33 | AAL96830.1 |
| CoA | reductase KshB | erythropolis | | | |
| oxygenase/reductase, | (kshB) | | | | |
| PaaK | | | | | |
| subunit | | | | | |
| 4-hydroxy-2- | 4-hydroxy-2- | Serratia | 6e−65 | 42 | YP_001479254.1 |
| oxovalerate | ketovalerate | proteamaculans | | | |
| aldolase (EC | aldolase | 568 | | | |
| 4.1.3.—) | | | | | |
| Adenosylmethionine- | beta alanine-- | Serratia | 5e−46 | 31 | YP_001476841.1 |
| 8-amino-7- | pyruvate | proteamaculans | | | |
| oxononanoate | transaminase | 568 | | | |
| aminotransferase | | | | | |
| (EC 2.6.1.62) | | | | | |

Aromatic Hydrocarbon Degradation - Strain 322075

| | | | | | |
|---|---|---|---|---|---|
| Lysine-N- | flagellin lysine-N- | Yersinia | 4e−50 | 29 | YP_001006727.1 |
| methylase (EC | methylase (fliB) | enterocolitica | | | |
| 2.1.1.—) | | subsp | | | |
| | | enterocolitica | | | |
| | | 8081 | | | |
| O- | hydroxyneurosporene- | Enterobacter sp. | 2e−71 | 39 | YP_001176654.1 |
| demethylpuromycin- | O- | 638 | | | |
| O- | methyltransferase | | | | |
| methyltransferase | | | | | |
| (EC 2.1.1.38) | | | | | |
| Short-chain | 2,3-dihydroxy-2,3- | Pseudomonas | 1e−19 | 30 | YP_534824.1 |
| dehydrogenase/reductase | dihydrophenylpropionate | putida | | | |
| SDR | dehydrogenase | | | | |
| | (nahB) | | | | |
| Long-chain fatty | aromatic | Serratia sp. AS12 | 8e−155 | 60 | YP_004501990.1 |
| acid transport | hydrocarbon | | | | |
| protein | degradation | | | | |
| | membrane protein | | | | |
| FIG094199: | 4- | Serratia sp. AS13 | 2e−29 | 34 | AEG26377.1 |
| Fumarylacetoacetate | hydroxyphenylacetate | | | | |
| hydrolase | degradation | | | | |
| | bifunctional | | | | |
| | isomerase/decarboxylase, | | | | |
| | HpaG2 | | | | |
| | subunit | | | | |
| transcriptional | transcriptional | Serratia sp. AS13 | 2e−12 | 37 | AEG26384.1 |
| regulator, AraC | regulator, AraC | | | | |
| family | family | | | | |
| 3-dehydroquinate | 3-dehydroquinate | Serratia sp. AS13 | 7e−58 | 80 | AEG30273.1 |
| dehydratase II | dehydratase | | | | |
| (EC 4.2.1.10) | | | | | |
| Nitrate/nitrite | 4- | Serratia | 5e−62 | 31 | ABV39738.1 |
| transporter | hydroxyphenylacetate | proteamaculans | | | |
| | transporter | 568 | | | |
| Aldehyde | 5-carboxymethyl- | Serratia | 1e−98 | 38 | ABV39733.1 |
| dehydrogenase B | 2- | proteamaculans | | | |
| (EC 1.2.1.22) | hydroxymuconate | 568 | | | |
| | semialdehyde | | | | |
| | dehydrogenase | | | | |
| Benzoate | benzoate | Serratia | 2e−117 | 61 | ABV41331.1 |
| transport protein | transporter | proteamaculans | | | |
| | | 568 | | | |
| Esterase ybfF | alpha/beta | Pectobacterium | 3e−88 | 63 | YP_003016794.1 |
| (EC 3.1.—.—) | hydrolase fold | carotovorum | | | |
| | protein | subsp. | | | |
| | | carotovorum PC1 | | | |
| Transcriptional | Transcriptional | Escherichia coli | 2e−48 | 67 | P40676.3 |
| regulator SlyA | regulator slyA, | 042 | | | |
| | Cytolysin slyA | | | | |
| | (slyA) | | | | |
| NADH | oxygenase | Rhodococcus | 9e−27 | 28 | AAL96830.1 |
| oxidoreductase | reductase KshB | erythropolis | | | |
| hcr (EC 1.—.—.—) | (kshB) | | | | |
| 2-isopropylmalate | 4-hydroxy-2- | Serratia | 2e−14 | 26 | YP_001479254.1 |
| synthase (EC | ketovalerate | proteamaculans | | | |
| 2.3.3.13) | aldolase | 568 | | | |
| Adenosylmethionine- | beta alanine-- | Serratia | 5e−43 | 29 | YP_001476841.1 |
| 8-amino-7- | pyruvate | proteamaculans | | | |
| oxononanoate | transaminase | 568 | | | |
| aminotransferase | | | | | |
| (EC 2.6.1.62) | | | | | |

Alkane Degradation - Strain 635822

| | | | | | |
|---|---|---|---|---|---|
| Coenzyme F420- | alkane | Geobacillus | 8e−69 | 34 | YP_001127577.1 |
| dependent | monoxygenase | thermodenitrificans | | | |
| N5,N10- | (ladA) | NG80-2 | | | |
| methylene | | | | | |
| tetrahydromethan | | | | | |
| opterin reductase | | | | | |
| and related flavin- | | | | | |
| dependent | oxidoreductases | | | | |
| Alkylated DNA | alkylated DNA | Serratia odorifera | 4e−106 | 90 | ZP_06639663.1 |
| repair protein | repair protein AlkB | DSM 4582 | | | |
| AlkB | (alkB) | | | | |

Alkane Degradation - Strain 322075

| | | | | | |
|---|---|---|---|---|---|
| Anaerobic nitric | Rubredoxin (rubA) | Acinetobacter sp. | 2e−9 | 46 | YP_045776.1 |
| oxide reductase | | ADP1 | | | |
| flavorubredoxin | | | | | |
| Nitric oxide | rubredoxin- | Acinetobacter sp. | 8e−53 | 34 | YP_045775.1 |
| reductase FIRd- | NAD(+) reductase | ADP1 | | | |
| NAD(+) | (rubB) | | | | |
| reductase (EC | | | | | |
| 1.18.1.—) | | | | | |
| Alkylated DNA | alkylated DNA | Serratia odorifera | 2e−56 | 53 | ZP_06639663.1 |
| repair protein | repair protein AlkB | DSM 4582 | | | |
| AlkB | (alkB) | | | | |

Naphthalene Degradation - Strain 635822

| | | | | | |
|---|---|---|---|---|---|
| Alcohol | acetaldehyde | Serratia sp. AS12 | 0 | 97 | YP_004501163.1 |
| dehydrogenase | dehydrogenase | | | | |
| (EC 1.1.1.1); | | | | | |
| Acetaldehyde | | | | | |
| dehydrogenase | | | | | |
| (EC 1.2.1.10) | | | | | |
| Alcohol | alcohol | Serratia sp. AS12 | 4e−31 | 29 | YP_004500817.1 |
| dehydrogenase | dehydrogenase | | | | |
| (EC 1.1.1.1) | GroES domain- | | | | |
| | containing protein | | | | |
| Alcohol | iron-containing | Serratia | 0 | 89 | YP_001479882.1 |
| dehydrogenase | alcohol | proteamaculans | | | |
| (EC 1.1.1.1) | dehydrogenase | 568 | | | |
| L-threonine 3- | alcohol | Serratia | 9e−31 | 28 | YP_001478632.1 |
| dehydrogenase | dehydrogenase | proteamaculans | | | |
| (EC 1.1.1.103) | | 568 | | | |
| S- | S- | Serratia | 0 | 96 | YP_001477789.1 |
| (hydroxymethyl)glutathione | (hydroxymethyl)glutathione | proteamaculans | | | |
| dehydrogenase | dehydrogenase | 568 | | | |
| (EC 1.1.1.284) | | | | | |
| Putative Rieske | ferredoxin | Pseudomonas | 2e−15 | 30 | YP_534821.1 |
| protein | component NahAb | putida | | | |
| | of naphthalene | | | | |
| | dioxygenase | | | | |
| | (nahAb) | | | | |
| NAD(P)H-flavin | reductase | Pseudomonas | 2e−21 | 29 | YP_534820.1 |
| reductase (EC | component NahAa | putida | | | |
| 1.5.1.29) (EC | of naphthalene | | | | |
| 1.16.1.3) | dioxygenase | | | | |
| | (nahAa) | | | | |
| 3- | Naphthalene 1,2- | Pseudomonas | 7e−76 | 36 | P0A110.1 |
| phenylpropionate | dioxygenase | putida | | | |
| dioxygenase, | subunit alpha, | | | | |
| alpha subunit (EC | Naphthalene 1,2- | | | | |
| 1.14.12.19) | dioxygenase IS | | | | |
| | (ndoB) | | | | |

Naphthalene Degradation - Strain 322075

| | | | | | |
|---|---|---|---|---|---|
| Alcohol | acetaldehyde | Serratia sp. AS12 | 0 | 89 | YP_004501163.1 |
| dehydrogenase | dehydrogenase | | | | |
| (EC 1.1.1.1); | | | | | |
| Acetaldehyde | | | | | |
| dehydrogenase | | | | | |
| (EC 1.2.1.10) | | | | | |
| S- | S- | Serratia sp. AS12 | 5e−157 | 73 | YP_004499970.1 |
| (hydroxymethyl)glutathione | (hydroxymethyl)glutathione | | | | |
| dehydrogenase | dehydrogenase/class | | | | |
| (EC 1.1.1.284) | III alcohol | | | | |
| | dehydrogenase | | | | |
| Ethanolamine | iron-containing | Serratia | 6e−65 | 39 | YP_001479882.1 |
| utilization protein | alcohol | proteamaculans | | | |
| EutG | dehydrogenase | 568 | | | |
| Alcohol | alcohol | Serratia | 3e−146 | 80 | YP_001478632.1 |
| dehydrogenase | dehydrogenase | proteamaculans | | | |
| (EC 1.1.1.1) | | 568 | | | |
| NAD(P)H-flavin | reductase | Pseudomonas | 5e−24 | 30 | YP_534820.1 |
| reductase (EC | component NahAa | putida | | | |
| 1.5.1.29) (EC | of naphthalene | | | | |
| 1.16.1.3) | dioxygenase | | | | |
| | (nahAa) | | | | |

1.-14. (canceled)

15. A method for reducing crude oil contamination comprising contacting a crude oil contaminated site with a crude oil degrading bacterium selected by methods comprising (i) isolating an initial crude oil degrading bacterium by culturing bacteria in a sample from the crude oil contaminated site with a medium comprising about 1% crude oil or crude oil derivatives; (ii) conditioning the initial crude oil degrading bacteria by introducing the initial crude oil degrading bacteria to the crude oil contaminated site and isolating a conditioned crude oil degrading bacterium from the crude oil contaminated site; and (iii) enhancing the conditioned crude oil degrading bacteria by culturing the conditioned bacteria one or more times with a medium comprising at least 2% crude oil or crude oil derivatives.

16. A method of proactively treating a site at risk of crude oil contamination comprising introducing a bacteria to a non-contaminated site selected by methods comprising (i) isolating an initial crude oil degrading bacterium by culturing bacteria in a sample from the non-contaminated site with a medium comprising about 0.25% crude oil or crude oil derivatives; (ii) conditioning the initial crude oil degrading bacteria by introducing the initial crude oil degrading bacteria to the non-contaminated site and isolating a conditioned crude oil degrading bacterium from the non-contaminated site; and (iii) enhancing the conditioned crude oil degrading bacteria by culturing the conditioned bacteria one or more times using a medium comprising at least 1% crude oil or crude oil derivatives.

17. The method of claim 15, wherein the crude oil composition comprises at least 15% polyaromatic hydrocarbons.

18. The method of claim 15, wherein the crude oil composition comprises at least 30% polyaromatic hydrocarbons.

19. The method of claim 15, wherein the crude oil composition comprises at least 40% polyaromatic hydrocarbons.

20. The method of claim 15, further comprising culturing the selected crude oil degrading bacterium on a culture medium comprising at least 5% crude oil or crude oil derivatives.

21. The method of claim 16, wherein the crude oil composition comprises at least 15% polyaromatic hydrocarbons.

22. The method of claim 16, wherein the crude oil composition comprises at least 30% polyaromatic hydrocarbons.

23. The method of claim 16, wherein the crude oil composition comprises at least 40% polyaromatic hydrocarbons.

24. The method of claim 16, further comprising culturing the selected crude oil degrading bacterium on a culture medium comprising at least 2% crude oil or crude oil derivatives.

The application's sequence listing, which the Patent Office published only in electronic form, follows.

SEQUENCE LISTING (559 sequences)

SEQ ID NO: 1 - DNA, 2661 bp, unknown
  Altogen 322075 strain
cgggttaccgttgccgtccaccaattgtgcggtataggtaaagaagctgacaccatccgctactttctgagtgacagcgtcgtccagctctactgtcccgactttggctgacgcaatgttatagatgaagctgacggttttatccgccggcacgactaccgtttcctggtactgcgcgctgacacggacatcatccaccgccgtggtggtcgaaatcagcgtgatagtcgctttaccatcggcatcggttttactgacaacggaggacagtttcaccgccgcacctttatcctgggtccatttcacatccaggtttgctttgcggacagggttaccgttgctgtccaccagctgtgcggtataggtaaagctgctggtgccgtctgccactttctccgtgacagcgccattcagctccacagtgccgactttggccatattaatgttgaagataaagctgacagttttgtttgcaggtaccacagccgtttctgcgtactgtgcactgacacggatattctccgctgcttttttggtcgacgtcagagtaataacggctttaccgtccgcatccgttttactggttgcggctgacagcaccacatcactgcctttatcctgcgtccatttcacatccagatccgcctgacggatcgggttgttattggcatccaccagttgtgccgtgtaggtaaagctgctgaggccatcggcgactttttcagtcacactgccgttcagttccaccttgctgactctggctgaggcaacgttataaataaagctgatggctttatccgcctgaataaccggcgtaccggcatactgcgcactgacacggatgttatccgccactttggtggtggagatcagagtgatagtcgccacaccgtctgcgttggttttgctggtttccgccgacagcaccacatcgctgcctttgttctgcgtccacttcacatccagatccgcctgacggatcgggttaccattaccatccaccagttgcgcggtataggtaaagctgctgagaccatcagccactttctgagtgacatcgccgttcagcgtgactttactgaccttcgcagtgtcgatgttatagataaagttaacactcttatccgcatccacacttaccccgccgtccagcgccgcgctgacaagaacattgtccatcgctttattggtaccggctaaggtaatggtgattttaccttccgcattggtggtgcctgttaccagtacaactgctgccggattatctgcggatgcagtaaccgggacaccctggatcgggttaccattgttatcctgaaccaggacagtataggtgaagttatctgtaccgttggcaactttggttgtctgatcaccgtttaacagcacactgcgaacagccatcgagctgttatcaggtgtgatacggacaacggtggttttaccggctgcgtctgtggcgttgatcgcacggacagtcgcatcacccacacgggtaccggtcagtgtaaaggttgcctcaccgttgctgccggtaacgacattctgatcactcagttggccgagtgtggttgtcaggttaacggtgttacccgggatcacgttattaaaggcatctttcaccgtcacggtgagcatcgcctgctcagtaccgtcagcaataatggctttcttgtcactgatcagggacgtgatggttgcggtggacagatccggaacaaaggtcagaaccgcagtttcacggctgtcattgatactgaaggtatagttatcctgacccgctttggtattggtgatattcacccgcagctggccattactgtctgtcagaccaccggcaggctgagtcagataaccggcagttcccggtactttgattgtcaccggtgcaccggcgatcgggttgttgcggttatcagtgacggttaccagaacactgttcttcgctttaccatcagccgccgaattatcctgagttaccacaacactctgaatcttcgcggtactgatatccgcgataaactgtgctgtcacactcttcgacgtgcccgttccctcaaccaccagcttggaatccccggccgtttcactgctgaaccggatagtgacctggccgttgctgtcagtctgctggttcggatccgcgactgtcgcaccgttatccgctctggacgttaacgggaagttttccaccaggttatcaaactggtcagtcaccgttgccacagcgatgtttttcgcctgaccatcggccactgctttgttattggttaattcaagcgttttgatttttgcggtactgagatccgcaatctaggtgatcgcttcggtacggctgttaccgttacgcatcttggctttcagcaatcctttaccggcggatttactgatgattttcacggtcgccgtgccgtccggcccggagatcacggtcagtgtctggccgctgttgccgtccgcatcataaatggtcacgccttccggatttttcaggccggaaacgctgaaagtcactgctttattcggcagcacttcgcccttgtcattctgtaacagtgccacagcagtgaactgatcgctgttgttggcgattaaggattggttcggcgtgacggtcagtttggtgatggtttccactgacggaataacattcacccacat

SEQ ID NO: 2 - DNA, 8584 bp, unknown
  Altogen 322075 strain
cggatccggactttcatatcgtggaccacggatgcctgaccggatgccatatcccactgcgcgcggatggagttctgcgccagcgccagtccgtcttctgctttaacctgtaccgcgtccagtttctccgcaagtgccgttgtttccgtaaccgtgtagttgcggacatcgatgatttctgctttcataacaccgttttcacgctgccagtaaccccactgaccgtaaacgttattggcgttgttgataatggcctcgaagttatcattcgcctgagactgcaggcctttaatgatggctgagtcttcgagctctttttgcactacatcgaatatttcatccgcatggttattggactgacctttttcttcaataaaatgagatttaccatactcattaatacttcggatataaaaccagtaatcatgtccgggctttaactgaccttttgaccatacttttgctctgccaaggaattcagcctcctgttcaatgttattaatgttggtaattctttgctcgccggaaaaccaaaattcaaactcagtattcagtgtgtgcggggcactgatatgtggtatcaatttcacctcaaagaagcctgactcaacgctgataaacgaaggggccgctggcgcaccaataaccatcagcactttcgactcgcttcccagcattccatttttatctttgccgcgtacgccaaccagatattccccagcggccaatccgttgaaataatattcaagatcagacgtttcaccagtaaggacaaccttgtcatctttataaacagaaacaacgtaagaaatattgcggttagctgttgtcatggcccacataactctggcctgaacctgagagctgtcattgatataagctacggaaaggcgttcaatgtcagggattcgaaccgtattttgtgcagacggattaccggtgaaattaacaccatcatctacaatgcgctccttttttggttcatggagaatacagttaaactgatagttcccgtctttatcttcagtaatagtcagtacccggaacattcgcgtaatcagcgtgtttttcgatacagaaaacacaccgaatttttgcagtccggctggttcgctcttcaggataacaatgtcgccatctactgatgatatttctgttctgatgaacttcccgctgccgccgaggtaagcaaaatatcccttatcaccagaagaccattttataggtgcatctgtttttactctgctgccaacaacatctaaaacccggccaccgacttttgaacccgcaaatgaatcatccgctatttcaatgatgtcacccggaagacaattaataccctccctgaaagtcgtgaatgttacactttcagtctcaagcttctctgtttccagaatccatttaccaacacgatgagcctgccccctgctggtgcaaccgaaagccgttactttcttaacattcagtccgccaaatcttatgatctgaccatcatcctgtataaactccctctcttccttccagccgttatccgggttaatccatgaaacttcaactgcattatgccttgcacttttagctgttgatgtataattgaatttcccgccgataacatttgagtttgtgtatgtccattccggatctgcgggcctgtcctgaaagcaggttaactgcactccatcccataaaggcattccgcgaaatacggatgccaaatcatcaataacgtctttcgctttccgctgtgaggtaatataggcattgaaagtaaatcgtggctctttgccgccaaacccatccgaaaccatttcatcgcaatacctggctatcgcatacaaagcaaaccggtcacaaccaaaacgccccatcacggaaccaatcccgtaacgcccattggtcaccagatcgtaaaaaatccatgcgggattgtctgtccatgcaggcttaaacctccccgtccatataccgttatagctgcgggtttccgggtcataattatccgggacctgaacaatcagccctttgatatgatatgtacgtttaggcgtgtcaccatactgagatttatcaatgcgcataccaaccacagcggagtttgggtatgaaaatttagcatccgtaatttctgtatagctggcccacaccgtcccgtttttaagaaggtcacttttactgtcatcagtgaggcgcgatactcttatctgaaacggcttttgctttggcgcgttaataatatgtgattcaaggtactgaccacttattttcccgggacctattgtgattgttttttctgtcacccatccgctgccagcattaatctcgacaagcatctgaacagaagtgttttcctggttgcctttgttgtcctgttttaccagcgccgaaacacctaatgtaaagcgaatgcgatcgacttcctgatcagataccgtacgcaatatcggtgtttcttttttcacttccacgtttacaggtatttctttctcaacaaacgggaaaccatcgagcggagactgagactgcgtacccgatctccactgaacttcgaccccgcgaatattcggattaccttgtttatcgactataggcgttccgttcagcaggaatccctgcattccgccaaccggtccttcaataggaccttctgacaccaaatcaataatgttcagaaactgcttatttttcaggttgtcatcaaccagactcggcgtgcttccgccaccaccacctttgcccatttatactgtctccaacccctgtgaaatcacatttgagccaaccaccatctctccataacaaagcggaacgggatatccttgcccgattctgttggaaagtgagctgaaatactggttactttctgaattgccttcactgaaatttggtgcgcccggtgttcttgtcagcatcgttgccacccctgctgccgctattccgacaccagcagcaaacatagccgtcgatgtcatcgttgccagaaaaccgcccggaataaagaatgccccggcaattagcgctgcgccgccgataatgccaaggaagccacctgattttgcgccacctataaccggcactatcgtgataacatcattgtcattaagtggggtgtgtaatcctgccactatgcagtcctctgtcatatcatgaccggcaacgcgtaccctgaactgcccacggtttatttcccgttttaatccgtcaatctgataacacagacatcttaacgcctcacctgcactgctgacctctaattcaaaccggcgtccatatcggcgtaaatagccagcaaactgtagtctgaccactgtttgtgcctccatatgctgtgtgtgaatttaaaccagtagccaccgtaaacatcccgcttactcaaacgatcagggcgatgatgaagaatctcctgattaccgatatatagcgctgcatgacaaggttttgatgtacccaggcagataagaataacgtcgccatcccgtacttcatcaacctgataaaaaccctgtccggaaatgttatccagatacagattgtcaccggtgtaccaccaattatcatgtcgctcaaagtcatcaagactgatgccgcacaaatggtaagcatcccggataatgctgtagcagtcctgcacaccgtgattaaactcacgccccagcaatcgcggaacaggattaaatttcagtaaccggtcatcacaaacgagccaccacggtaatccggttttaacctgcatatccctgtcgcccgcgcttaaaaatggcagtccagccggatgactgtgcacgacagcttccacttctgcatgactctcagctctcaaccattcctctgagctgatttcaaaataattttccgggtcagggtgaatattggtacacgggaaataaattccccctgaaaccagcccacacgactccctcacaccttccgttgttgcatgtgcgataatgttactttcaatcatgggttaacctagtttattggagccgagaaacccaccgaacggcaatactgaggagtggcgaagtttgcagccacggtacttatgagagcactgatcttttgtcggttcattggtcggctgatccttttcgtctgcgacaggaggcccgtcatacccgcaatcctgtccacgatatcgccacgggcatatatcagcctgaataacccgggcgggaatttgtgcattatctgtttctgtcggcagcgccagcacatatgtaacgaaatctgagtctgaattttcacgttgctcaatgacaaatttctgtacagcctcacgggacggatctgcctgattgtttccatccggaaaatttaccgcatcaagatattgctccataacctgccgtctggtaacaatcgcccccagtgcgtcgtcataatcgttattgattgcagtcagcaacccatcaatgttggcgaatgtcatcttcggccttgctgacgctccctgcgctgtcatgctgagtccggttacctgaaccggatacggatcatatcggttaccctgccaaatcaccggtttcaacaggccgttcattccgtcatgaaagcggtatacattcccgccgaagcgacttaaatccacctcatacaaatcaagcattgctgattgttcaatctgagtaaccgcaatccgcatatctgccggaatatctctcacgcaaccacctcctcaaatacacaatcaatctgccagacagactgtttcctcgttacctgccagttacggcacacgaatgtccgcagggttctgtcatcccctgtcagccacaggaatgattccacggccccacgctgactgagaaaattatctatttcacgtccgacagaaaccggtttgatgaatgccaggttatatgttttaagctgattattgattccgtctttggctctctgctcgtagccattgccgaattttgcaaccctgaccttcggttcattattaatttggcaggcatcctcaggacgccatttaaattcatccatttatcggttccattaaaaaagccaccgtactggtggctgttaatagcgctgattaccttgtattgcaccgcttctgatttctgtcatcagaacgtcatatacagtacctttaaccatcctggttatcattgttgcttccttttctgtcatgccattgggagcctgaacctgaaaattgaagtgcatatcccctatgctgacaccaccatcgccacccatctgccggttactgattacttttccgctgtcaccggggatcatgtactgatgaccgttcgacgccttgaatatttcaggctgcccgttctcaccaacgcgatacattttgttagcgtcaacggggccaccgttataacgggcaccggcgacagccattgttttactcgccgccatggctgacatgtaagacgctgaaccagctgtaaccgccgcccccatcgttgcaatagcagcactcattgccgctggagcccatgctgattgtgctgccacggcctgagcaacagtagatgcctgcgctgctgttgacatggcctcaccaacaaccatatttttaatctgctgcatccccatctgaactaacgcccctacagcctcatcaacaatggttgatgctacattacggaatgcatcattaagactctgtgcgccggtaataagccctgtcagtacgttggatgagcgctgaccgagagcatcaagaccatctgcgagaaactgattggcctgactctgattacgccagatttcccactgagcattcagtcttgcttcctcatactcagtgtttgctgcatttatcagcgcaagactttgctgtgccgtaataactttctgattttcaaaatttttaatcaatgccaacttctgagcgtgctcattagccagcgcctgaacaggatcaacctgagccgccatttcctggacaggagatacagcagatttcgcatttatttccgctgtttttctggcgtgttccgcttttaactcaatgctgcgtttctgatactgttcttcggtgatgaggttacctttcagttgccgttcgagttgctctccggccagtttcatatcctgatcagcttttgcctgcgggttctgctcaaatgcctctttgcggtctttgattttctgcgtaaggtcgtactctttaccggccagtgctgtaacttcggcgatctgagcggaattagcttttgaaccaagcttctgtactgcttcaagaattgcagcctcgcgggacagcccttttgtttccagctctgcaactttcgtcgcattagccaggtcggttatcttctgtttgagttttttcgcttctgttgcttctttttttgcttcggataccgcctcccttgatattttaataccggttttttttgcttcgcttgcctcgccagctttagcagctaattcagcaagtttttcagcttcctgctctgatatccctttatcttcaacataatacttgacctgtaattgacgtcttactacgtcatccttcgctccagccatttcaatttcacgttcaagcgtctttttcatgtcagcgccagcatctgaccattcaactttcaggcttgctgaattgaacttttgttttgcttttgtggctccgtcaaggtcaagtccgtaagcgcgaagtgctgctccggcattaggtagcaaagtactcgcctctcgctttagcagctcctcgccctgcaacaattccccgtttaacttcgcttgcgctgcactgataaaattcacagtcttgcttctgtcattttgcacgcgctcaagattggcttctgcttttgctaattttctggatattatttcgaggttctcctgggtactaccaaagtgtaataccccatcagaatatgctttgtatgctgttttgagatttttaacctcctgctctgcagtgcgctgagcatccgtcagaacttcgagctcgtccctggcatctgctatttttgctgccagttcggtgcgagacattttatccatgctggcacgcaattcatttagtgaatcagcaaactcttgtgctgatctttttgcttcttcagctttttggaaaaaataatacacagcggctccggccaacatcgcagcaccaaccggtccaccaatcaaggatagagctttgcttgccaacccactcgcaacgttaagtctgttctgtgccgcagcgagactatttgtagctgcggtttcctgctgtgttaatcctgttattactgatgagtttactgccaattcacggcgaattctggttctctgcgcttcagtagtggctgctgccagctgcgcacccagcgactgctgaactgtcacagccagagtcttctcagctgcaattctgttgattgttgccgtggcggcttcgatctcaactctgaccgcttgttttgtcgccgccataccggcaagtgtctctttaactttctttgcctgagcggtagctgatagcgtaagagctccaacatatctagaccccatgacaccggctgcaataagcaatacgttagccagtgattccagattgttgctggcagatacggtagcgtcgttgaagatgtttataaatgtcttaacagtggtgttttcgccaaagaatttagtaatattattgctggcgatctgaagagactgcgacattgtttgtgttgtattcgcaaactccttctcaatagctggtcccatttcacggaatgcttttaacagtacatccgtggttaatttgccttctgcggccatcgccctcagcttgccgatgctgacacccagtgaatccgcaagtcctttcatcagtgccggagcctgttcactcattgagttaaattcctgcccgcgcagtacaccagatgccagtgcctgtgataactggacaagtgcaccttctgattctgctgctgtggcacctgaaacggtcattgcctttgagatagtggtggttatctgccctaactcttcgccgctgagcccggcactgcgcatcgctctttccagtcgtgaatacagcgttgcgataccgtcaaggcttgaacgactgttctgagcaatatcaaacacgcgctgattcaccaccgccagcgtctctccggcctttatggagttgacgagtttgttattcagcaccgtccaagcttccgcgtagctggtaacggctgatacagacaagtaagcagtcagagatacggcaacccgcgacagcgaggccattgagcgctcagtgccattgacggcggtcgttgtgcggttaaatctgccttccatattccgcagccgctgatccagttgacgctgtgatgtcagcaactgagcaacatccatctgcacctgatatacgattcccccgacgtttgccatttaccggctccttaaaatgaaaaaccgccaaatggcgggggggttagactgtcttcctgctcaccaaccggcgcttgcccttaatcaagtcatcgttacgggcatcatcggccttggtgatagcctcatactcatctttcgtgaagcctttctcatccggatatttcactttcagcatcatcacgaactcggtcattgtgagttgttccgcttcgctacgggtgatgttgaa

SEQ ID NO: 3 - DNA, 14362 bp, unknown
  Altogen 322075 strain
ggtgaccttttcattacgaatgacagcatccggatataattaattgattaataacgatatatcagtattcacacatcacatccgtgacatttaatgtacttttagtggcacgtaatagtcacgcaatgacgacacgaacatgtcacgccacaaatccccctgctatactcccatcatcacccaccactccgaaaccaacatgcacaatatagccaacctgcctcaagacgaaaaagacaaaattaatgccgatttagccgcatccggtatcgcgtataaagaaagactcggactgccttatgatctgtgcgaaacagaaaaccagcagcccgagcatttacgcccgtacttcagagatagactggagcactacagggagatcgggaaaaggtttccgcgcgggttcgagtatgagaaggagtgatggcgtatattatgtgtatccaatctcaacaacgaaaccatatacaagcgcgacagtattctcattatttactgtagtgccagtaacctgaaaaccgtatttagtcaccgatgaaatggatagcgtagcgaccgtggcgcttttatttaccgtaatttgcgatgctgccggagggtacgccttggggaatacgaacgggataaatccccttataaccccggtattatttacactaagcggaatggcggttgtcgtattctcgtaatacttaccaacctgaacctcttgctctgtagtgtctgtatacgcccacggtgacccgtcatcaaagttagcaaagtggacaatattgttatcagggccctggttaaatggcctggttccttttgaatgaataaaatgacgcagtgtcatttttgtcatcttagttagctttgacggatgcacctcaggtattgctatccgcacatcatgcttttcccacgatgtaccgatatcaaccatcactggaatcagaatagattcctctgtgcttgagtttgcatcgttataggcatatttaacttctatttgcaaagtgtatggtgtatttgctttggcataaaacgaatatgcaagcgtcttaccggcaaaccttgccacatcgtattgcgtttgctcaagagctacaaaggttgttccttttgatgtgtcagcgctgtactcaatttcaacaaagaaaggtgcgtaaacatccgtggtctggtgggcgtatcgtcttgctcttgatgtgaccatgtttgcgacactgagataccatccatcagcgcattgctttctgtctgttccgacaatagtcacacttcctgtgatatcagtcatgtttgtctggaaatatccattccttataaagtgctctctccttgcaaacaggttaccggcaaaagccggaaccccgttgtcattaacgaactcacctggtctctgtgtaattccgcttccggtgtatgtttttgggatgatatgagacatgattaaaactccttacggaaaattacgcaccagttgtgcaggttgaggccagtagttttagatgtctgcttactggttccgcgaagattgccacgatcaccaaggccattaacctggttagcgctgccgcctgcaccgttatggtatgcatacgccaaaactttactggtcgttggtgttttgcttaatgaaatgaccacactgtctttaccggatatcgcaacatcgattatttccgctccactatcatctgagaaagcaaaccccttattttcagccggttttacagctgactcgtcaaaaacaagaccatcctccacaccagtgaatttaatggtgattgatgtgcccgactgaattatgcttactggtctgcatggctcccaacttcctgttgagtaataggaatccattgccttggcataatactcaccaaggacagcctgtgattcatttgtaatatgtgcatgatctgcgtatttaaggtgatacttgctgcacaccatgaatacatcaccctttgattcgtgtgcgatcagttgctgaattggagactgaaaattcatgtcatttatgccaccattccaaccatatccaccggctgttgctgtctggcacaagaacataggtattttatttttctgtcctgttatagatgagatgtcagcattaaaatccttctgccattcaattatattgtcagcataatttgtgttgttaacataaccatctgcctcaccatgaataacaaccaccgccccataattaattgaaggtctcagtgccttaaatcgtgtgacctgtgccaggcacttgttatacagatctgtatttccgtttttcttgatatcaacatatttctttccgccccatgcctgaccgctgatatacgcattatcagcaatgcacctcgttatcagcccatctgttaacgttgtggacaccgatgctcttataggctcctttacgccaataatatcggagccaattgtgttatcactgtacatgataggcccgagagataatgtttttgcacagtaattcatacacgacattacaggcggaaatacattattaccaaccccaccttccgccagagactgtcctgttaccaaaacccccatatgaccaaatggagaaaataaatcattatttaataccttgtattcatttgagtttattgtattaccttcaacaacttcggatacattatcaagagactcctgcacggttttaccggattcagtacctactaagccagcaccagttggtttggataattcgcctctcagtgacgcatcacccacactaacccatgcccccatacctataccgccagaagattcaggcgtagagccagcaggaactgattttggcaactcaccgtcccagcggtaatattcaccggtggtttcgtcacgcaggatttcattgcgttttgttatctctgcaccctgctggaagctgtccatagggatataaccggcggcaataattgcctggttcatatcgactttaaaccgctcaaccaactgatcaaacatccacttcatgccttctatagttagatggcatcgaccaaaccggtctttatattcgtgctccagtgatgtcacgaactcatcaatttttcctgcgttaaacttcaggtcgcgagctgcttcgcttggtactgcattttgagtcgggatagtagccatgtgccttttcttccaataaaaaagccagctctatggctggcttgttggtttgggtgttatgtcagacgttatagtctgctttcggtgcaaaatactcacttgcggtgatggagaacgtaccgtctgcatccggtttcttatcagagactacccagcgcatagcgtccatttcagtgacggttgatatgatgtaccgtgacggcgactgaacattgtgaccgtcatagatattgagctgaatgtcagggatatcggcaataaatcccttatccgtatcggtccgcacctgcgccggatattctccggatgaatttccgaggtgatcagtgatgttcaccaccatgtcaccggaaaactcaatacgctcactggtgctgaatatattgccggttctgccggtgatgtgtccgctctgctgattgctgtcgtaactgtctgccaccaacaccatatctcctggataaacatagtcaccgtctgccagtgtttgcaggctgatgcttgtccgctggctgatcagcctgtccatttccagtaatgcgcggtcagtggcctgatactcgttccggcatccgtgcagggtgattttgttcgggcttttcgctacccccttcaccaccgcgccgttttcgatacggtatttcaggtaggtttttttgttggttcgcgggttaacatactcaacctcaacgccgtcattcccgcccggcagtgacatgtcgtatgagatgcggaagttattaccggtaatgtttgaccggttaaacaccgccgccggatatctccgctcttcctcacgggagaatgtcagcacaccgttgtcaaagaatgccgtcaccctcgccacgttgcagattgtctcgacacgctgaccgagtgatacatcctcatcatcaaatgtgtaatcaaagtacccgaggcgtttatcaggcagtccggcgtaaatctcatacaatccgtgcaggtcgatagtgttctccggctgtttgccggtaaccagccacgtatgagccacagcatcagcaaatgagcgtgatggccgctctgtgtaatccactttacggttgaccatgtcatagctgatcacatgcctcgtcaccagagcgttatatttgcgctcacgcgagcttgtcggattctctgttgctctgactgtcacgcgaacaagggtatcgtcagggtgcttctcattgagcctgcggcggatgatgtgcgctttttccagcttgaggatgctatggtcattgctgttttccagcctggtcagttggaaagcataccggccataaccacctcgcggcgtgaatttctctgttttgtaatagttctttgtcttaggcgcagccgggaaaccgcggttatatgattccctggtaccggaaatttcctcgttgttatcatccaccttccaaaattccattctggcattggcataatcaccctcaccaagttgagcgtttatgtgtatccatagctgccccccatccatcggtgaaaagaatggcccgactgtcaggaactgattgtcatagagaatgaatttggtggtattaacaacagcattcggcggcagtgtcgccagatcgccaccggataggttggtgaagaaaaactcgtaatactttttcggcagcacgattgaaccatcgtctgtttttttcgcctcagacagataagcatcgactttgatgtcttttgtcacgttaccggttggtgtgctgtacgaaacactcacggtcatggatactgagcgcggtttgatgatgtcatagaaataatcgaactcactctgccggctgattttaatcattgcctctccgccttttatctcaccggatatgacctcattcgccgacgcctgatactgcggtatttcatcactttcattcggacccggcacttcctgaccgtcaacgtcgtgaaactcaaacccctcaaatatttccgggatattttcacctggctgaaatatctgataactggcaccatccagtgcggttaattcggattctgaatatttcacattttcgatatcaaatttcccgataccgaaattcatccactctgtgaccttcttcttgttgtcgatgtactcaaacagtgactgctgaataagatccggatatgcccttacctgaccgtgaatttccggacgcgcctggtatgtcctagcaacgttggtttgcccggtgagccgattgttcgggctgtctttaacgtttgcgtcagctgaggtgaatgacggcgttttcggtgccagaaaagaaaacaccttcgacaccagtttgaatatcgggcttaacaggtctccgattgcaccgcctctcggctgggcaaataactgaatgtgatgcagttcggtgacaataaaatcaagactatcaccctcagtcagctgcacaccattgaccatgatcacaacgtcactgctgatattttgttctttcagccagtcaaaaaaaagagagccggattttacttcgactctctcttttggcgttccaggcaggcgctgaatttcaattgccggcataagtcataaactccactttgctgtatatccgctgaatggtcagtaatctgtccagacggacatgtccgttatcgcctcggctgtgcagagccattccgccgagcacaacgccgacatgaaccggcaccgaaccgtcataggccacaaatatcccgccacttaccggatgttcttcccgcttccagaaatcaacctcattttgatagcaggtcataaaatcgctgtctgattcataaccgctatcgtgatgaatttcagcaccgataacatgccggtaatagagcgccaccagcccccagcagtcacacgcagtaaacgaacatgcccggttaacccacggaaccccgatcattctgtctgcaaattcgtctgtcgtcatacggcctccagccccggccactcctgcggctcataaatgcggccgacattcttgttcagcggattggtcatcgaaagtgtcattgaaaccgcttccgcatccagtgatacatcctttgcaaacagcttccagcgcacgattgctgtacctttgtctgcttcatcaaacagccggtaagtcacctcaaccggcaccatccgtgaatacgaccgccacgctttcagcttctgtttaaactcatgcgccacacggctgaattttacactcgcatcgatgatcggcgttttactctgctgactctccgacatctcaaagttacacggcagatattcaataccgccgagtatcttcgggaaaatctggtgagtgatcaggtaaatgtcgccgaatgacgggtgtgatagctgaagtgtttcgtacaggatgcggtttggtcgttgtgcgcggaactcacgcaatgtcggcattatccctccttacaccgtggcagtgtttcagtgacaataacatccagccaactgccgaacggcggcgggaactcgataatcacatcaccgaattcatcatcatcgttatgcaagtttttacagataacctgaccggtccatgtaactgatgcgccgttaacgctggtctgcaccggatatgacacaaagtgcaattcctgttcctgtaatccgctgccgccgatgtcgattttcatccggaaccaccggttacagttatccagataatcaggatggcgcagccactgagcaaacgcccgctcctgtaccagcgtgaatatccaggtgacattccagaccgttttcaggtcatcggtcagcttctgaaatatcggtgcgccgacctgtggttgatctgtcatgtaaccggtatcaatggtcatgtttttgtctgacttctgcgccagaggaagccagtcaggatagtcgataatcatattatcaccattaaaaaacccgccggagcgggttgtcttatttgcttgttacacttaactcaccaaacataactgcatcaacttcttttatcttgaatcgccaaagtgactcaggtatcccgccagacggatatgcacttatgtaccttacaaccatatggataaattgaggcggtatatttttttcaatattttcatcggaatatactgtatcaatgatatttttaaagtaattaatcatcccagttttaaagttatcattcgcgtttgaattttcgaataatgatatgttttttaggcaccattccttgccgccaatcactgttccggaataaattatccctttaactgttattgaaattggcgttgtcgctccatgctctgcccaattagaagcatctactaatatatagtcccttgtaacatcaggggctacctctgatttttctgacatgttacatcctctttggttagggtaaaaaatcattgtaccaacatgattatgtataaatatgacttaagtatgataatcaaatcagtatcacaatctaccctctcaccctcgcagatgctgttgtgtttcgtgtaatggcactgtgcatcggccctttgttatccatgtccgcgataaacacatctatggtcatgccgttgctgccctgtctggcctgagcatcaatcctgctgccgccggatgaatagtcattgatattcaccgtcaccggcacctgtccaccgccaatatcacggttactgataaccttgccgttatcacctgggatcatgtactggttgccgtttgacgctttgaatatctccggctttccgccctcaccaacccggtacatttcaccagcagacaccgggccaccatctttacgcgctccggcgatactcagtgcgctaccggcaagttgagccgccgtatacgctttcagaccggtagctgatgcaacaccacctgtggcaatagacgcggcaatcgcggctggagtccatgcagcagctgcagccagaccaccggcaacagcagatgctgcattagctgtttccgccgccttgccaagagtctgagacagaatgaagtttttcagcatatcaacgccaacctgaacaatcgcattcactacgctgttcagtatggtatttccgagagagcgcatcgcatcagctgctgacattgttccggtcattaagcctgtcaggacgttagaggcattgccaccgaaggagtcgattgcagatgtcagcatttcgtagcctaacccctgctgactgagcaattcccactgagccgcgagttgctgttcctgatactgtttgtcctgtgcagctttcagtgccagatactgcgcatccgtggcttgtttggccgcgatgtactggtcataactgagttgcccgtcctgataggattgttgcagtaatgctttttctgctttctggtatgagtccatcaacgcaagctttttggcattttcatttgccagcgcctgtacagggtctaccttggcacggttctcttcgacaatatttacctggccattggacgtttcatctgagatttttcgggaatattctgcgtaaatctctgcgcggcgttgctgatattgctcctctgtaaccagatttccttccagttgcctctcaagttgctcctgagctaatttcatatcctggtcagctttcgctctcggattctgctcaaaggcctctttgcggtcttttatcttctgtgtaaggtcgtattctttaccggccagttttgtgatttcttctatctgctcaggaattgctttggaaccaagtttatagatagcagcctgaatagcagcctcgcgggacagcccttttgtctccaactctgcaaccttcgtcgcattagccaggtcagttatcttctgtttgagtttttcggcttctgtggcttcttttgctgctgcgctggcggctgctttcgatgtgcgaacagtttcctttttggcataggcaagatcataatttctggctgcttcatcctctatttgctgcatttgagtcgagtcagccttgacccctgcttcttcagccttctgccttgcggtggcgatagccctctgacgatcgtctgttattgccagaagatcattttgcttgcgaagattttccagtaacttatcgccatcctgactgcgctcaacagtcaatgatgttgcattaaatttccgctttgcccttgtggcgtcttcaaggtttaacccgtacgctttaagtgctgcactggcattcggcaacacagagccggattgagccttgaggagatcggcgccttgcagtaattcaccgttgagctttgcctgcatcagccctgttgagtttaatgtgcgtgaatactcagttgtttttgtatctaattcagcctgctttatttttatttcattaagtatttttgctctgtcactttccgcaccggcaagactgtagttcctttcccctgcctttttgtacctctcattcaggctgtctatttcgctgccaagctctttaatttcatctttttgagtagacatgtgctgggtggctttcgctatcattccctcaagctggacgcggttcatgctctgcattttttccgtcagtccctcaagctcatcagcaaactttgatgcctcctgtctggcctcttccgttttctggaaaaagtaataaaccgcagcacctgccaacatggcagcacctgccgggccacctatcggtgcaagcaaccagttcatggctttcagtgcattagccattgtcaaaccagtagcggccaccctagcctgagacgcgctcagtgtattgttagcctgcgctgcaatgatggctgcattgctgtacgccgttttcaaccttgtaacgttagccagcgctgtggcctctgccgccgaccctctggcgacctgatattctgccctggcaagatttagcgctgacattgccgcgtctctgtctgccactgtttttctaacaagcacagctgccgcgtcacgttcagctactgccgcctgtcttgatgcggacgcactagccattgtgtcacgagcttttttaatttgcgcggcaccggccagcgccagtgcgccggcgtaccttgagccaataaccccggcggcaataaccagaatatttgtcaggtaatcaaggttttcacttaccatcaccacggagtcataaaccccgccgatgaacgactgaacagtcgatgagttaccgaaaaacttagtgatgttattaccagcctcctgtaatgcctgagacatggtctgagtagttttcgaaaattcctcgccaatggctgcgccctgcgacaaaagtccgttaactaccacgtcagtggtcagctttccttctgcggccattgcgcgtaattgtccgatgctgacacccatcgaatcagcgagagcgaccatcaacctacttccctgctcggaaactgagttaaattcctcgccgcgcagtacgccggacgcaataccctgcgacaactggatgatagcgttttcagcttcctgagctgtggcaccggaaacaatgaagccctggttgataatggttgtcagtttcgccaggtcttccgctgatgtgttgtactggcgtgttccgcgctcaaggcgggcatacaatgttgctgtggcatcaaggcttgatctggtgtcctgagagatattgaatacacgttcagtcacttcaactaacgattcactggcgcggactgagttcgatagtttgttgttgagaaccgtccaggcttcggcgtagctggcaacagcagaagcagataaatacgcagtcagtgacgcagcaacccgcgacagtgatgacattgagcgctcagtgccattgacagcgtttgtggtgcgattaaagcccccttccatactacgcagccgctgatccagttggcgctgtgatgtcagcaactgagcaacatctatctgcacctgatatacgatttcgcctacttgtgtcatttaccggctccttaaaatgaaaaaccccgccggttggcagggttatattaataacaatgtaaaaactactctatttgtgctttcgttagcgccggaagcccatttgtacttcttgcttcgttaactttcccgacaaaaattttgtttactttagttggatatccagcacctgcacatgaagcggcgatcacatcttgggataacggctcaccactcgccatatttctatccatcgataacgctccaactccgccatcatctttctcaataatgaaagcagaaaataactttttcccagtgtatgctccataggagtttttgccattcaccatcccacaataaaggctgttagtttctgttttaggaaaatccccatgataaaatttcgccgcatctgggtccttcatttcttctcttactgctctttctacagctataacttcagccggtgtcagatctctcgcaagagaaccaaatgacactaatgaaataattagcgcaatcaataccttcttcacatccccaccctcaataattagttttctttatcttaataaaaatcagtgcgaacgctatttgttctcgtcttttttctgctgttcgtcactcatatctttaattttatcaagatccatcgtcaggatagtgttaccgtccttgcctttatttactttcatgtaggccagaataccagccacccatttagagttttcattaccattaccacccactgcgtcctctaaaatctgaatgatttcagagttcatagaccgcccattggctttggctctctcctgaattttttcttttaactcatccggcattctcaagccgaatggagcaatgctgcgcatacctttcatgtaacctccacattttgatatcacagtgtagccaaataaaagttgacttaatagatacacggtgcaatcattacaccgtgatatcaacatgaggtatatatcaatgaatgaccagctttatacatccagagaaaaagataatttcatgcttcgtttgccaaagagaatgaaagatgaaattaagcatatagctgaaatggacggaatatcgattaactcggccattgtgcagcgattatccagaagtttaagagaagaaaggttaaagaatgcaaactgaaaatagcgaagccccgactacttgcgatagccagggcttcaatttttgccagaaactgcgaggtaactagcatgacaagtatatcaacaatcaacgtacctttccacggcgacaatctgtatctggtgaattatgacggccagccatttgtcgctatgcgccccttcattgaggggatggggctggattgggcgtctcaatatacaaagataaaacaacgctttaagacctgcgttgtgaatatcacaatgcagcttccgtgtgacaatcaacgccgcagcgtggtctgcttagcacttaaaaagctgacaggctggcttcatacgatcaatatcaacaaggtcaggccagagatacgagataaggttgccgcttaccaagataaaagtgacgatgttctgtatgagtactggactaccggcgaggtgaagaaaaagccaaacttccgccagtctacggcgaaagagctcatcccgttacgccagacagctgagcggctcattgctcacggcgtcggcaatatttaccctgacatctggaaacatgttcatgctgagttcggtgtgcagcacatcaacgaattgttaccggagcaaatcccgctggcgatctcgtatctggatgcactggaaggtgagtacattccgaagcaggacgcactgccggaaccaaccttaaacaaaggcagggtaatttatgcgctcgaaggcgcagtaacccacattcgaaaaatgagagagtactggaatgacggactcaaagactcgcttaagcaacttggatatccgcataccgggtcaatgactgaacacatgattgacatcatttttcatcttgactggacgattcacgaaataaaaggtgatggcgtaaatcgactaaactaacacccataggccaaggacggcctcatgttaatcatctggtggtgcaaaggaaagcaaaaagcctcagttaagaggcggcgtgtgatctaaattacaaggccgtccgtggcctgtggttgcttaagctacctgcttgccacaccatacaactccgcaccggatagcccctatcagagcttcatcaatcctctttgtactgcttaatgagttcgcagtctttgggggatagggagtacatgtcggccatgtcgttttcacaaagtgattgaatctctctcactgcgataacagcataatcgtacccattttcccgcatcttacctttcacttcctttacggctttcatgtattcagacccagaagataccatttcgccatccattaatgccgttccttctgcttggctagtgatggctatacgaagcgccgtactttttttcaggttttggtttttatcaaaaaaatcattcagactgccactagatgcaagcgccgacgatgagacaacagaagcgagtaatattgcaacaacctttttcactgaaaagccctcatgaaattaacattaaatttgttaactatcataagggctattacctgaaaaacatagcaaaatggcaggcggtaaaagtcacttccaaggtttattactatgcagttgctactgctgcctttttagcggccttcttcttgagaatcatagaaacaataaccgcagcgataaacagaacgatgtggaacccgacatagaaccaatacaaaccaataccattctcaccattctgatgcatgctagccgcggtaattgcgatgcttggcgtcaaaaacgcagtagaaataatatttaatccaaatgttattccggataatgtagcgtatttgtaaaatgtaattaaggcaagcacactacacaacatagcgataaacaccccgccgagtggaataaaaatggataatgccgcaaacactaacgcaacaatagctaacgctttcatactcaaacatccctaattaggcgccaagatgttcagaagcccactacaattaggctgggctaatttcctttgcaggttttttattcgccaccatctcgacattgaaatttaagttttttttgtgttatcgcatagcgacatgtagttgcggttctgacaccgatggaaatgctattcgtaaacattctttatgtcaaaacttatgccagatattattacctgccattagatagccgccccttccggggctttattatactttcttcctgctcaccaaccggcgcttgcccttaatcagatcatcgttacgggcgtcgtcggctttggtgatggcctcatactcatctttcgtgaa

SEQ ID NO: 4 - DNA, 43036 bp, unknown
  Altogen 322075 strain
tcaatatcaaccacaaacacgatgttgacggctcaccgggctcttccaccaaatcgattgtccgtgtggaaaagctgagaacactggcggaagtgcgggatgcggttctgaacaatatctcgctgccgtataacggcacagcgaagcatgtcggcccggcgctgaattccaatcaggaatgtgtggggctgttttatgaatctgaatcaggcggctggtcgaaaaacggacgtctgctgcccggttcactctgtggtatcgccccgccgccggtgggcgcctgtgaggtcaccagcggctctgtgatcctggattacggggatattgatgaagtcagtttgccggatgcggcgcgtaataaaagcatcactgtcacctgtaatctggatatggatatccttgtgattgcctccggttcagacagcggccgtgtcccgctgcggccggataacagcctgtacgcggatctttatctcaacggcaatccgggagagcagggggcacccattcatgtcccggctggtggtgcgactcaggtggatgtgaaatcggtgctgaaagtgaacgggcgggttgccccgggcgctttcgaaggttccggatccatcattcttgttatgccgtagtttcttattttctttcgtggtgctgcggaaacctgcagcactgtgagcccggagtgagactgaaatatgattacagaagatactgatttaaccgttaataaatctgtcggctaccggatcttccgcaagcggaaagagctgggctggtccggcagccgcctggccgaccatctcgggatcagccagcagcagttctcgcgctatgagcgcggatgcagtcagattaatgtcagcctgctggtcagggcggcggaagtgttacagacaccggtcagctggtttttcgctgactgtccggaagcgcgttcataccgggagtgcttccggggaaaagcggatatttatacggcggaatctgttccggagtatggattatccgcacccacccggtacaaaaggaaaccggatgaaggaaaacagacgtaaacacctgatgcagtctgaggtggaaaaaatgatggcagcggcggaaaacggccgtgatccggagcggaatacctgcctgctgtggatgtgttttatccacggcttccgggtcagtgaactgggacagctgagcttatcggacatggatgttgccgctgataacctttatataaagcggctgaaaaacggcctttccaccacccaccctctgagcggcacagaaaaagccttactcacccgctggcttaactgccgcacccgctatccccgcgcagctgaaaatcactggctgtttttatctcataaaggcgggcatctttcccgctcccgtatttaccggatattaaaagagctgggggaaatggccgggctgccggtggcggttcatccgcatatgctgcgccatgcctgcggctatgcactggcagataagggggcggatacccggttgattcaggattatctcggacaccgcaacattcagcatactgtgctgtacaccgcagcaaattcggggcgctttcgcgggttgtgggactagaataatgtaacataataaaccaaagtgtcgctatattatttgttgtttgtttaatgggcaatatttaaatttaaaatacatcaaaataagttcataattccgtcgaaatctctgatcgtctgttttttaatcaaaaatagtttattttttgagtaaaaaatgcccgttttttatcctgtgcggatttttcttaacgattcgtgctggccggttctgatataaaatcgcaatatcccgtcttttttccggctcgtttcaccttcctttctttttggtctctgccaaatcaatttttgccatccggtaaatttatacatttcagcgtgatacgtaaaacacaacattttggtttatttcgttgcgtcacggggatgaaaagtagccgtccggaacgggcgctgatgacgaaataaaccggataaccggccggatcataaatccgctgacggtgaaacggtacaggcagttccggaactgcatcaaaaacgcacaaaagcaaaacattgcttatgtatgccttatgtcggcatttttatctaaaaacgagcagatcaggaattttgatatgagtatgaaaaaagtggttctcgcactggcagtttcttccgcaatggcaatgactgcacaggcagcaaatcagggcggcggcaaaatcaacttcaacggcgaagtgattgatgcggcatgctctatcgatgcaaacagcctgaaacagactgttgagctgggcagcgtggcaaaagttcagttagcgaaaggtggtaaatcaacacctgttgatttcactattcagttgcataactgcgatatcaccggcaaaaccaccacgacagtcacctttaaaggtgttgcaggcggcgctgcggcagacggtctggataaagcctttggggtcagcggcccggcgaccggtgcaatgggtgtggtcgtgacggatgcgggcggtaatgtgatcgccccgggggcagcatcatccgcatttaccttaaacgaaggtgataacacgctgaaatttaaagcgtatatgcagggtgccacaacggctgtcaccgttgcgccgggtgctttcactgcaacagccgacttcctgatggactatcagtaatcggggtcagtgtactttacccgtaccggatatccggtacggggatccggcggagagcaagcgtgaagttaaacatactcagtaccggactgctggcagtctgcctgactgcttatgcggcagagggtgaacggcagaccgggcaggtctggttacagggatttgttctggactcctcctgcactatcaatatgcaggataaatatcaacggattgaaataccgcaggttgccgccaccgcattatatcagcgcggatacagtccggcctttgcctttgctgtccggctggaaaactgtctgttgtcagcggatgacaaaaatctgcggataacctttaccggaccttcggacagcaacggattgtttgccgtcagcggggaggcggaaggtgtcgggattcagctcagccgggaagagggttcggtgatcataccgggaaaagcagtggcactcccggatataccacagacaaaacatatcacactgaactaccggttacggctgattgctgatcgcaaatcactgaaaacaggggcataccggtcgactgttaatttcaacctggattatttgtgatgaatgccaatgtatttgcgccgggctgcggagtatcacgtccggcggtgcggttaaaaccgctgacatttctgatcctgctctctctgttttctgcggcggtacaggcagaggacatcacagaattcaataccgaggtattggatctgaatgagcgcggagatatcgatttatcacagttctctcaggcgggttatgtgatgccgggaacctattccctggcactgaagatcaataacagcatgctggcagagcggcaaatccgttttctggccccggataatgacccgcagggcagcatggcctgtattacgcctgatatgagcgaagagctgggactgacctcatctgcaaaaggggatttgacctggtggcataacggagagtgcgcggatccggcatcactgccggggatgactctgcgggcagattttgctgccggggcactgcatgtcagtctgccgcaggcctatctggaatataccacagataactgggatccgccgtcacgctgggatgagggaattgccggttttatccttgattacaacctcaatacacaactgacaaaacagcgcgaggccggacacagtgaccggcaggacatcagcggtaacggcaccaccgggctgaatgccggtgcctggcgtctgcgtgcggactggcaggggcgctattcgcgtactaatcatgaatcggaccaacgctgggactggaaccggttttatgcttaccgcgcgattgcaccgctgcgggcaaaattaacactgggggaaaattatctcacctccggcatgttcgacagctttcgctataccggtgtggcactggatacggatgacatgatgctgccgccgaatctgcgcggctatgccccggaagtgtccggagtggcgaaaaccaacgccagggtcaccgtgaaacagcagggacgggtgatttatgaaaccacggttgccgccggaccgtttcagatcagggatttaagcaatgcgctgtccggcaaactggatgtggaagtggcggagcaggatggttcagtacagacctttcaggtggatgcggcaagtgtaccgtatctgacccgtccgggactggtgcgttacaaagtggcgctcggtaaaccctcggaatatgaccaccgtgtcaaaggaccggagtttatcagcagtgagttttcatggggtatcagtaacggctggtctgtttacggcggcgggttatttgccggtaaatataatgctgtctcggcgggtaccggccgtgacctgctgatgctgggggcattatccgccgatatcacccaatcccgcgcgtcactgccggacggtgaaaccaaaaaaggcggctcttaccggctgagttattccaaacggttcgatgccaccaacagccgggtcacctttgccggataccggttttcagagcgggattttatgaccatgtcgcaatatctgaaagcccgttatcacaattcagcggtaacgggtaacggcaaagagatgtacaccatgacattcagtcaatcgttcagttcgctgaataccaatgtgtacctgaattttaaccaccagacctactgggatcgcccggcaagtgataactggaatatctccacctctcattattttgatatcgggcaggtgaaaaatatcagtctgaatttatcggcttaccgcaaccgccacgaaaacggacgcgatgacgggatgtatgccgggctgtctgtgccgtggggggagagtggtagttttggttacagcggacaattcagtaaagggcagaacagtcactcggcggattatagtgaccggattaatgagcggacaaattaccgtctcagcacaggagtgaccggcgatcaccgggtcaccggtaacggttatatgaattatcgcggcgataaagcggaagtaaccgcaattgccggattttccggtgaacgctacagtgcggccgggctgtctgtacgcggcgggtttaccgccaccgcagaaggtgcggcactgcaccgcagtggtgtgatgggcggaacacggatgctggtggataccggcggagtagctgatgttcctgtccggggcggaggtgctgaaaccacaaccaactactttggtaaagcggtcgtcagtgacgtcagtaactattaccgcagcagcgttaatgtggatctgaaccggctgggggaaaacgccgaagccacccgctctgtagtacagggcacgctgacggaaggtgctgtcggtttccgccgcttcggtattgtctcaggacagaaagcgatggcggtactcagcctggctgacggagatgttccgccgttcggggccgtggttcagaaccacgatcatatacagaccgggatggtcagtgaagatggcatggtctggctctccggtatcaatccggaagagacaatgcaggtgtcatggggcggggatgttcagtgtgaaatccgtttcccggcgacgatcccggacggaaatctgctgttgccgtgtgtctctgtggcgaatccggtacatgaaaagtcagaaaagtcagtaaaaacagaaaaaatatcccgttggctgacagatgctgacgcggagaacaccagagagagtaagcaatgaagaatcaatacaaccgttttacttcacgaagccttccggtactgatactggccggtatcctggctgcgccggcaggacaggcggcgattgcactggacagaacccgtgtcattttaaacggcagcgaacgggcggaaagtgttgaaatttctaatcaaaataaagagttaccgtatctggctcaggcatggattgaagatgcgcagggtaacaaaatcaaagatccgctggtggcactcccccccattcagcgggtggaagccggtgaaaaaagtcaggtaaaaattcagccgacagcggcaatgaagatgctggcgcaggataaagagagtctttattactttaatctgcgggagatcccgccgaaaacggacaaagccaacacattgcagattgccttacagacccgcatcaaactgttttaccgtccggggggcttagtggtgacgcagaatgcaaaaccatggcaggagagtattaccctgatccggcagggaaattcatacacggtgaataatccaaccccgtattacgtgacgatttcatccgcatctgccgcatataaaggaaaggatatcagcgggtttgaggcatttattattgcgccaaacagcagtgaagttctcggcggcagtgccgtgtcactggggaatgcgccggtactgggttacatcaatgattacggcggccgcccgaaaatgatttttacctgtcagggtaatacctgccgggtgagcgaagtgaaaccgggctgatgcgaaaccgcagaccaggagcagagaaagtgaatagattcattccgtgtatggctgtgctgtgttccggtctgctgatgtgttcagcggtacacggcgcggatgttgaagtaaaagggcagttggtgtttgaaccatgcaccttgtcgcaggcgagtgaaaatatcactctgtcgttcggcacgatagtcaaaaactatttttataccgcagaccggacaccgccggagccgttcaccattgagctggaggggtgtgacacctccattggctctgacgcttatgtcactttccgcggggccgaaagtatcgcactgccgggacggctggtaccggataacgggacattaccggggcttgccatcggcattgaaaccccggaagggaagccgctgccgctgaataaaaccagtccggtatataccctgaatgacggtacaaccacgctgaattttcaggggtatgtgcaggcagagccggatgctatccgtgataagacgctggtgaccggtgatttatcagcgacagccacatttgaaatcacctatccgtaagcctgcccggcggatcacagacaggacagtattatgacattcataaaatgtgcgcatgctttattacttgctgcgctgttacccgctgcggtgagtctgacaacatttcccgcatcgggtaaaaccggtgatgaaaaccggctgaaaataaatatatccggtacggtgattgccaccgggcgctgcacattcagcaatcaatcatcaccggatattaatttcggggatattcgtttttcctccgtatccggtgtaaataatattaccggtagttatatcagaccgctggacagcggaatgacctgtatcggtgatacagcaggaaagacccgctttcgcctggactctgcgcggggtgataccgttgatgatgccggtcataaattgctgcctgtcagtgtcggcagcacaccggtaataaatgcaaatctggggattcgtctgctggttaacggaaaacagcaggatattaatactgattttaacgtggatattctgaatctgccgaagctgcaggccgaattagtgcaggtacatcctgatgataatacatggataaacgggcaatccattacatcacaagctattttaaccatgacttttgattaaccggaaaataatgaaaatgaaaaaaataataatagttatgttatccggttttttcttactggcagcatggtcagtgcaggccgggcaggaacagaccggtgataataaaacctttaattttaccggtacactgagagcgctgtctgtctgtacggtaaataataatcagacgattacagcagattttaaaaatgtcggtattaataagctggacacgaaagtctacagcctgccgcttaattacacactggattgtcccggagttaatccggcaaatacgctgcggatgatctttatgacatcccgcccgtcggtatctgatccgtcagcgattgaaagtgatgtcagcggtttgctggtacggattctgaaggacggacagccgcttgagttaaataaatttttcaaaatcgatgatgttacgcagcggccaaagctggaagcactgctggtaaaagtgccgggcatggacttaacacagtctccgttccgggccaccggcacgctggtggcggaatatttgtaggagtaaatgatgaataaattaatgatacgtgtggcggcgctgttttttctgctgatggtgtctcaatctgtatatgcaaaaggctgggtgggtgcaagatcaccttgtgcaaaaggaggtcacgaggtcagtccggggtcggggatggggatggattgtgaatggagacactctgccggtgcttattatggtgttaaccagcgtgttgagataagaccgaatatgtttaccgagggtgatgatcaggcttatgtgccgctttccggcctgtttgaattaaaaatgtactggtgtcccttaccggagaatatggatacctgcagcagagcaaacgggacattattgttatcgggtggtgtggttaagctgaactcttctatcccattgaaaaaacaggatattgttaagcagtttgccggtaacagatcgccatcagcaggcgggtattgtattacactcagtgacgttaataccggttatgaatacagaggtaatctgggttacgggcctgacggccggggtatattttgcggggatgtgtataaattacctatggaacccccgaaatgcctcctgaataatggcgctgatctggatgtcctgctgggtaaactggaacggaataatattgcggtaaaagccggttcatctgttcagtctgtttccaaagatatttcaataaactgcagcggaagtatggcttacaacgccaatatggaattgaagtataccccgctcatcgtcggtggtgaggaaatcatcagcacgacaacgaaggggctgggaatagctgttatctatagcggtaatgttgtcaggccggggaaaagctatccgctgagttatcagccgggtattcataccctgacactcacctttgaagcggtgcgtgacccggctgttgcggcgacagacctgaaaaccggggattttacggcgaatgctgttttggttttcacggagcagtaattacaatttaatactgcggaaccgggccacattactggcggtatataacacagtgtgctgaatattgcggtggccgagataatcctgaattaaccgggtgtctgttcctctgtccgctaatgcataaccgcaggcatggcgcagcatatgaggatgtgccgcaatattcagatcggcggacaatccgctgtcgcggataatccggaatatctgctggcgggataaccgcccgcctttacgggaaagaaaaagccagggttcggcataatgtacagatgtattccgttgttccagccactgtatcagtaattgatattcaagggactgtaagggctgattggtgcttaatccgtttttcagccgggtaatatgaatggttttttcatccatattaacatcactgagcattaatccggtcagttcactggcccgtaatccgtgactgaaacaaacggcaatcagacattgattacgaatatggttaattgagtcaggtaatgatgatattaaggaatgaacctcctgttcactcaggtgttttcgttctttcatggaaatattcggtatagttattaaggtcaggttttattatttatctgacgttatcacaaaataaacagatgtcctattttgtattgttattgaattgatgttgttaatgaatggaattgataaattattgctgatttatctgatgttaataacattttttgttatctgactttcattttattgttgtgtattgtgttttttattgctttttttatttattttaaccggaattatctggctattgacaggtgtttttttttaatttttactggtgagataaatttaaatttattcaggtggtaaatttaaatttatttttattttcttcccgaatgtatttccgggggatgttatttctgaaggtaataaatatgacagatattctatatgattccgatatggcatcggtaaaccgggctgtcggtggccggcttttttgcagacgaaaagcgctgggttattcaggacagcagattgctgcctgtctggggatcagtcagcagcaattatcccgttatgaacgggggcaaagccggattaatgtcggcctgctggtcagggcagcagatattttaaagacaccggtcggctggttttttgccgggtgtcaggacaacgctttatatgaagaaagtctcagtgttcagtctgatatttatacagcggcatcagtgacatcaaaatcagaatatctcaactgagagaaagcggctccgccggtattgcggagcctcagattgttggcaaagtccgggaaaaaacaggccgggattttgtcagcaatcttatatcagaacatcagttctttttcacaaactctgacttcagtttcatctgaccgaaaccatcgattttacaatcgatattgtggtcaccttccaccaaacggataccttttaccttggtgccgattttcagcatggatgagctgcctttgactttcaggtctttgatgactgtgactgcatcgccgtctgccagtaaattaccgttcgcgtctttgacaatcagctcgtcgctttctgcggccggttcggcatcattccactcgtgggcacattcagggcacacatacattgcaccgtcttcataggtgtattcagaattacatttcggacatgaaggtaatgacataatgagactctcagattttcacaatggggagcagcaaattgtcacacgatggggtgatatttgcccgtggttatgtgcactgtcttcagtgcggccgccagtatagcgggatcggcacctttttgcagcttttaccggataaagagtgtggttatcgccttttccggttcccggacaataaacaggtaaataacgcaataacagcctccggtttcctgaaaaatccaccagtgctgataatcaccggagtttatcttttttttcggaataagtactcagggggagtacataattacgcagcagactcttatatattgaaactgcattattttaataaccggtttctgacttctttatttatttgtctgtggcacatctggagtgaaatatgcgtaacgttgtccgttctttattattgtctgcggcgctcgtggccgggtcgttaaataccgcctttgctgacccgcatttaaattttacctggccggtgaatgtggggccgctgaatccgcatcagtacgcgccgaatcagatggccggacaaaccatggtgtatgagccgctggtccgttatatgaatgacggaaccgtaaagccctggctggcggaatcatggtcggtatcggatgacggcaaaacctatatttttacattgcgtgatgatgtgaagttctccaacggcgagaaatttgatgccgctgcggccaaagcaaactttgatgccattctggcaaaccgcgagcgtcatgcctggcttgaactggctaatcagattacggtggttgaggatatcgcgccgaatcagttaaaaatcaccctgaaagatgcttattatcctattttacaggagctggcgctgccgcgtccgttccgctttattgcaccgtcacagtttaaagacggcggcaccaaagacggtattattaaaccgatcggcaccggtccgtggatattaacggaatcccgtctgagtgagaaagatgaatttgtccgcaacgaatcgtactggggtaaaaaaccggtttatgaatccgttacgtttaaagtaattcctgacccgaatacccgcgccgtggcatttgaagccggtgaagtggatttattatatggcacggacggcattatttatccggacacctatcagcgctttaaaaatatgccgggctataccaccaaactctctgcaccgctggaatcactggtgctggctatcaataccaaaaccggtccgacccgtgatttagctgtgcgtaaagccattaatcacgcggttgataaagataaaatgattgaaaaggtgctgtatggcacacaattaaaagctgacacccttttctcagaaaatgtgccgtatgcagacgccggtttaacaccgtatgcctataacgttgaagaagcgaaatccctgctggaaaacgccggctggaaagcgaaaaccgaaaatggtatccgtgagaaagatggtgagccgctggtggtggagctgaattttgtcggtaccgatgcggtggcgaagtcaatttctgaagtggttcaggccgatctgcgccgcgccgggattgatgtgaagctggtcggggaagaggaaagcagtatctactcgcgccagaaagacggccgcttcggaatgattttcaacggcacctggggtgcgccgtttgacccgcatgcgtttgtcagttccatgcgtattccgtcccatgccgattatcaggcacaacaagggctggcggataaagcagagatcgatgccaaaatcacacaggtgctgaccaccacagatgagaaacagcgccgtgcgttgtatcacgatatcctgacccgtctgcacgaagaagccgtttatctgccgctgacctacatcactgccattgcggtggcaaaaccggaaatcggcgatgtgccgttcagcgcgatgtcgaatgagatcccgtttgatcagctgacaccagctgcgaagtaacaggtccgcgattatgatgcgatttattttccggcgggtgctgctgctgatcccgatgctgctcggcacctcgctgtttatctttctgatcctgcgcctggggccgtctgaccccgcgctggattatctgcggctctccaaaattccgccgaccccgcaggcagtggaaagtgcccgtgagtttctcggtctcgataagccgatcatgacccagtattttcactggctgtctgacgcgctgcatctggattttggtatctcttatgccacacagaaaccggtgctgccggatctgctctatttcctgcctgccacgctgcaactggcggggctggcactggcgctgactattattttgtctgtgccgatgggaatgctggcggctcgttaccgcgaaaaatggccggatcagctggtgcgggtgattgcgtttatcggggtttccatgccgaatttctggctggggttcctgctgatcctgctcttttcgattcccctcggctgggtgccgccgatgggtaaaggggaagcaaaacacctgatcatgccggtaattgccatttcgctgatgtcactggcgattaatgcccggttgctgcgggcaagcatgcttgaggtggccgggcagcgccatgtccgttatgcgcggctgcgcgggttatctgaaatgacggtggagcgctcgcatattctgcgcaacgcctggctgccggtgatcacggctatcggtatgcatatcggggaactgctcggcggcgcgctgattatcgagagtattttcagctggccgggtgtggggcgctatgcggtctctgccattatgaaccgggattatccggtgattcagtgctttaccctgctgatggtggtgatttttgtcctctgtaacctgattgtggatattatttatgcgattgcggatccccgcatccgcctctctgcggagggtatcgaatgagcgatatgatactgaaagccccttccgcctggcggacactgagccgtaatcttttgttgtggtttgcgctgtttgtggtggcactgctggtgctggccatgattgccgggccgtggatctccccgcatgatccggatctggtggagttatcaaaccgccttcaggaaccggacagtcagtactggctcggtaccgaccatctcgggcgtgatattttttcccgcctgattgccggggcgcggatttctctcggcaccgtagcaatcacgctggtgattattattacgctcggactggtgatcggcggcattgccgggtttaccggcggacggacggatcaaatcatcatgcggtttaccgatgtgttcctgacattcccgacactggtactggctctgtttttaatcggcatcctcggtaccgggctgacaaacgtgattatcgcgatcgcgctgtcacactgggcgtggtatgcacggattgtccgcgggatcatcctctcgctgcgccaccgggaatttctgctggccgcacgtctgagcggagccggtaatgtgcggatttttctccggcatctgtttccggccactatttcccagctgatcgtgctggcgaccctggatatcggccatatgatgctgcatgtctccgggctgtcattcctcgggctgggcgtggcggcacccacggcagagtggggcgtgatgatcagtgatgcccgtcagtttgtctggacatcaccgatgctgattttctggccgggtttaattttatttttcagtgtgatggcgtttaacatcctcggggatgctctgcgtgatcgtctggatccgacactgagggccgggacatgtcattaaatcattctgtactggaggtcagccagctgtcggcggggtatctgcataataaccatgcccatttcctgatttctgatctgtcattttcactgcggcgcggcgaagtgctggcgctggtcggtgcgagcggctccggcaaatccatgacctgctctgcgctgctggatgtgctgccgccgggcgtgcagaaaacacagggcactattctgctggacgggcagccggtcaccgggcaggctctgcgcggcagggaagtggcgtcgattatgcagaacccgcgcagtgcatttaacccggtgcggaccatgcatcagcacattaccgaaacactgaaggccgcccggcagccgctgcatgatattgataaacgtatccgcgatgtgctggcggaagtggaactcggggacagtgagcatatcctgaagctctatccgtttgagatgagcggcggcatgttacagcgcatgatgatcgcgattgcgatcctcagcgacgcgccgtttctgtttgccgatgagccgactaccgatctggatctggtggtgcagatgaaaattctcgatttgctggatcacgtagtgactgaccggcagaccgggcttctgctgatcacccatgatatgggtgtggtggcgcgtcttgccgatcaggtggcggtgctgtcagacgggaacattattgaaaccggcacggtggaagatattttttcccggccgcgctcgccggtgacccgcaatcttatttctgcacacctctcactgtatggtttggagctttccgcatgacattgatctctgttgaacacctgagcaaaagctaccaaagccattcactgatgggggcgggaaagccgcgctgtattctcgatgacatttcactgaccctgaatgagggggagaccgttgccctgctcggacgcagcggctgcggaaaaagcacgctggcgcgtcagatctgcgggctggaatacccggaaaaaggggatgttttttaccgcggaatgccggtgcgcaaactggataaaaaacagcggcggcagttccgttcggagatccagatggtctttcaggatccgcccggggcggttgatccgcgttttaccctggagcagattattgccgaaccgctgaaattgctgacctcactggatgaaacacagcgcaaagcccggactgcggaactgctggatatggtggaactgccgctgtcagtgctcggcaaactaccgtcacagatcagcggcggacagttacagcgcatctgtattgcgcgggcgctggcaccggatccgcgtctgattattctggatgaagcggtatcaaacctggatattcatctgcaggcatctctgctgacgttgctcggacagttacagaaaacgcaggggattgcgtatctgtttgtcacacatgatctgcggctggtcagccggtttgccgcacgcgtggtggttatggatgagggcaaaattgcagaaacatcgccgcagggatgcattgagcaactgcgccatcctgcatcactggcactgaaaaatgcggtattgccgccattcccgtcttcccgccggcgcaaaccggtatctgtctgataaaaataaaaaaagcgccgtgatattaacagggcgcttttactcattatttacggtttaaactttaccggagcaactgcatttggcggcagtctctttgtgatgatgaacatctgtgccgcaacaggcatcaatggctttattgataatatccgccagcttattgacggtggaaataattgaggaaagctgttcacacacatcgcggcagtctgcatgtgaatgaccgtgatccggaatcaccggcggcgtcagactgtcacagaggatttcctgtaataccagcaggaagttcgcgataccggtggtgtagatataagagcgcccgccggtctgctctgccagccgctgatactcttttgtcactttgtctctttccgcaatcgacgggaagcggtcaaggttttccgggcgatcatccggggttccctgataggtgtaaactttgacgccgtgaagctgcgcgacaccaatcgcctcactgtttttcgtgacagcggcactggtcagtgttccgccgccgccttccatgccctcatcacccagtacaaaaatggcgcgccgggcgccgggacgccagtcaaaatatttactggcatcaataaccgcacggcataaatcctccttattcccggcatgatcgcggccatcggcttcggtaaatggttttctggcctgtaagtttccctcggatgcgcctttgccaatcagataatcactcactgtctgatcaaactttgtgccggcccaggtaccctgaatgcccaggaaagttgcccgcaactgagacggacagcgggcagccgctttctctatcgctgcgtctatttcacggctcagatcggcggactcatctgacattgagccgctggtatcaataatcaccaccaaatccagtgcgatatcactgttaccgcccatgacctgtactaccgggtcaataccggctgccggtgcagacagatcctgtgtgttgagatcctgattcattgtttttcctctgtgtttattgcaggtgtgttttctgtgcaatctgttgcgcagaggggcagtatctttttatttctcagggatgtatttcctaaaaaataacagaatcagtttgtttagtgaggggaagtcatggccccggtgacagtggcatggccggggcagaaggtgtggttatttttacaataaaaaatcgggtttattaatatttttatttaaaaacaataaattatctatgtccaataaagtatgaacagtatctgatgaatcatattgttttctgagttcattcagaaaaacgatcagtgagatatccagtgctgtgagtatccggaacagcaggctgaccgtcagatttcctttacccagctcatagcgggaaacctgttgctgactgatttcaagtgtaaagcctaacttctcaccgcttatttttttcagcttacgaaatctgtacagcacctccccgatatttttattgagtaaatctgaatctatgcattgatatttctgcaccatttatctccgtagattaaatctgtcataacaggaatggttgttattcccggtaaataattaccggttgtgttttcttgtcttattaacatgcctggtgttttttcaaaaaaaggaattgtgtatctaatgattaaaattaaataacacatgttattttttgatgcaaatataatcttggtatgttttattattttcataaatttacatatttggtatgtagtttaatcacttttatttgacacagcgcaaaatataaagaatctctcatgttttacatgaattttttgttgaaattttttattcgatctcttcgtgacattgtctggcaggacatgttaagcaaatcgtgatcagaaaatgcattattttgtctgtaataatggacatttttcagtatatttagccattatcataatgtgataatattaaattatcgcttattttacagttgtttgtatcgtttttatcacgtagagagtgccatggcagcggtattatttaattgttaaattgtatgctgtaatatgttataaaaataaacatctgtaacaaaattctgtttgttttgatttcaatgcattaaattttgtgtaaattgccattaaatagtattttatactattgttaatccaattatagataaataaagaataaacattccggggattttgttactaagtaatgtttacttacatctttcatattaattcattgaaatatcagttaaaaataataaaaacaatttattaacatgtgtatcataaagataccttatctatcatcgtagttgtaataacagataaacacacgtaatgtgtaacgtaaatataacctgaattatttctgataataatatttatctgctgactttatatattaataaagcctgatggattttatttaattgttttttacttttgtatcctgcttttatttttgcgccgggaggctttcccttatgaaaaaatataaatctgtaaaaagattcgcattgccggtatctattatactggggtcgggattatattcacttcccggtatagcggatccctgtacatcggtgacagacggtgacggacaaaaacacctgacctgtacctcaaccatttattactacaattccggtgagcacggcggaacggcattatccgattatgcgagtgtgactatcaacactacaccggacgcctctgtgtcaccgttacagggctgggcggtttacggaaacagcagcacctataatttcaatgagctgaatattgagaccagcggtgccaaatctgacggtatcgtgacaaaaaacggtgccagtaaaatcaatattgataaattaaccattaaaaccaccggttcttccgctgatggtctgaacgtcggcaaagagagtaacggcacggtgattaccgtgggtgacgatgcctatattgatgcattcgggatgggggtgcgtgctaactcatcaactaccggcaccaacgagaacctgattaccctcgggaaaaatgcggtcattatttcgcacgaagccggcagtaatctggaatttctgggacgcgaattaggcaccggatatgcggtttacgccgggaataccaactccgcggcaaccggggatgcccgtgtggtgatcggtgataacagcaccattgtggcaaacggcggctctgcgcatgcggtttatgccaacaaaggcggtattatcgaactgggctcaacgaatatccgcgccgaaggtacgacggcacacggtatttatgccgaagccggatcgaaaaaggtcggtggtgcaacagtcactgcgggcagtcaggtgtatctcggcggtgataccaccattaatgtggtcagcgacggccggaaatttgccctgtatgccaaaggggcggattcacagatatcctcttctgatcgcctgtccggtgacagcatccgcagtgtattcaccgttgacggtgatatgaaagcagagacaaaagggattattgatctgcagatggcggataacagccgttttaccggcagtaccaattcactcgaatataacgcggcaggcgcgccgaatacgaccacaaacggcaccattaacctggatattgccggtgccagcagcatctggaatatgaccgctgattcagtgctgtcaaacctgacactgaccggtgcgacactccgttataactctccggacgatctgagcgatccggacgcctttgtaccgaaaacactgaccgtggctggtgattacaccggtaacggcggccacctgattatgaatacggtgctgaacggggatgattcaccgaccgataaactgctgatcaaaggtaattctgccggaaccacgacggtcagttttgtgaatatcggcgggcagggcggactgaccatactcaacggcattgaagttatcacggttgacggtatttctgacggtactttcactcagaacgggcggattgttgccggggcgtatgattattatctgggacgcggtaaaaacggcaatgataaaaactggtatctgacatcagattacagcccggtgacaccggatccggagccggaaccgaagccaaaacctgagccggagccaaaaccggaaccggtagtccgcccggaagccgggggatatatcaataacctgtatatggcaaataacctgtttaatgtgcgtctgcatgatcgtctcggtgaaacccaatataccgatgtactgaccggtgagcgcaaagtaaccagtctgtggctgcggaatgtggccggacattcaaccgtgaaaagtggcgacgggcagttaaaaaccggaacaaaccgttatgtggtacaactgggcggggatatcgcacagtggtctgataatgatcttaaccgctatcatatcgggttaatggcgggttacggccgcatcagcggcaagaccacaaaccatgtgacaaagaccagagccaaatctgacgcagatggttacagtgccgggatctacggtacttactacgcgaatgaagcggataaaagcggtctgtatgttgacagctgggtgcagtacaactggtttaaaaaccggattaacggagacgaattaccggaagaaaaatataattctgacggtatcacgctttccgccgaagccggatacagtttccttataaatgaaacacagggcagtgatggcagtaccaaccgctggtttattcagccgaaagcacaggtgacctatatgggtgtgaaaatgaatacccacacagaaaggaacggcacccgcgtatcggcaaccggtgaagggaatattcagactcgtctcggggtaagagtgtacggactgggacaggcgttgcaggataaagacaatgatcgtcacttccagccgtttgctgaaattaactggctgaataacagtaagatgacgggggtatccatggacgacgatcacgttggtcagtccggcacccgcaatatcggtgaaattaaagtgggagttgaaggacaactgacccgcaatgcggatatctggtttaacgtggcgcagcaggccggcagtgatcattactcggatacacagggtatgttaggtctgaaataccgcttctaactgtcagtaacatccggccgggataacaggaatactgttatcccggcttttttgtgtccggattgccgaatcttctctgtatgctgccggagactgtcctgaacataaaatgaaggcaataatattcatcttatgttcattaaactgaatacggatatttcagtttgcacacagaaatacatagcagtataagggttataattaacgtaactgcaatgaaataatcggataaataaggatgttttatgacggttaaaaatttctatttttctcagattgctgatttaatggttgaaggtgcaggaatacatggcagttattcactttcactgacggttaatgaggaaaatacggatgccggaaagaaaataagggtgtcagcaaccgggaaaagcaatgctgtaaaagcaacggggtccggaaaattactgttttggtgcaagataaccaataatattaatactgaacgctatatacttgaaaaagtaaaaggggaatcatgggtgattggtattgatgatatcctggtgggcagcgtggatttcaccctgaaaaaatcaccaaaagtaccggagctggttattgaatttggttacttttacaatgccgggtatataggctccgtaccaccgttcccggccagctgtaagagatcgattaagttaacggacttcagacggtgagaatatgatattacgaaaaagcattattacacttttattttttgttttttcaatggtttactcgtcactgtcttttgcacttgagtatgaaagtaaaggtgtggagaaagcgtctgaacttatcaggaaaatgccgttttcagaagacagtgaaaaaccggcactgttgaaacagataaaagctgtcagggatgaaaatccgggagatatccgggtttccgcaatctatattaatgccctgatttctgagaaacagtatgatgatgcactgaatgaattatcatccgtgaataacctggcggattacagtcagatgatgctgctgaaatgtatgctggaagatcgcctgaataaagagagtgcggcatgctacaacacattcatcgcgaatgctgaaagcaaaaaagagaagaatgttgattacctgatggcactgtatttatccggtaataaaaaatataaagcggaaaagaatcattttatccggaacgacaaatacagcagtgatattgatgctatcgaaacgaaaagtaaggatgagattttacgggagtttttcccgcaataatacattctgtttattatcagtaccggaaaggcgcctgcgggcgcctttccgttatctgtgtatttatctgtgataaccggcaggtattaatcattgccccagcggttcagaaattcagcaatatcatcgatacgctgtttatcgataccggcttcagccgccatctttttctgggcttcctcactgatctcttcattgtttgtcagacaggtgatcagtaactgaaaatagtgtgccagtccgtcatattcctgctcttcaaccggctcttccgattccagtgcgtactcatcagcgatatcgtagtatttatccggtactatattttccataaattcctccggggttaatgccggtgtcggtggtgtgtatcacaccattgtagccgatccggcttcgttttcgcaccttacctgccacaccattgctgaatagtgcaacttcgccgggagttttctggttttactcacaatatgatgtgtcttgtgatgaaaataataaaataactaaaaatgcctgaaaacgaccaaaaactccgtcttcgtcaatttcccccctgaatccatcgcatcgtgaaatgcaaatgagcgcaacttcagaatttaagttcgtcaatatgaagttatgaagaattaaaaaaatgaattttaattgaaccagcgcaaaaatttcatagtaagcagaatatccgcttgatgaatatacttggggtaatatactatccacacatccaagtaatattatctttccggcagtcagtaaaacacatcttaatatgatgggtttgataatacctttatgtacacagtgtcattgagtaaaaggctgacaatcagcaatgttaatctgttggtgaaattaaaatcactatgttgcccgtaaattaagtgaaaggttaactttcggtaattaaaatatagtgagttttaagttaattataaaatggcaattgtgaaacaaaattaaggtaagactgttatgtaaagggatcgcagcaagtcactgaataataaaactaatatttgtcggttctggttcgggcaacacgggtgtgataccggtgaattgttcagttatcaggctgttaaagctggttaatcaggtttttattaaaatagttaatctgcttttttaaatacttatttaatgaacgacaggaaaacgctgattttatcagcgccggtttcgttttcattaattaattaacacttatattaaatcagaacccaatataaaacgttttccgggtctgaataaaccggtttacggaaaacaaaaggtatctttttatgttcatccgtaaccgaaataacaagtaattttacttaacctgattctgaatcagaaggaagcatcatgaaattttcaaaattagctttagtcaccgctattgcagcgtcagcagtttctttcagtactctggcagaaaacaccgggacaattaaattcatcggtactgtggttgattctccgtgtaacatcgcgcagaaatccctgaaccaggaagtctctttcggtacgttatcacgccgtgctctggaagccggtaacagtgctgaagtggatttcaatattgaactgaccaactgtaacttcaaaacatacggtggcgataaaaccaagccggatgcaatcaaaaccatggaactgactttcaccggccagaactatgctgatgcaactaacactctgctggcaacctctaccggtaacagcaacaacctgggtatcgccatcgacggttttaaattcggtgaagcaaaagatgtgttaccacgtatcgtcaatcaaatcggtgataacacactgtctttcaaagcactggcaaaagccattgatgcatccaaagatgttccggaaggccagttcagcgctatcactaacttccgtatcacttatcagtaatctctttactgaagccgccggtgatgttccggcggtttcagttcagcagagagacattcactgtgagaagataccggtatccagtacgccgtctcatcacggcaatcattctgggatgtatcacctcagccgcttatgccggagatgctgttccgcgtaaagccggctcggcccgtctcaccggaaccgttatttccgccccctgcagtattgcaatgaagaaccgttttcaggcggtcaatatcactcccctgacattaaccgtgctttcttcatctgctgtccgtgaccgttacactcagccgtttgaaattgaattgcgtggttgtggttcccgtttttcttctgttgaccataagacatggataatacgtttcgacggtatccgggcagacaatactgatgcatttgaattacagggcccctcgcgggggttgggtatttctttgtctgataattcccggcaactgctgacgccgggcaacagttacccggttcataacagtatattgcggactgataaatcaggtaattctttgtttttgcgctatttcattaagccggagctgacggggatgccactcgaggccggcagttatcagggactgatacgcttttccgttaattatgaataacaccttttttatctccgggctttttgccgggagatgatgttttctgtatccggatggtaagacgatatgttcagatttgctgatactcattatcccgttctgctggccttaagtctggtcacgggatccgtatatgcatctgaatttaataccgatatcctggatgcggatgatttgcagaatgttgacctcagccagttctcggttgccggttatgtcccgcctggagactatgtactgacactgttcagtaacgggatgcgcctcggcgcaccacgggatatcacggtttttccgccgccagcggctgaaggtgataccgggtccgatatctgtattccggcggatgccgcggatttactgggcctgacaccatcctccaaagaaaaagtcacactgtcccatgacggaaaatgcctgaattttaccgcgttaccgggtgtacaggttaaagcggatctgccgtcactgtcagtaaaactaagtattccccaggcgtggctggaataccgcgacccggactgggttccgcctgcactctgggaagacggggtcagcggcgcatttattgattacaaccttaacgccaatgtcaccgatgaatcttccggcaataaacatacctatgcctccgccaccgggaccaccggggttaacctcggcgtctggcgtctgcgcggggactacagtgccggttaccggaaagtcagcggtaatcagaacagccgtcaggacagccattttgatttcagccggttatatgcctttacctcgctgaaaacactcgcggcagtgttaactgtcggggaaaactatttctattcgaatgtgtttgattcctggcagtacaccggtatttcactggaaagtgatgaccgtatgctgccgccgaaactggtcggttacgcacctgaaatcattggtgtggcctccacgaatgcgaccgtcactgtccgcagccaggatcgcgtgattatggaaaccacggtgccgcccggtccgttccgtattcagacactggacagcgggatccgcggggtgctggatgtcactgtccgcgaagagaacggggaagagaaaaaattcagtctcaatacggcctcactgccgtatctgacccggccgggccgcctgatctataaactggctgccgggaaaacccgctatacggctcatgacctgaccggttcaccggttgctgccggagagttctcctatggcctgaccaatgcctggtctctgtacggcggggcgcaggtcagtaaagattatcagtctgctgctattggtatcggccgtgacctgttcgcgttcggggcattatccgctgatattacccagtccgtcgccagattgtcacagaataccctgcaggggcgttcttaccgcgtcaattactcaaaatcatttgaggatatccgcaccgatgtcacctttgccggttaccgttttgcggatcgggattaccgcaacctgaaccagtttacggaagaagaacgaaccggtgcaattggccgggcgcagaaagaaaactatcagatttacctgaacaaacattttgatgatttcagtttatccctgaattatcagtacagtacctactgggcggataagccacagacacagtatggtctttacgccagtaccaactttaatattccggggctgtcacagcaaaacgtgaacctgtcattatcggcctcgcggacagagcgccagaacggctataaagatgacgccatcaacctgtatctctctgtcccgctgtatgccgggcacagcctgacattttctgaatacgccaaccgttccggcggcagaacacaatacaatcacactgtcggctataatggctacagtgatgaaaacagctacagtatgaatgtgggctatactcacgggcaggccgcagacagccgggcaagcttcagcggttactactcccgtgatttctcacaggcttcggtatcggcgaatgccggttatgtgccggggcagtatcacagttatggtggttcggtcagcggcgggatcacggccacgtcgcacggggtggcgctgcaccggaatgccaatggtgacacccgcctgatggtggaaaccccgggcgctgccggagtaccgctggataacggtgtgaccaaaactaactatttcgggcttgctgtcctgccgaatgtcagcagttaccgcaagaccactgcatcaattaataccagccgtctgccggataatatggagacactggaaaccaccacggatatcactctgaccaaaggcgctatcggttaccgcgcgatgcaggtgatgaaaggtgaaaaactgtttgctgtcttctccctcactgacggcagcaaaccgccgttcggtgccagtgtccgcaatgcggataaccgggagctgggcattgtgggtgaagatggcgtgacatggattgtcggcgtttcaccgaaagaaacactttctgtttactggagcgataaaaaacagtgtgaagtcacattgccggacagccttgaagccgcatccggtatgttattactgccatgttcaggctgatggcctgcccggcaaactgttgtcgcatttaatccgtattatgaggtccgttatgctgaaattctgcctgcgcaagagtgtgttaactgcacttatttctgtcaccacactgatgtctgccacagcttacagcgctgtcacacttgatcgcacccgggtgattttccccggtacggaaaaagcggtcaatgtcactattaccaacgataatccgtccgaggcgtatctggctcagacctggatcgaagatatggacggtaaaaaactgacacagggcgcgattatggcgacgccgccgttacagcgtatggagccgaaaaccaatgcgctgatccgcctgagcaccacgccgctgctgagctcgctgccgcaggataaagaatccgttttctattttaatgtgcgtgaaattccgccgcgtgccacagagagcaatacactgcagattgcgctccagtcacgggtaaaactgttttaccgtccggctgccattgtgccggaatccgaaaccaagtgggcgcagaaagttacgctgaccaaaacagcaaacggctaccggatcaataacaccacgccgttccacctgacggttatcggtatcggcaacagcaaagcattgtcagaaaacagcacattcaccacagtgatgattccgccaaaatcgtcacaggatattgtcagtggcgcactgagtacgccgcatatctcttatatcaatgattacggcggtaaacctgcactggaattcagctgtaaaggtgaaacctgtacggtaaccggtgaaaaataaccggtctgcgcggagaaatacggtgatgaaaaacagggcattacggggaataatcatgattgcgggcttatctgcactgcatttccccgctgcggcaacgactttcccggcggcggaagaggatatccgtcagggggaaattgtggtgaatgcggtggtttttaacgcgccctgtaacttacggattcagcattcctctgagccggttctgaccggatgcggtgccggttctgactaccggcggatgaatctccgccatgtcacggctgacagccccgcgtctgtccgtatatatgatgctcaggcacgccgttactctccccgctatcctgtccgcctggcgaatggtgataatgtgctgaaaagtcagggggaattacaggggtataccccttcacggctggaggtcagctatgaataaaatagtgaccgttacggcgctgacagcgctgatctccgtgcttggtatttcaacggcattcagtgccaaagagctgatcattgaattcagcggtgagctgatgagtaccgcctgtcaggtggcgccggaatcactgaataaagaaatcaggctggaaaacctgcactggcgcaccattaatgagcagggctacagctatgtcacgccattttatattgcgattgaaaaatgcaatgccacggacctgcagaaaagcatcagactgacctggaaaaacagccaggtgacagatgtcggtgatgaaaaagcgattccgaccaccggcagcagcggggggcatctcagcatccgtgatcagcggggcaagccggtgacctggaacgcgccgatgaccgcgggtgctgtgactgaggccggtaatcagcagcgccttaattttggtgtggttgtccgtaaaccgccgcaaggtgaggtgaaagtcggtgatttcagcagcactgtgacgtttgccgtggagtatcagtgatgaaaaccaccggaatattcagaatgatgatactgctgtccgcactgacagcagcgaacagctatgcggacgttattatcaacgtctctgcggatatggtcgaacctatctgtgatatccgcagcaatgacagcagcgcaccgctgaagattaacttcggcccgcagcatatcaataagctcaataaagccactgcggtacaacaattcccgctgtatttatcaaactgcaactttaataaaaacctggcgatcatgattacaccgaataccggaaaatcactggtctacaacggaaaaaaagtcctggaaaccagtatcgctaatctggggatcaattttaatgatatgaccggcggaacggccaaatcactgtctgtcggtgaggcgctgcggctcacaccggtgaaagtgagtgagacagagtaccgtattgatttacaggctgatctggtgacaccggttgacccggagaaactggcgctcggtaaatttaccgcctcagcggtagtccaggttgtttacgattaacaggaaatcagattatgtccgccctgatgcaccacactgaaaaacaacgctgcatatcatccgcagcataccgcctgataaggtacaccgggggcgcggcaatattactttctgtgatctctgcgctgccggtaaaggcggactatgagtcttacaccacgaatccggctgatggttatgtggttcatctgaacgcaagtactacgctttctgataaaccttttatcacagcggaaggaaaacaatactatcagataggtcagccggttactctgagcccgggcggtggtaatgtgacggttaccggccaggtaaaatgtctcgggcatatctatccgcgcgggtcgggcgggggaacctacggccctgcaaacggggctttctatacatttggtatggccggctcgttgcagcgggaaatactgtcaggggatactattggttaccatgtctcaaaaaacctggttgtcgggatagactattctatcagtacatactggaaatcggtgactatcaacacttgtgcaggatcaggcagtaacagacctgttgtggttaatgcttctgattttaatcagatatttccgttacgtctgacattttatcttgtcaataagccggttgataatcaggtttatatcccgcagacggatctcggcggattacggatttattattcttcccagggatcggggtacggaccgattgcaccatcaccttccacaccggtgccgatgagtgaaacggcagtaccattacgtcttgccgcatcggttatcaatattccttcatcctgtaaaaccagtacatcgtcgggaaccggcggggcactggagattcgccacggcaagctcaacagtatgaattatgacagtactatcagtgagaaagtcacttatacctgtaacttctctgcgctgaccaatatccgcctgcgtcttgattatacggcagataccgatccgcaaaaccggctgccgctggtgaacacagcggataaaagccagaaaatctacagtgaactgacgatgataaatgacactaacgggcagtccggaaaagagatccgtatggatgtcagggattcacagtcagttaccatcagcagccatctgaaaggcactaatgccacgcccggccattatcagggagtcgcctggctgatcgccacatacgattgattttctccgcacagatttttgctttacaggcaccggtttgttccggtgcttttttgtatttgctgcttttgatgagccatctgatttttgcggaaaaagcggtgcgtaagggatgatatttttaaacagaggaaccggaaatccgttttctgcgggctgaaaagcaaaaacccgccataaggcgggttctttgaatagtggtccccggactcggaatcgaaccaagggcacggggattttcaatccccggctctaccgactgagctatccgggcaacggggcgcattaaaccgtattccgtggtttgcgtcaatgcctttctgtcaaaaaaccataaaaaaagtgtgagtgtgctctttttatgcagaatgcggacgcaatttatgcatgtggtgaataaatcagctgagtgcgccgtttttacggcaacgggcgatagtcagcacatcttctgccaaccgccgggcggtggcgatatcatcggtactgcgggatatcagcagtttgctcaggcatccttccagaatcagttccagctgacgggccaccatatcgcaatcatcaatatccagctctctgagcagctctgtggtaaatgcaaaggcactttgtttctgctggcgggataactgatggatagggtgatccgcatcaggaaaggcgctgctggccgcaataaacagacatcccggaaaacggttttcgcggacacgttctgccagtgccgtgtaacgggcaagcagtttgtcttcacaggacaaagactcatccagcagaacgcggcgctgccagatatcaatctgattgccgtggtaacgcaggcagtcgtaaagcagatcattacgggtcggccagaaaatccgcaggcgttccggatcaatgtccaggttatcgttgagggtggcttcagacatcagaaggccgtggttttccagcagactcagtgcctgattgaggacgtcttcacgttgcacagcaggttctccctgataaaggcatatgattcagaataacgtgagtgctgatgaaaggcgagagacgcgggaaaataaaatccgccccggagggcggatttatcagtgcagggaattacagaacgacactgccgatcaggaagccgaagcagaccgacagtgcgacaccaatggtgcccgggataaagaacgggtggttgaagaccagtttgccgatacgggtggtaccggtgtcatccatctgaaccgccgcgaccagggtcgggtaggtcggcaggataaacagaccggaaaccgcagagaaagaggcaatggcagtcagtggtgtaacacccagcgccagtgccatcggcatcagcgctttggcggtggcggcctgtgaatagagcagggcagaacagaagaagaaaataacggccagcagccacggatgctgagtgattaaatcaccggcagtcagttttatccactcaaggttagcctgaacgaacgtatcgcccagccacgccacacccaggatacagatacaggcactcatcccggctttaaaggtactggagttcaggatgatatcggtttccacacggcaaatcagtgtgatcagtgttgcgacactgagcatgattatcaggatggcgttagtggttgtcataatcggttcagacagcagcccgacactcttactgttgacaaccgcaaagaccacaacagacaggacgccgagcaggaacaggagaacagacagtttggcagccggtttgatggcggctttttcactgcggttcagttccaccacaccttcggcaaggcgtttcttaaagaccgggtcatcagcaagcctgtcatcaaacagccaggacacaataaaggacatcaggatgatcgcgacgaaggtggacggcagcaggatcatcagcagatgcagatagctgactcccatcggctccatcactgatgacatatacaccaccgctgccgaaatcggtgacgcggtgatccctatctgcgcggccacaacagcggtggaaagcggacgggaaggtttaatcccctgttctttggcaacttcggtgatcaccggcagggtagccagtgaaatattaccggttccggcaaacagtgtcagaaaataggtgacgatcggggcgaggatggtgatatagcgcggattgcggcgcagcagtttttcagtctgctgaaccagataatccagcccgcccgcgacctgcatggcagagattgcagcgataacagccattataatggagataacgtcgaacgggatgctgcccggttttacgccgatggcggcgagagcgagaacccccagtccgccggcaaaaccgatacctatccctccgaggcgcgccccgagataaatggccagcagtacgataataaattcgatggctagcataagtgctcctgtaaaatcccgtagaaaaatgttaaatttttgtagtagggtaataaaaaagcacgttaccttgcgatgacgtgcttttgtgttctatgtatttcttattattatattagtcatcaaagcgttttgctttataggccggattttttaagttctcgatggagaaaatatcatccagctcagcttctgtcagaagaccgcgctccagaaccacttcgcgcacactcttgccggtttccgcacaaatcttaccgacgatatccccgttatggtgaccgatgaacgggttcaggtaagtcacgataccgatagagttgaacacatacgcttcacagatttctttgttggcagtaatgccggaaacgcatttctcacccaggttgcggcaggcgttgctcagcagagagatagattcaaacatcgcctggccgatagccggttccatcacgttcagctgtaactgacccgcttcggcagccatggtgacgcagacatcgttaccgatgactttgaaacacgcctggtttaccacttccggaatcaccgggttcacttttgccggcatgatagaagaacccgcctgcatttccggcagattgatctctttgagacccgcacgcggaccggaggagagcagacgcaggtcattacagattttagagagcttcatggccaggcgtttcagcgcactgtgcagcatcacgtaagcaccgcagtcagacgttgcttcgatcaggtcttctgccggtacacacggcaggccggtcacttccgccagtttttccaccgccagtttctgatagcccggagcggtgttcagcccggtaccaatcgcggtggcacccaggttaacttccagcaccagctgagcggtgtgatgcaggtttttgacttcttctttcatcaggatggcaaaggcatggaattcctggcctaatgtcatcggaaccgcatcctgtaactgggtacgacccattttcaggatgtctttgaattcatttgctttggtatcaaatacgcctttcagatactcaacggatttaatcagctgggtaattgaattatagacagcgatacggaagccggtcgggtaagcgtcgttggtggactgggctttgttcaggtgatcattcgggttgaggaactcgtattccccttttttatggcccatcagctccaggccgatatttgccagcacttcgtttgtgttcatattcagtgaggtaccggcaccaccctggaaaacatccacagggaactgatccatacatttaccgtggatcaggacttcatcgcaggctttgatgatggtatccgcaatcgcacgcggaatagtgtgcagttctttattcgccatggcagcggcttttttcaccatcaccatgccacggataaattccgggacatcattgattgtacggtcgctgatatagaaattttcgatagcccgcagtgtatggacaccataatacacatcgtccggtacttcgcgtttacccagcaggtcttcttcgatacgaaaattatttgacatgagaaccttctttgattgaatggttgtcttacttaatagtaaagacagcaattatattattttgtccgatattaatagagagtatcacttagtttattgcattctcagtgatgatattctgtatttgcgttgaatccttttagccagatcacttattaactgaaatgtttgcactattatcactcttatgtgcgataaatcacaaatatcatgtgcgattccggcacatgccgcgcttgaaaacgtctgaaatgaccccatcattatgaacatctatgactaaaaatcgaatttacagcgcgtctcttagaagtagttcacaaaggctgacaaaggggcggttttttacatcacagtgcaccacataaggaagacgttatgcgttggttaccccttatcctcatttgtctgctgatctatattgaggcggtcatttttgttcacgtggcatctgccatcggtgtgtttatgacactggtgctggtggtactgacatcctgtctcggcgtgtctctggtgcgcaatcagggaatgcgtaatctgagtctgattcagcagaaaattcaggcgggtgaaagccctgcggcagagatgatcaaaagtgtctctctggtgctggccgggatcctgctggtcctgccgggctttttcaccgatttcttagggctgttgctgctgctgccgccggtacagaaactgctggtgtcccgtgtactgccgtttatccgcgtgtatcagccgcggacgaacccgttcgccggtaacgcggcaaaccgggggaatgtgtacgaaggggaatttgagcgccggggtgacactccatcacagcggctcaaccagtcaccggcgtcgcacaacgatgataatccgcaggataaaccctgatatctgaacagtttggacagagaccgtgaaatttcgtatttttttcgtctctgcccccttgaacttgtccggaactgaccccatctgctcaaacatggcaatggtattagtatccggcctgaacctttaatccacgttatttgatacggatttttttacaggagatctatcaatgaaaattcgtcctttgcacgaccgtgttattgttaagcgtaaagaagttgaagcgaaatcagcgggcgggatcgtcctgaccggtacagcggcagggaaatcgacccgtggtgaagtgctggcagtaggtaacggtcgcatcctggaaaacggcgaaatgaaaccactcgacgttaaagtcggtgatatcgtgattttcaatgatggttacggcgtaaaagctgaaaaaattgataatgaagaagtgctgattatgtctgaaagcgacatcctggcgattgtcgaagcataattacaccgtactggttgtactcagatcttcttaaaccataaaagcattcgaaggaatagaaataatggcagctaaagacgtaaaattcggtaacgacgcccgtgttaaaatgctccgtggtgtcaatgttctggcagacgcagtaaaagtcactttaggtccgaaaggccgtaacgttgtgttagacaaatcattcggcgcaccggttatcactaaagatggtgtgtctgttgcgcgtgaaatcgagctggacgacaagttcgaaaacatgggtgcacagatggtgaaagaagttgcctccaaagcgaacgacgctgcgggcgacggtaccaccactgcaaccgtactggctcagtctatcatcactgaaggcctgaaagccgttgctgcgggcatgaacccgatggatctgaaacgcggtatcgataaagccgttgttgcagccgttgaagaactgaaaaaactgtctgcaccatgctctgataccactgcaatcgcgcaggtaggtactatctctgcaaactccgatgaaaccgtcggtaaactgattgcagaagcaatggataaagtcggcaaagaaggcgttatcactgttgaagaaggcaccggcctggaagacgaactggatgttgttgaaggtatgcagttcgaccgcggttacctctccccgtatttcatcaacaagccggaaaccggttctgttgaattagaaaacccgtacatcctgctggtcgacaaaaaaatctccaacatccgtgaactgctgccggttctggaaggcgttgccaaagcaagcaaaccgctgatgatcatcgcggaagatgttgaaggtgaagcgctggcaacactggtggttaacaccatgcgcggtatcgtgaaagtagctgcggtgaaagcaccgggcttcggcgaccgccgtaaagcgatgctgcaggatatcgcaaccctgaccaacggtactgttatctctgaagagatcggtatggagctggaaaaagcaactctggaagacctgggtcaggcaaaacgtatcgttatcaacaaagataccaccactatcattgatggtgtgggtgacgaagagactatcgcagcacgcgttggtcagatccgtcagcagatcgaagattcaacctcagattacgaccgtgaaaaactgcaggagcgcgtagcgaaactggcaggcggtgttgctgttatcaaagtcggtgcggcaactgaagttgaaatgaaagaaaaacgcgcccgtgttgacgatgctctgcacgcaacccgcgcagccgttgaagaaggtgtggttgccggcggcggtactgcattagtccgcgttgcggctgctctgactgccctgaccggtgataacgaagatcagaacgtgggtatccgtgttgcgctgcgcgcaatggaagcacctatgcgtcagatcgttgaaaacgcaggtgaagaaccatctgttgttgttaacaccgtgaaaggcggcaaaggtaactacggttacaacgcagccaccgaagaatacggcgacatgatcgcaatgggtatcctggatccgactaaagtaacccgttctgctctgcagttcgccggttctatcgcgggtctgatgatcaccactgaagcgatgatcactgaactgcctaaagacgacaaaatggatttaggtgcagccggtggtatgggcggcatgggcggtatgggcggcatgatgtaatcatgtagtctgactgcaattgtttgctgaaaaagcccgtaacctgattggttacgggctttttttgtgtgtccggtttgtattttataatatcccactgtttatcatcattatgaggtattattgagagataccgctgctgaaatgggggagtgccggatatgctggattttctgaagaattacgacaacttaaccgtcagtgagaagaaagtattaaaatatcttaccgaaaatattgccgatatcccctggttaaatattaatgaattagtcgccaaaacgtttgtgtccaaaacggtgattatcaatttatcccagaaattaggtttcagcgggtttaaagaacttaaatttcagattaacaatcatatcctctcacaaaataaagcagagaaaaaagcacctgcatcctataaaaaacagctcgagaataatattcataagaccttcacactgattaatgaagatcagatccgcgattgtgcaaaaacattacgcggttcacggaatatctttctggtggcacggggaaccagcaaggcggtcggttactatctggagcatttattattttcgctgggactgcactgcttttttattaatgactataacctttctgactcctttacccgccttgtcagcaaagatgataccgtgatttttatctccctctccggcggaaccaaaaaaatcattgaaaccgctaaaatcgttcagctgaaagatgcccatatcatcagtatgaccgccttccacacgaatgaactgaccacatacgcaaataacacactcttttgcttctctgacagttatgacaccaaacgggatgattcaaagtccagaaccggattttttatcctggtggatttattaattaatgaactggaaagtttgctgtaaataaatgagctcattatttagcttaagttgaattgaatgctttttgttcaataattcctgctgtttttaaaataatcgtttattcagaaaatcattaacaaagcttctgaaaaattattatcaccatgatttttaaattattttcgcctgaaaatgacccgggtcataatttaagacctgagataatatttaaaaccgtaccatcatttcatttcaaaaaggcaatgctagtattccgggtaatgtcaatattcttcatcgcaaggaaacactatggctaaaagaaaattcggagagtcgatccagcgctttggccggacactgctcctgccaatcggggttctggctccgataggtatgattctggggatcagtggtgcattagtgcagacctacatgattgcccggttccctttcctcggaaatgaaacggttaacgcactgcttgtcagcatccgctctattgcgggggttatttttgacaacattccgctgctctttgccatgggggttgcctacgggatgagccagcgtgataaggggatcgcggtcttcgcctccgtggtggggtatttgtcactgattatcaccatgaatatctggctggtactcaccggtaaactggctgatccggccattatgggacaggtggggcaaattaaggttctggggatccaaaccttaaatatcagtgccgccggggggatcatcaccggtttaattgccgcctgggcaacggataagttctataaccttgaactgccgactgccttcgccttcttctccggtaaaaaatccgtttccataatcatggtcggcctgatgatcatggtcggcgcgacattaccgtttatctgggaagtgctggttcaggggctgatgaagctctctgctgtcttcctgagccctgtcggtccgttctttacggcgggggggggggggctgtttttttcgttcggtctgcaccacgtctggaacgtgctgttcagatttaccgaagccggtggtacttatgtcatcgacgggcaaacctacgtcggtgttgttccggcgctgacagaagtgttattcaaacagggccccggaaccgaatactgggcgatgatgccaagcctgacgcgctttatggcgcagcagcaaatgctggtcacgctgttcctgttcccggcaatcgcattagctatctataaaacatcgaagaaagagaaccgcgcggaagtgaaatccatgctggtgacgatggtactgaccgccatgctcggtaacgtcacggaaccgctcgaatttaccttcgtatttatcgcaccgctgctgtatttaatttatgccatcatcgtaggtattggtgcggtattgctgtcattcgccggtgtcgcgattggttatatccgcggaaccatcttcgatttcacgattttcggtctgctgtacgagcgcacgaactggatattcctggtgcttatcggtaccggtctggcagtagtgacgttctttatcttccgctgggctatcctccggtttgatattaaaacgccgggccgtgaagaatccagcaacctgaaaaacacgttaattaaagaaaaacgttatggtgaaattgcagaaattcttatcgaagcgttaggcggaaaacaaaatatccgtaacgttgataactgtattacccgtatgcgtatcgatatcgcagaagtgaataagattgataaagagttaatgtcggaatcaggatgtactgcattcttctttccatcggcaaaccacgtccatgttgtttacggaccgaaggttgaatttgtccgcaacgctgttgatgaagcaatgaagaaataaaaggatatatgatgagagctttatatgattctaaaagtaaaaccatcgatgaccgcggcataaaagcgctgctgtcagatgaggccaaatacaatacctggctgatgtttgaatcagtgttagctcaggcacaggcagaactggggtttattccccggtctgctgccgatgaaattaaagaaaaggcggttattgagaatatcgattttgaagagatgagccgtatctatcagaaaatcggtcatggcttcgtaccgtttttaaaagtattagtgaatgcctgctcggaagagagtggtaaatatatccattacggtattaccacccagaatattcagcagagttcgcagctgtatatgatgaagacagtccataataaatttatgctgctgttaagtgagatcctggaaaatttatcgcgtctcgcagaaaaaaccaaacacatggtaatgccgggcagaacacacggtcgtcacgctattcctatcacatacggctacaaagtggcggtgtggatcagcgattttatcgattgcagccagcgcatgaaagagtgtgaaaagcgtgtattcactatcatgatgggcggcgcggtcggggcatttaacaccatgccgggcatcggtctggaagtccagaagcgggttgctgaactgaccggcatgcatgcgatggaagtgccgtcccgtaacctgagcacccataaactggaatatatggcgaacctggcgctgatggcgaatatctgccacaaaatcggtgaggaagtttacagcaccacgctggaagagatcgcggaagtttccgaaggctttaccaagggtaccgtgggcagcagcaccatgccgcacaaaattaacccgaaactggccaaaggcattattgcgaactcccagaaactgtactcactgccgggtgtcggcatgtactccgccgtcagaccgtatgagggggacagcagctcttatatgttattcgacggactgatcgaggaagcactcgaactgaccaccgaagtgctgctgagaacagaagagctcaccagaaccatcgtgcctcatgaagagagaatgctgcacaacgtcatgagaaacaaagggctggataacaccgaatacgtgatgatgaaaatggcggaaaagctgggtaaggataaagcgcattcattattatatgaggaagcgatcaaaactgctgcggatggtgaggatttctacacgaacctgacgaaaaacgacactattaccgctgccttcagcaatgaagaaatcaaagcaatgttagatccgcgcgcgtatattggtctgtctgtcgaaatcgccgaaaaagaagcgaaacgcggttcagatgccgctcagaaaattaaaaaatactatcagtaaattaccgggctgacacaggaaaaaccaaaccggcactctgaggaaactcaggcgccggttttttttatgcataatttgtggctgattgcgatcagcgggtggttttcagcgattagtttttgaagtcgctgccacaaagtggttaaattagctgtataaattttttccaaccgtgaatgaggaaaactatgcggattaaaatgttacccggtgctctggcactgttattactggcaggctgtacgaccacgaacgaactgagctccgccggatcacaggtccgcttttccgaagagcagccaccggcagaatgtcagaaattaggtgaagttaccggtgtacagagcaactggatgaccggcgtcggtaatgaaagcagctccatgcgcggtgcggcaaatgacctgcgtaacaaagctgcggcaatgggcggtaacgtgatttatggtctcggcagcccggcagagtcagcgattgtgtccagcctgatcccggtggatagcaagctgacgggtcaggtttttaagtgcccgtaatttcgcgtcatccttccgtccatagcggcgttggctgcgctcagcggcccggctcacatactgatgtatgctccccgtgcctcttcgcttgccgcctggctctggacgaaatgatttagcgaaatcctgagattc

SEQ ID NO: 5 - DNA, 51498 bp, unknown
  Altogen 322075 strain
  misc_feature (34)..(34): n is a, c, g, or t
  misc_feature (25201)..(25201): n is a, c, g, or t
  misc_feature (37025)..(37025): n is a, c, g, or t
  misc_feature (50699)..(50699): n is a, c, g, or t
tgataaaaaaccgccgttaaaattaacaggcggnaaaaaaaaacccgccgttaaaattaacaggcggtttttttattaataaaataacttattgttttttcttaaagtagcacgttagtttattttgcagatgaccggtaaaaaacgcagaaagcatgcgagccatggatggcgagcctgagcgtatagggacatattcacagcgactttctgcttttaccggttatcagcatggcaccgtaatcacggtttgttgtatctgtatttacgaaaacgcacggaatctcagccaatcttcactgccgcagtggcaataaatgtcggcagataattatcgataacaaaacgcgggttcggctgccagtcctcataaaaatctgtcagatgaaaaccggctttcagttgtccgccgatcaaatctgtcagggaatggccaaacacaaaagcttcctgctgtgcctgcttctctgccacctgctccggtgttaatgcggtcagttcagagaacggcattttatatgctggtctgataatgccttcttcgcggtatttcacatcacgatcgccgacaaataccacggaattaaagaaactggccagcagtgtgccgccggttttcagtacacggtggcattcacgccataccggattcacatccgggatatacaggttggaaatcggatggaacacgcagtcaaaagtaccgtccgcaaatacgctgagatcccgcatatcgccctgtaccgcctgcagtgtcagcccgtcgcgctgagcaacctgacgatcgtgctcaagttgcttatctgataaatcaaacaccgttacacccgcgccggcggcagccagtaccggggcctgctgaccaccggcagaggccagacagagaatacgtttgcctttcacatctcccagccagtttttcggcagcggctgaggagtgagatgcacatcccagtttccttgtctggcagccgcaatcagctctgcgctgaccggtgttgaccacgcctgctgctgctccgcctgtttatcccacgcagtctggtttgaggttaaaaaatccgtcataattttgtactccataatacacaatgtgcgcaatttaacctacctgaagatacctgtaaaatactatttcttcagatgaccgtgtttacgtggtaatactcagctctgacgcagacggagatcgattggcgttttactcggctcaccgccgatttcccgggtcagacgcggcaccagatacccggaaatacgcggcagaagatcatgcataatgcggcgggcttcatcatcactgatcagaaaatgtcccgcaccctgtactttatccagcacatgcaggtaataaggcagaataccggcgtcaaacagtgcgttactgagctgtgccagcacctctgcactgtcattcacatcacgcagcagaacgctctgattgagcagggtgacgcggctttcacgcagctgattcattttttctttcaatgcatcatcgatttcattcgcgtgattgatatgtgtgactaaaattatctgtagccgtgaatcgcggaaacgcgcggtcagtcccggcgtaatgcgttcagggatcacgacaggcagacggctgtgaatgcgcagccgctgaatatggggaatcgcttccagttgcgtcagcagccagtccagctcatggtcttttgccatcagcggatcaccgccggagaaaatgatttcattgagttcaggatggttagcgatataatcgagcgcctgctgccagttatgtctggtgcctttattgtcctcatacgggaagtgacggcggaaacagtagcggcagttgaccgcgcacccgcctttcactaacagcaatgcccggttgtgatatttatgcagtagtcccggaacaacactgtgttgttcatccagcggatcgtcagagaaccccggggtcaggtcaaattcagccctgtgtgtcatggtctgaagtaataacggatcgcgcggattgcctttttccattttggcgataaaaggacggggaacacgcagagcaaacaaccggcgggcatcagtaccggcacgccagttttcgtcctgttccagacctaatattgccagcagttctgttgggttggtgacagaatcagtgagttgatgcagccagacttctcgggcgggttgtttttgggttacaatatcgaccatttttttggctatgccatttatttaaaattagaggatttccatggctacttatagtaccaacgaatttcgccaaggtcttaaaattatgttagacggcgaaccttgcgtggttgttgaaagtgagtttgttaaaccgggtaaaggtcaggcattcgcccgtgtgcgtctgcgtaaactgatctccaacaaactgctggagaaaaccttcaaatcaacagactctgcggaaggcgctgatgtcatggatctgaacctgacttacctgtacaacgacggtgagttctggcacttcatgaacaacgaaactttcgagcagctggctgcggatgagaaagctatcggtgataacgccaaatggctgatcgaccaggcggaatgtatcgttaccctgtgggacggccgtcctatcgcggttaccccgccaaactttgttgagctggaaatcacggaaaccgatccgggcctgaaaggtgatactgccggtaccggcggtaaaccagcgaccctgagcaccggtgcagtggttaaagtacctctgttcgtgcagattggtgaagtgatcaaagttgacacccgttcaggtgaatacgtttcccgcgtgaaataagattacgtgatgaattacaaaaccgccgctgattcagcggcgggtttttttttttagtaatattcataacggtaacgctgaatggtttgtaagaccggctccggattgtcatccgcagaatagccgtaataatcggcgatataatttttttgcagcagacagttaccgtgatgatcccattgttcacaacgttcggtgagtacattcagcagttcgctgccgctgtaaatagagatcaaagtgactgatggccacggctgagcagtgtaagtaaagcgggtctctgaggaaccggagccacgggaaacgtgtgacaggcggccttgtgaatcatagcggtaaaagagactttctgatttttctccgtccgttttcacctcatccatactgtggagccggctgttttcccaattgatacgggcagtaacggcatcctcctgttcatcgtcaccggtatttttattcagtaaggtatagccggcaatctgtcctttatcatttatcgtccgggtgatgtctgtttgtgaattaatgtgtttaccgtgaaatttgtattctgctgtgccggtcaggtgaagcggattatccgtatctgttttgtactgttctttccggtaaacgtccgggcttatcagatagtacatctgctgctcatactgcgtcacggcaccgcacggtgacaatgtaatggtggtttcgctgctgccgtaagatttttgtttgttattgcgtgtggtaacaacggatttgaccggcccgttcagatacaggccggtgataatataggtattttcccggttcagctgacgctgtgcgttcgtacaactgctgtcgtctgccattgctgcggacagcggcaggcagagcgccagcagggtaactgtttttctcatccttaaattctctctctgtatcagcggatgaggttactgtatcaccgatagcagagattatttttattattaatcccgccgtcggatgatgtcacaccggaacagccgagaatggtatcgaataattcatgatggaaaaatgtccgcgtccggctgttttctttcaggttatcaaacagggacgggttatttttgatgtagttatctgacatccagacaataaacggcacacggaactgctccggcggggcaatatgccgtggtgtgccgtgcagacgcatcccgttattttcgcccagggattccccgtgatcggaggtataaaagacaatcgcatttttatcttttaatttttcggtcagatcatgcagaaaatgatcggtgtatgagatcgaattatcataagcattgatctcttcctgtatgctgcatttggttccttcctctgtgcattccggcatatatttgcggaattcaggcggataacgcttggaataaagatgatgtgaacccttggtatgtaaaataatcaggttctgcccctgctttttacgggcgagcatgtcatcaacttcatccatcagtaattcatcgcggatagctttgcccggcgttctgttctgagcggtgatcatctcacggatcagataattatccaggtcgagccggttatagaaccagacttcactttgcatggaaaacagctcggaataaaagccgttctgtttcatcacagagaaaacattattttcggtgacggtccgctgttcgttatcttttacgccgccttcgcgcacaaacatgcagcgcagcgataatttggtggaggtatcacaggatctgcctttaaaggcgataacatttttatcagcggataataatggcgttgtttcccgctcataaccgagtaattgcatatgatcccagcgggcggtttcgcctatcacgaaaaccacatataaatcgtcattctgaggtgccggggtgtaggtaaattcatcggccgggtcgaataaatcaatctcattaaaggtatcgtcatatttgaccaccgcatactgcaccagcggcacaatccagttggtcggtaaataggagtaactcagctctccgccataactcgacacatcaatactgccgttcatttcaatttttttctgattggcatccgccagttttaaataaccgaaaatcagaaccggaataacaataaacgtaaacagagcgagtgcccggcggcgtgatgccgtttgtatgcttgttttttttgctgaccagatcagaaataaagccggaacggaaagcagtgagaaccagagataaaaatgcccgccgaccgcttcctgtgacagttcaacactgtccgttgccagcgtggagactaaaattccgtaaccgataatcacgtcataaaacatcacgtaataactgacggcgatactgatcaggataataaagctggtgaggattttaaaactcagcaggccggtctgggcaatcagacggaataagaagaagctgaacagaacattgacaaaaacttcagcaatcagataaaggaaaccatagtcgccgctcagtaataactggctctgagcgcgggaaaaatacacggtgtagttgagaaaaaagcccagaaacagggcaagaacagcagaaacaacaaattcatttcttagtgtgtttaataacggacgtattggcatcgggtacatcacttcatcgctaaagagagttagagaaacgatcagttacttggttcaatatttattcattaatcatctgcatcataactgatgacagcagaccgcatgacatttttgtcgtcattagtgtcgaaccgacagttatccgcccctgaaaattacgacaatatactgataaatatccatttttatacatggcatgaaaaatgcttagcaagggtatcaaactatatgactcgtctgattttttctggagggtggggcgaatgaatcgctttgttattgccgacccgcatctttgtatcggatgtaatacctgtatggcggcctgttctgagacgcataaacagcagggattacaaacacatccgagattgaatgtggtgaaaatcggggaactgaccgcgccgatgctttgtcgtcagtgtgatgatgctccgtgtgcccgtgtgtgtccggtgaatgccattacacacgaaaatgacatgatcgtgctgaatgaaagcctgtgtatcggctgtaaactgtgcggcctggtctgtccgttcggggctatcaccccgtcaggcagcaaacctgtcgatatgccggatttctttgagcagtatgtgccgaaagagatgctgctggatgtgccggacagtctgccgaccatgaacccgttcctggcatggaatgccggtatccgtaatatcgcggtgaaatgcgatttgtgtgatttcagtgaagaaggaccggcgtgtgtgaaagtgtgcccgaccgatgccctccatctcgttgaagagaatcagctggaaaacgaaagtgcgaaacgccgtaccgcgtctgtcgatgcgatgccgccggagttcgacattttcgtctcaggacaggagagcagaaaatgacatctcttgaattactcttatggtccgttgccctgtataccgccggtggttttatttcgctgctgtttaaacagcaggaaaaaatggcggtgtatgttgccgggatcacggcgattgccggcgggatcctcggtttattcagtgccgttccggtgctgatgagcggcgaaacactgacgttcttcgctcaggggcctttcccgttcgcccattttgtcgtccgcctcgacagcctcgccgcctttatggtgatggtgatttcgctgctggtgaccgtcagcgccctctattccctgaactatgtgcaggaatatctgggacgcggcgcgtggagcatgggcttcttcctgaacctgtttatcgcctccatggttgccctggtggtgatggacaacgccttctggttcatcattctgtttgaaatgatgtcactggcctcctggttcctggtgattgcggatcaggatgacaaatccatccgtgccggtctgctctacttctttattgcccacgccggttctgtgctgatcatgatcgctttcttcctgatgtggcgcgaaagcggcagcctggatttcgattccttccgtcagctctcactgtctccggcaatggcctctgtggtcttcctgctgggcttcttcggcttcggtgccaaagcgggtatgttaccgctgcacagctggctgccgcaggctcacccggctgcaccgtctcacgcttccgcactgatgtccggtgtgatggtgaaaatcggtatcttcgggattattaaagtcggtatcgacctgctgggtgcaacccagggctggtggggtatcgtggtactgggcttcggtgcggtctcttctgttctcggcgttatgtatgcgctggcggagcacgatatcaaacgtctgctggcgtggcataccgtggaaaacatcgggattatcctgatgggtgtcggtgtggcaatggttggtatggcgaatgatatgccggtgctggcgacgattggtctgctcggcgcgatttatcacctgctcaaccatgcggtgtttaaaggtctgctgttcctcggcgccggtgcggtgatttaccgtatccacacccgtgatatggaaaaaatgggcggcctcgccaaactgatgccgctgaccgcaaccgcgttcttaatcggttgtatggcgatttccgcattaccgccgctcaacggctttgtcagtgagtggtacacctatcagtcactgttctcaatgagccatgacggcaccttcatcatgaaaatcagcggcccgattgccattgtgatgctggcgattaccggtgcactggcggcgatgtgtttcgtgaaagtgtacggtgtcagcttttgcggcggtccgcgcagtgaagccgccactcatgcccgtgaagtaccgtggacaatgactgccgcgatgctgattctggccgtggtgtgtgtgctgctgggtgtcggtgcgagtgtgattgcaccggttctggcgaaagtggcgatgaccctgaccgcgggcacggatgtgacagtggcacagggcgcgatgctggtaccggattccgctgctcaggccatgatttcaccggccatgacattcctgttactgctggctctgccgctgatcccgttcatcatctatctggtcttcaaaggcaaacagatgaacttccgccgcaaaggcgatgcctgggcgtgtggttatgcctgggaacgcgatatgtcggtgtctgccgggggctttacccagccgctgcgctcaatgtttgcaccgctgtaccgcatgcgcaaacagcttgatccgtcagcccgtctggctcacgccttagacgtgaccaaagccggggccggaaaagtcgagccattctgggatgaacgcattatttatccgctggtgcgcgggattaaccgtttcgccaaacgcattcagtgccttcagggcggggatttcagactttactgtctgtatgtcgtggccgcgctggttgttctgcttgttgtgattgcggcgtaaggagagaaaccatgtcgattcaggatacacctacattgatgacggggctcttcgcagtggttcaggcgattttcctgctgctgctgacgccgctgtttaccggcatctcccgtcagatccgcgcaaaaatgcactcccgtcaggggccgggcattatgcaggattaccgtgacattaccaaactgctgaaacgccagtccgtggcaccgcgtgattccgggtttattttccgggtgatgccgtatgtgctgctcggcagcatgctgctgctggcgatggcgctgccggttgttaccacaacgtcactgttcagcggggcaggcgacctcatcatcattttatatattttcgcgctgttccgctttttcttctccctgtccggtctggataccggcagcccgttcgccggtatcggtgccagccgtgagctgaccctcggcgtgctggtggagccgattctgttcctcggcctgctggtggttgcgctgattgccggttcgaccaatatcggcagcatcagtgccgtgatgagtcagggctgggtatcaccgaccgccactttcctggctatgctggcctgtggtttcgcgacctttattgaaatgggcaaaatcccgttcgacgtcgcggaagccgagcaggaactgcaggaagggccgctgaccgagtactccggttccggtctggcgctggtgaaatgggggatcggtctgaaacaggtggttgtggcagttctgtttctctcgattttcttcccgttcggcagtgcatccgttctgaccgcaggcagtctgctgctggcgctgggactgatgctggtaaaactgctggtgattttcgttctggcatcgctggtcgaaaacagtctggcccgtggtcgttttctgctgacgcatcatgtgacctggttaggattcggcgtggctgcgctcggattcgtgttctatctcaccggtctgtaaggagcgataaagcatgttagaaaatattgcactggcgaccctgctgattccgtttgccggggcgttgctggtcagtgtcctgccgacgcgcatggccccgtggctgagtaccttagtcgcgctgctggcctctctcggtacggcggcactgggctggctgtatctcgacggcggtaagaccgccaccacactggaactggttcaggccggtaatatcgcgctgttcggctttaccgttgacggcgtgagcactctgattgcgtttgcggtggtgttcctcggcttcctgatttgtctgtactccaccggctacctgactgaaggtaaccgcgagcacgcccacgggccgacccgccgctattatgccttcctgctgatttttattggcgcgatggcgggtgtggtgctgtcatccacgattctggggcagttactgttctttgaaatcaccggtggctgttcatgggcactgattggttactaccagacagaaaaagcccagcgttccgcaatgaaagcgctgctgatcacacacgtgggttccctcgggctgtttatggcggcggcaaccctgtttatcagcaccggtacgtttgccctgagcgcgattaaccagctgaatgaagcacaaagcctgatcgtcttcggcgggatcctgtttgcggcatggggtaaatcagcccagttgccgttacaggcctggctgccggacgcgatggaagcgccgacaccggtgagtgcgtatctgcacgccgcgtctatggtgaaagtgggcgtttatatctttgcccgcagcatcatgtcctctgaccatgtgccggaaattatcggctgggtcggcgtggtgatggccgttatcacgctggtgtatggttttatgatgtatctgccgcagaaagatatgaaacgtctgctggcctggtcaaccatcactcagctggcgtatatcttcctcgcgttatcgctgtccgtcttcggatccaaagaagcctttgacggcggtatcgcgtacatctttaaccatgcgtttgccaagagtctgttcttcctggtggccggtgcgctcagctacagctgcgggactcgtatgctgccgcgtctgcgcggtctgtcaaaacgctatccgctgctgggggttggtttctgtgtggctgcgctggcgatcgccggtgtgccgccgcttaacggcttcttcagtaaattcccgattttcgcggccggtttcgcgttatctgaacagttctggatcttcgcgccaatcatggtgctggtgctgattgaatccgttgccagctttgcctggctgctctactggttcggcaaagttgtgccgggcgagccgagcgaagacgtggcaaacggaactccggttccggcagcaatgcagtgggttatcggcctgctgattgtgatgtcgttctgttcaagtgttatcgccgtcatctggctcggttaagggagagaaagtatgactggttccattattgtgaacaatctggcggggctgatgatgatcacctcgctgctggtcatcggggcgaagcgcccggtggcttcctgctggttctatgcacttcagtctctggtgctggtggcgattttcgccacgctgtcacagacactggatgcaccgcagctgggcatgtgggcgatcaccgccttcgcgaccaaagtggtgctggtgccgctgattatgggctatgccttccgcaaactgtctgatccgaccgccaacggcggcgtgataagcccggcctggctgatgctggctgcggcggtgattgtggtgctgtgctggtttgtggtcgaaccggtgaaactgccgatggtggcggatctgaaaccggcactggcggtttccctgggtcactttatgctgggcttactctgcatcgtgacacagcgcaacatcctgaaacaggcattcggttattgcctgatggaaaacggatcgcacctgacactggctctgctggcgtataaagcgccggagctggtggaaatcggtatcgcgacggacgccattttcgctgtgattatcatggcggtgctggcacgtaaaatctatcgcacgctcaacacactgaacgtggatcaactgaccgcgctgaaggggtgatgagatgagtcaaaccatgttgttaacgttattaatggcaacgccgctggtgatttcactgctggcatttgcctgccgcctggcaggcggcggggcgaaaggtgtggtcaccctggtgcataccaccggtatctccctgatgctcgtcttctcgctgtggatggtgtacaccatcagtgcggaaggtgatctgctgatggcgaaccgctggatccacctggacagcctggccgggttattcctggcgatcctcgggattgtcggtttcctgaccggtctgtactccatcggttacatgaaccatgaagtgaatgatggtgaagtgagtgtggcaacactctgtaactattacggtttcttccatctgttcctgttcaccatgctgctggtgatcaccagtaacaacctgatcctgatgtgggcggcagtcgaagccaccacactcagttctgcgttcctggtgggtatctacggacagcgctcttccctggaagcggcgtggaaatacatcatcatctgtagtgtgggtgtggcgttcggtctgttcggtaccatcctcgtgtatgcgaatgcggcgagtgtgatgccggatccggaactggctatcttctggaccgaagtgctgaaacataccgcactgctggatccgaccctgatgcacctggcctttgtgtttgtgctgattggtttcggtaccaaaaccggtctgttcccgatgcacgcctggctgccggatgcgcacagtgaggcgccgagccctgtctccgcgctgctgtctgcggttctgctgaactgcgcactgctgatcatcatccgttactacatcattatcacctcggctatcggcgggggatttacccagacactgctgctggtcttcgggctgctctctgtggcggtggcggcgttcttcattctgatccagcgtgatatgaaacgtctgctggcgtactccagtgtggaaaacatggggctgattgccgtggcgctgggtatcggtggtccgctgggtgtgctggccgcgctgctgcacacgctgaaccacagcctgggcaaaaccctgctgttctgcggttccggtaacgtgttactcaagtacggcacccgtgatattacggtggtcaaagggatgctgcgcaccatgccgtttacggcggttgtctttgcgggcggcgcgctggcgctcggcggtatgccgccgtttaacgtgttcctgagtgagtttatgacggtggttgcgggtctggcggctgatcatttctggctgacgctgctgcttttgatcctgctcactatcgtcctcggcgggttggttagaatggtatcgaaaaccctgttcggcgcacagcctgactgcgtgtcacgcggcgaggcagggatcctgacgacattgccgatggccatcctcattgtactgatgctggtgatgggcacccacattccgcagccggtcagccgtctgctcgaaaatgccgccactattgtcctgacggacagtgcattaccaggtacagaattaaccaccccggactaccgctggccgtggggtgttgatacaacatccacatcatcgcaggagaaataaacgtgagctatcagaattacacagatacccttcagggcgttcgtaaaggcgcgggctatctggcacaggtccgcgagaaatttccccatgcggtgctggaagaggagtggcagactgccaaccagctgaccatcaccatcaaaacagaaatgctgccggaagtggtggagtttctgtactacggctgcggcggcgggctgccggtgctgtggggtaacgatgagcgtccgcttaacgggcagttcgcggtttactatgcactctctatggaagagggtgaaaaatgctgggtgaccgtgaaggcgtatgtcagcccgatcacccaggaattcccgtctgtcacaccgcgcgtgcctgctgcggtgtggggcgagcgtgaaatccgcgatatgtacgggctgcgtccggtgggtctgccggatgagcgccgcctggtgctgccggatgactggccggatgatctctatccgctgcgcaaagacaccatggattaccgtcagcgcccggcaccgaccaccgataccgaaacttacgagtttatcaacgacagcaaaaaagatgcgcgcgttgtgccaatcggcccgctgcacatcacgtctgatgaaccgggtcacttccgtctgtttgttgacggggagcggattgtcgatgcggactaccgtatgttctacgtccaccgcggtatggaaaaactggcggaaacccgtatggggtataacgaagtcactttcctgtctgaccgcgtgtgcggcatctgcggctttacccacagcgtggcgtacaccacttctgtggaaaacgccctgggaatttatgtgccgcagcgtgcgcacactatccgcagcgtgctgctggaagtggagcgtctgcacagtcacctgctgaatatcggtctcgccagccactttaccggctttgataccggctttatgcaattcttccgtgtgcgtgaaaaatccatgaccatggccgagctgctgaccggtgcccgtaaaacttacggtactaacctgatcggcggtgtgcgccgtgacttcctcaaagagcagcgggtgaaaaccattcagctggtccgcgagatgcgtgcggatgtcactcagctggtggatatgctgctgagcacgccgaacatggaacagcgtaccgtcggtgtcggccgactggatccgcaggttgcccgtgattacagtcctgtgggtccgatgatccgcgccagcggcttcgcccgtgacgtgcgtttcgaccacccgtttgccgattacggcaatctgccgaaaacgctgtttactatggatggctgtgatgtttactcccgtgtgatggtgcgtatcaaagaggttctggattcactgtccatgatcgaatacgcgctggataacatgccggaagggccgattctgaccgaaggctttacctatcagccgcacaaatttgcgctgggttacaccgaagcaccgcgcggggaagatatccactggagcatgctgggtgataaccagaaactgttccgctggcgctgccgtgcggccacttacgccaactggccggtgctgcgctacatgctgcagggcaataccgtttccgatgcgccgctgattatcggcagccttgacccttgctactcctgtactgaccgtgtgacgctggtggatgtgaaaaaacgcaaagcgaaaactgtggcgtacaaagagatcgagcagtacagcatcgatcgcaaacattcaccgctgaaataagccggagggaataccatgtttaaactgtttaaaaccctccgcaatgcggggacagcaacaatcaaatacccgttcaaaccactggaagtggcgcacgggttccgtggtaaaccggaatatgtgccggaacagtgcatcgcctgcggtgcctgtatttctgcctgtccggcaaacgccctgacgatggaaactgatctggaaagcggtgagcgccgctggcagttattcctcggccgctgcatttattgtgcgcgctgcgaggaagtctgcccgaccagagctatccatctgaccgaggagtttgaaacggcggtgatgaacaaggcggatctctatatgaaagggacattccgcttacagtactgccgccagtgcggggaagccttcgcaccgaaaaaatccgtggaatatgctatggcgctgatggtggcgtcaggtgttgaagagagcggaattgaagcattgcggccgatgtatgaaacctgtccgtcctgtaagcagaaaaataacctgctgaacaatgaccgtcagaacttccgtctgcatattgagggagaaaaatcatgagtttgcctgaaatcccggtgaaccatcatgtcagcgaaccgctgaagatggatgagcaggtggcgaaactgaaaagcacgctgctgaaagatatcaaacgttcagcgtatgtttaccgtgtggactgcggcggttgtaacggctgtgagattgagattttctccgcgattaccccggtctttgatgccgaacgtttcgggatcaaagtggtggcttcgccgcgtcacgcggatattctgctgtttaccggcgcggtgacccgcgctatgcggatgccggcactgcgggcgtatgaatccgcgccggatccgaaaatctgtatctcttacggtgcctgcggctgcggcggcggtatcttccatgacctgtactgtgtctggggcggcagtgagcacatcgtgccgattgatgtctggatcccgggctgcccgccgacaccggcagcaaccatctacggttttgcggtggctctgggtctgctgaaccagaaactgaaaggccaggatcatgtcgaggaagacaatgagcgcgttcagctgctgctgccttcaattccgctggcaacccgcgtgatgattgagcgtgaggcacgccgccaggccgggtattatcaggggcgtgaaatcagtgaccgcttcctgacactgctggaaaatgccacacctgagcaggtgaaaggcacaatgcagacctggatggatgaagagcaggatccgcgtctgcgcgagattgtgaaccgtctggtgaccgtattacaacaaggaggcattcatgcctgaacagacacccgatcatgcaggtactgacggaaaagtgatcttctggtcgctgagacaaaagtttgtcgacagtgatactgatgttccggaagaggctcagcaggtgatgtactactcgctggcaatcggccaccacgttggcatgatcgattgtctgaatacggagcttatctgcccgctcagcggttatcagtcctgggtgaatgcgcttcccgaaggggaggcgcgccgcaaattgcaggggcttatcaccttcggtgaaatcaatatcgactccacgcataccaatatgctggcactggcactggatccgctgacgaaggataaaaatccggacttccgcgaatggagtgccacgcttatccgcctgctgggggaaattgagcgtgaaccggcaatttacctgatagtgaagcgccgcccatgagtgaaaccacggcaaaaaacctgatgctggcagtcggtaacagcatgatgggggatgatgcagccggaccgatgctgtttgatctgatggaagcgaacccggttgacggctggattgccgttaacggcggcagtgcaccggagaatgtggcgcaccaggtgcgggcactgaaaccggaacgtctgctgattgtggatgcggcggatatcggcctgaatcccggagagatccgcattattgaccccgatgatatcgccgacatgtttatcatgagcacgcataatctgccgctcaactttcttatcgatcagttgaaagaagatatcccggaggtgattttcctgggtattcagccggatctggtcgggttttatatgccggtcaatgagaaagtcacccgtgctgtacagcaggtttatgaagcgctgccgggctgggaagggctgggcggatttacgttatttgaaggtgaggaagaagacgagtgagtcagtttctctgattatcacaggaaccgccgcagaaatccggcggtttttttatggatatgcggatttaaggccggtatttgatatccggccggtgcattttttcttatggtctgagttttctttctgagagtaaaaataccatgaaaaaaatcgctgttattatcccgtttgtcttactgctgtctgcctgtgccaccaaacaatacccgcaggccgcagcggtatccggtgaggaatctgccttaatgaactgtcatgatattaaaacggaaattgccaaaacccgcagcattcagcaggaaattgaaaaaaccgggcagtttgacggcaaaacggtgctgggatttctgggagatttcggtatcggtaacgggattgccaaagatgatgccagggcaaaagccactgtccgcctgagtcagctgacggcgttacaggaaaaaaactgccgctgaaataaaaaaataccgcaatcagtgcggtatttttacatgattgccgttgtgcggctcagcagcatttcgggccgcctttgctgccgtaacgggcatcctgacgatcgcggaaaaactcttcataggtcatcggtgtctgatcaggatgggtgtttttcatgtgttgtacatagttatcgtaatccggcacaccaatcatcattttagcggtctgaccgagataacgtcctgcttttgcgagagtatcaaacataattatgaccctgaacctgttgcgtacggaggagcggcagttgtctgccgctccttatttcaccagtatatcagattttagtgggcagatttgctgtttgccactaaatcaagatagttttccggcatcggctcgtacggtgtttcgttgtccgtcggtttgtcggatttcagggctttcagcgcggtcttcagtgagaagacagccagcaccaccacaacaaccataaagaacagtgtcagaccggcatcgagacggttgttaaacaccagctgtgacagctgcgacgcgctgtactgcgacgggatgttaccgctgtcaatcattgcctggaacttattcgctaccgccaggaagccgacacgggcatcttcgctgaacactttttcccagcctgcggtcatggtacagattaacagccatgccatcggcaccagcgccacccaggcgtaagcctggcgtttcatcttgaacagcaccactgcacacagcatcagtgccataccggccagcatctggttggcgataccgaacagcggccacagggtgttaataccaccgagcggatccaccacgccctgatgcaggaagtaaccccacgccagcacacacagcgcggtggcgatcaggttggcaggcagggaatcggtccgtttcagcgccggggaaatcacacccagtaaatcctgtaacataaagcgggcggagcgcgtaccggcatccacggccgtcaggataaacagggcttcaaacaggatggcgaagtgataccagaaggagacatccatcaggccgccgagcgccccgtgcagaatataggccataccgacggcgagtgtcggcgccccccccgcgcgggagataatgctctgttcgcccacttcattggcgatattggttaaggtttccggggttatctggaagccccagctgctgaccacactggcggcagacgcgaccacatcagtggtaccggccggtgccagcattgccatcgggctgttcatggcgaagtacacacccgggtcgatcacacaggcggcaaccagtgccataatcgccacaaaggattccatcagcatgccgccgtaaccgataaagcaggcctgattttcgttagccagcattttcggcgtggtgccggaagcaatcagggcgtggaagccggagaccgcaccacaggcaatagtgataaacaggaacgggaacagatcccccgcccagaccgggccggtgccgtcgacaaatttagtcagtgcaggcatttccagcatcgggcgcataatcaggataccgatcgccagaccgacgattgtcccgattttcaggaaagtcgacagataatcacgcggtgccagcagtaaccagaccggcagaaccgccgcgacaaagccgtaaccgaccagcatccaggtcagctgcacgccgtcatagtcaaaatacggtgcccaggtcgggctttcggctacccagccgccggagataatggcgaacaccaggaaaatcagaccgataacagagacttccccgacacgtcccggacggatgtagcgggtgtaaatccccataaagaaggcgagcgggatggtaaaggcaacggtgtaggttccccacgggctgtgggtcagggctttcaccacgatcatcgcgaggacggcgaggataatcaccataatcataaaacaggcgatcagcgcgataacaccggcgacattccccatctcctctttgaccagttccccgagggagcggccgttgcggcgggtggagacaaacagcaccataaagtcctgcactgctccggctaacaccacaccggcgagcagccagagcatgcccggcagataacccatctgtgccgcaagtaccgggccgaccagcgggcctgcaccggcgatagcggcaaagtggtggccgaacaggacttttttgtctgtcggtacataatcaagcccgtcattatttttaaaggcgggggtcatgcgggttgcatcgactttcagcactttttcggcgatatacagcccgtaatagcggtatgccaccagataaatacagacggcggcaacgactatccagagcgcgttgatctgttcgcctctgttcagtgcgatatacccgagggcaaaggcaccgacaattgcgagcagcacgccggcaagttgtttgaacgctttcatagatttcacctgtccgaatgagtaaagaggagtagtttcagtttgttattatccaattgtacgggagaggaataacacttatttgacttagttcccagcagtaacctgcggataagatggatttatttcattattgttaggttaatcactgttagcggaatgtagcgtgattgtggtttcagggagatgataagttcacaaagaaaatacacagataaaaaagggttattcataaaatgaataaccctgtgatacccgataatggtcaggttaatttccgtcaggcagccgggtggttaccgaaagggagtgttccggaaaaaagaaacgatcagtttcgcggattggtactgcccggctgagggtcatttcactgatagtttccctgattttattaaactcaacggcccccgaatttccgccgtagaatttatcacacagaaaagtgttaaatatattttctgcaatatgattataaatatccgctcttattgcggttctttcaccggccagtgcagcgttatactgacggtttgactcagccagctctttttgcaggttttgccgtgcttcaatatttaccgggtgatccggtgattttcttattatattctgcatttttgctgacattatagccgctgtttcatcaggaacggcattttctatctcaagcgtattgatacctttcgccagtgatgggttattgagcagcgcctgaataattgacgattgcgcacagccggcattcagttccgttttactgaagtacgtatctttgatctcattaaacaggttttctttttcagtcttaccgattttcatatggttttctctgcatgtctgatcaatagtccggttaataaaggctgaaacaaaggttgttttctcctgtgcccgccattcttttattccgctattaatactttcttcagcgcatgaaataaaaccggaatcggtaataatatccggtttttttagtggcatactaaatttacagatatcggaaagtaaatttttactgaattcacgggtgtctgtcacgaacacttttttattcagtctgaattccattgtggtgttttgtatataatttatcctttccgccatccggtcaaactgaagcggatttatggttcttccgtcgatttttggcagaggtatattaacaaaggcctgatttcccggaatgtcactgattctcataaaatatcctttttatatggttaattaattatgtctgattttatgattttatctttaaaaaaagacatattgattatttatgtaatcgttgcattaataataatcctggataatggattaaaaataaaagtattacttttctgatgtgggatgataggtctgttattatttttgtcagccaggaaaaaatatgccggatttattatcttttcaccgcacagccatgatgctgctgcgccatatcgggcttgacgtccctcagcccgccactgatcagcatacatttatgttaacaattgacagccggtattcattatctctgaccgtcattgatgagacagactggtatctgtcagcaaataccggggaattaccacacattacgcaaaataatgaattgctgcggaaagtcctgaagctgaatgcattaacacagctttccggacaaccggtgatttccctgaatgagaaaaatgagtgggtgatctggagtcgtctgtcactgaatggtacagaagatagccatattattgaattatttgaatatattttaaaatcagcggattacctgctggatcttcattaacataaacatagctaccagaggaattattatgaacgtcgttccttatgtcatgatccatgataatcagaataataatgcttcgcctccccctgtaccgccaaggtcagtgcagcatcaggggcggacaatggcattacaggaaccatcaggccggcctccggctgtgccgccgcgtcctgaacataccggggatgttcagttgcgtcagaaaaatacaaacccgggttccgggttccgccatgcgatgtatgatgctccggcatcatccgcaaaatcgctgccatcgcctgctggatcacaggagcgcggccggatgccgttaccgggggaagggattcacccgtcgctggcacaacgcagagctgcacctcagttggcacctttcactccggatacaaaaacggaaatgtcattttccctgttacaggcaaaatctgaacaacaatttgtccggagtaactatatcgacaaaggtaatcctcaatactttggcgatttcaatgaccgtaaagtagaacatcagcgtttcggtgacattaatacctgcaaagcaacgcagttgtttacagcaaaaggtattggtttacccgcaaatcaaatgaaagttgacggcaaaaaccttgcgatgcgcagtcagtatccggcggcagagaagcttggcagccatctgagtatgctcgcagagcaaaaaccggcagtgctggtgatcctttcatctgatgcggatctcaaagcaagaaatctccctgcatattttcgtgagactgaagggaagcattataacgatgctaaatatgacaaggatccccatagtgcaaataagtatgatgatgtttttgttcaatgcaaaaagaatacactgttacctgtaaaaatggccggaaaccttagtgtacgaaactatcgtattgaaattacggtaaacggtaaaacaacaccgatatctgttatgcatgtcaataactgggaagatcggacaacggttgataccaaaacacttaaaacactggtagcggatattaatgcgaaaattgaccagaaaaccagagcagacagctcttatagtccgcagccatttattcattgcagtgcaggaatcggacgtaccggtgttgttgccgctgcaatggagttactgaaacccggcaataacaaaactccgctggatattgctttacaactgcggaaaacgggttgttcaaaaatggtacagacagaggctcagttcgatacactggtgcacctgtatgacaatataaaatccggacattaaaacacaagcaagggaatgactatgggaccagcacagggaatacagggacatcaggcgattcagaccctgaataatgatatttacggctcagcgggcggcaacagttcatcgtcgtatgtcagctcatccggaattaaatccgttttattaaatgcatggaatgccgttaaatccgctgtttccggtatgttgtcatcatttggtctgcatctcagcggacagcagggcagtgataaaccgggcagagaaattgtgatggatatgtcttcacggccgctgccacagattccgacggatgatgacgatagtgattatgcgcaaatcagttttgatacagcgccacaggaagcatctgaattgaaagatgagtcaaccggggaatctgtctatgccactgtgaataaacattcagcactcagtgatgcagaaaaggcaaatattaatttgtgggaaggcatttcggatggctgcgaacccggagcaccacctgttccggggtatacagacagaacaccgctttatacacagacgccggagaacgatctgagaggagagagtgattacgccgatccgcaggaattactatttaatcaggatcagtttttacagcgtatgatgagtgaaagactgaaaacgcagtaatcgtatccgtcagtctgcccggaaaaaagcgggcagactgactgttacaggattcaggccgcttttctgcgtgtcagcagtgtcaccagacgtttgccgaagacggtcagaatcaggcccgccataataaagccgagaccggcgaactgcatcatggtgatggtttcccccagcagcagcgcactgctggcaatcccggcaaacggcaccagcagagcaaacggcgtgacacgccaggtttcgtagcggcccagcagacggctccataaggtataaccgacaaacgtggagagataagcgagatacataatcgcacccacggtcagcaggctgatatgggaaatgctgctgacaattgcgtccgcaccttccatccacagtgacatcaggataaacggaataatcggtaccagcgcactccaggccaccagtgacatcccgttgcagtccggtgtctctttcataatgatacggttgcagatattaccgcaggcccaggagaagcccccggccagggtcatcatcagtgccatcagcggaatgtcggtcagactgccgctgtccccgcctttcgccagcacggttaaaccgactacagcgacaataatgccgaccacctggctgattttcagcgactctttcaggatcagtccgcccagaacaatggtgaaaaagacctgggactgtaagaccacagaggcgatcccggccggcatcccggctttgaccgcactgaacagaaaggcaaactggccgaagcagatggtcaggccgtagataaccaggcggctcagggcgattttcgggcgcggaataaagaagacggcaggcagggccacaaacagaaaacgcagtgccccgagaaacagcggcggaatgccggtgacgcccactttgattaccacgaagttcaccccccagatcacggcgaccagcagggcgattaaaatatcattaattttcatatcaggtttttatctctcttttattattttgataatacgcggagccacgcgcagtatcagacaggaagcgccgtgaaaaattaagtcattgttagtgccattgtaaaacagcaccggggaaccgatatcaacagtcagcgggaaattattcgtaaactgttatgaaatacgggaaaaaccggcggtgcggatgattgatcaccatcatattgtacttctttaacacagttataattcatcatgcaattgtaaaattgttctgaagggacgtgtctgcgccagtgtcgctgtctgacaccgggcagaaccgttcgacatttttgacgatcccgtcggtgccatcgcctgtcatggttataacaaaaaaattaaaacaaaatatattcagtaagttaaagggattttatttcagctttaaaattggcataaaccctgcatgactggtggtgataaggcggtatttatccgctaagagaagatataggagcaatgttgatggaaaaagtcatcaccgtctgcccgtattgcgcctcaggctgtaaaattaacctgaaggtggagaacgggaagatcattggcgcggagggcgcgaatggtcacaccaatgaaggagagctctgcctgaaagggcattatggctgggacttcattcctgacaccaagattttaaccccccntattatggctgggacttcattcatgacaccaagattttaaccccccgcttaaagacccccatgatccgccgtcagcgtggtggcaaactggaaccggtctcctgggaagaggcgattgagtttgccagttcccgcctgttggctatcaaagagaagtacggcccgaaagcgattatgactaccggttcatcccgtggtccgggtaacgaagccaacttcgtgatgcaaaaatttgttcgtgcagcagtcggcagtaacaatattgactgctgcgcacgtgtctgacacggcccttcggttgcaggtctgcagcgttcggtcggtaacggcgcaatgagtaactcaatcgtcgagattgaggataccaaatgtatttttatcttcggttacaacgccgcggattcacatcctatcgtcgcccgccgtattgttaaggcgaaagagaagggtgcacaaattattgtctgtgacccgcgctatattgaatcagcgcgtcttgctgacattcacttagcactgaaaaacggttcaaacattgcgctgattaatgcgttagcgcatgtgattattgcggaaaatctgcacgataaagccttcattgacggccataccgagcagtttgaggaataccgcaagctggttgagccgtacacaccggagtccgtggaagcgatcaccggtctgaaagctgaggatatccgcaaaactgcccgtatgtatgcgaaagctgaaaatgcggtcattctgtggggtatgggtgttacgcagttctatcagggtgtggaaactgtccgcgcactgaccagtctggcgttactgaccggcaacctgggtaaaccgcatgtcggtgtcggcccggtccgtggtcagaacaacgttcagggtgcctgtgatatgggcgcactgccgaacacactgccgggctatcagtatgtggaagacaaagccgcactggagaaatttgccaaattctggggcatcgaaaaaatgcctgccgaaaacggtattccgctgagtgaggttccgcactttatcgacgaaggcgtgctgaaggcgcactacgtgatgggtgaggatccgcttcagactgaaccggatctggcgactatccgccgcaccttcgataaactggagctgctgattgtccaggatatctttatgaccaaaaccgcggcgattgctgacgtgattttccctgccacttcctggggggaacatgaaggtgtgtataccgcagcggatcgcgggttccagcgcttctataaagcggttgagccggtcggcgatgtgaaaccggactgggaaattatcagtctgatgtccaccgctatgggcttcccgatgcattacaacaacaccaaagagatctgggatgagttacgtgaactctgccctatctactatggtgcgacctacgagaaaatggcggacctggcttatatccagtggccgtgccgcgatgtggcggacagtgatcagggaacagaatacctgtacgacggcggtatctttgataccccgaacggcaaaggtcagttctatacctgtgaatggcgtgcgccgattgatcaggtcagtgatgattatccgatggtgctggcaaccgtccgtgaagtggggcactactcctgccgctccatgaccggtaactgtaaagcactggcggcactggcggatgagccgggctatatccagatcaataccgcagatgctgctgcactggggattaaagatcaggaactggtctgggtggcatcccgtcagggtaaagttatcacccgcgcgaatgtcagtgagcgtcctaacaaaggggcggtttacatgacttatcagtggtggattggtgcgtgtaacgagctggtggcggaaaacctcagcccgattaccaaaacaccggagtataaatactgtgctgtccgcgtcgaaccgattgcggatcagaaacaggctgagcattatgttgttcaggaatataccggtattaagcgccgtctgcgtgaagcggcggaagggtgttaatccgttcgtcttaatatgataaaaaaccggcgctcagaaatgaccgccggtttttttatattttcattttttgtttaattatgatgtcagtcgtattcagtttctgaattttgatcacatattattgcctgagaaataaatgaacatattacgacagatattctgtttcttttgcgatatatttttatttgcgaggcattcttatttcagtggctgcagtttaaatatcagctcagtgattatcttcttcgaatatatcctgtacagaaatacctaaccgctgcatacgggacaataatgttgtccgtttcagtcccagacgggttgcggcaccccgggcaccggcaacaacgccgttggtggccttcagggcagcaataatccagtcgcgttcttcgtcatcattctccggtgcggctgtctgcatccgtttttccagtgagctcggggtctccagcgccgttttcaggcgtgaatgctttgggatattcagctcatgcaactgaatattcagggtatttccgcgcgtcaggatcaccgcccgttcaatcacattctccagttcgcgcacgttgccgggccacggataacggctcagctgctccagggcatcacgcggaatgcagtcgatattgcggttcatccggcgggcaatcttctgtgtgaagtaggtcgccagcagcggaatatcctcaggacgttcgcgcagcggcgggatccagatagggaacacattcagccggtagtagagatcttcgcggaactcgcgctcatcggtcatggatttcaggttgcggttggtggcggcaatcagccgcacatccaccgaaatcaccttattaccgccgatgcgctcaatttcccgctcctgtaacacccgcagcagtttgggctggagatccagcggcatatcgccgatttcatcgagaaacagggtgcttttatccgccatttcaaagcggccgatatgagtggtggtcgcgccggtgaaggcccctttgtcatggccgaacaggtcactttccagcagccccgacgggatagccgcgcagttcattttgatcatactgcggtgatggcggtcactcagacggtggatggcgcgggcgataagctccttcccggtaccggtttcaccgaggatcagcacggtgctgtcactggcggcaaccagatccacctgctccagaatgttgcgcatggcatcactctggaaaatgatttcactgaaactttcgttgttgtgaatctgttcgttcagccacaggttttcatgcttgaggctgtctttcagacgggtgatctcttcataggccgcagcattatccaccgcaatggcaaaccgggcggctatctgcttgagcagattacagttatcgtcagtaaaaatatgattattttcatgagataatatcagaacacccagcggcttatggttaaatgccagcggcagcagcagggtttcagtcataccctgcgcacagacatgctgatacagcggatcctctgtggcactgtcgagtgtcaggcgcatcggctggttactgtccagaacctgtgccagatcaggatgcagttcatccagatgatataatgtcttttctgcgggtttgcgggcctgataatagctggaataacaaagatatacagcagaactgtaattatcacataatgcaatgcttatctggctcagcccgaaaaaccggtggatctcgcgggagacctcagcaaccaggccgtccatctccagatgggaaagcactgagttggtgatatctaccaatatccggtactggtcacgttcatggcgtatgtgttcggtcttgtcagtgttgtccacaacgtctccgctcgtcttcgtctttcacattcctgatccggacggattgctcttaaaattaattcccctctgcgtagttataggtataaataaggtgcagagaggtaataaccattattgtaatgactctgtaagaaaagaatatcgctgtctgatttaagtttgatccaatcccctatttttcggcgggatgaaaacctaatatattatgacacatattgatgatagaaattatcgtcaaaaatgtcgaactgtgtgacgaatattctcattatgacacacagcgcggcagctttatttattaatacgctgatttcactgaaattaaaaaaaatgccagactggcacgatgcatgcttatttcctgattattctaaccagaggacggctgcaccggagtgccggatgtgaagtcgccgcgtatcattcaggagagtatgatgaaccgtttcatcattgcagacccaaaaaagtgcattggctgtcacacatgtgaagtcgcttgtgttgtttcgcatcaagagcaggaaaccggtattgaaacagtggtgaaagatgaattctttccccgtattcatgtgatgaaagggtacaccatcagtacggcggttgtctgccgtcagtgtgaagacgcgccgtgcgccaatgtctgcccgaacggcgctatcagccgtaaagatgattttgtgtatgtcgatcaggcaaaatgtatcggctgcaaaacctgtgtgattgcctgtccttacggcaccatggaagtgatcagccgtcctgttgcacaacagaccactgcgctgaacaccattccgcagtaccgtgcggaagcccacaagtgtgatttatgccatacccgtgcgggcggacctgcctgtgtggaagtgtgtccgactcatgcattaatggtggttgaccgtaataagatggatgagatcgtcaaagaacgccgccgccgcgccgcatttgaaatgccggccgacctgatgtcctgaggacagacggatgcatgaggtgacgttatgccagaatgcgcttgatattatcgagcagcaggcaaaacagagcggggcgcagcgtgtcaccgctgtttggcttgaactgagtgcggtatcctgtatcgaagaagatgctctgcatttctgctttgatatcgtctgccgtgattcactggcggaaggggctgaactgcatgtcaccaccgtcccggcgcaggcctggtgccgggagtgtcagaaaccggtcagtgtggccgggtttaataccggatgtccgcactgcggcagccataacctgcaggtggacagcagtgatgccatgcaggtcagacaaattgaaattcagtagtccggtaaggacttatcagtcaatcaggagccggttatgtgtttaggtattcccgggcaaatcgttgctgtgggtgactctgtaacagacaatgcgcaggtggaagtgtgtggtgtcagacgggatgtgaacatcgcgctggtttgtgaaggtgagccatcagaaatgctggggaaatgggtgctggttcatgtcggttttgccatgagcattatcgacgaacaggaagcccgcgatacgctggatgcattactggctatggaaagtgttgaagaggatgtgtcgtattttttacgtggtaatgcgtaagagtatcactttctgtttccctgtaaaaaacacccgcactgacgggtgtttttttatatgacagagaatgtgttgcggttattctgaataatctctgccggtgctgaaatacggcatttctgaaaccttctctttgttgtatcacaacagtgatatttatctttccgaaactgtgccgggataatatctctcttttctttattttatctgcggtcggttatctgccggaaataatctgtttttatctgaagcgtcagcggaatcattgaacaatccgggctatgccctttatctgccactgtttgtctggtcatatccgtcaggagcgcccgaaaacagggggatgcaggatgagactgatcctgatgctcacagaaaaaaatcgtcgcggttgtctgttttttctgatagcagaatgattgccggtaaagtctttatctccggtttttatattttatggcctgtgcaatatcagtaatattcattgtttttccggatatggtgcggattattagtttataacaggcagcgttgttccgctgattatccgtttagataatatattaatgaaagtattatttcagcatctgtaaaatcagacatcatttacagaaaaacaaatctcaggatataccgctgttacccgtcggattctgaattatcttagagggttggtgctcgcattcagtaccgtatctgtgcttttatggtttctgaaaaaaacagaacaggggatacaggggacagggatatggcgcagacggcactgttgtcagggattgttcaggccttaatgaaacaccaggggcgggctcagcgggatatacattatcccggctggcatactgcgccggtgtgcggtctgatgaatgatccggccggatttatttatcacaacggcctctggcacctgttctatcagtggaacccgtttggctgtgaacataaacatgcgtgctgggggcactggtcttcggcggatttgatcaactggacacatgagccggtcgcactgctgccgtccggtaattatgattccggcggctgtttctccggcagcgcggtggtaaataatgatacgctgaccctctgttataccggcaatctggtgtaccgtgacggatcacggacatcgtggcagtgtctggcccgggaaaaaccggacggcggctttgagaaatacggctccgcactggggctgccggaaggatacagtactgacgtgagcaatccgaaggtctggcagcaccgcggccagtggtatatggtgctgggcgcccgtgacgggaatgacagaggctgtgtgctgttgtatgacgcggcagagttaggtgaatgggtatcgcgcgtcgtactggccggcagccgctgcggcgggctgcgggatgcggggtatttgtgggaaagcccggatttcttccggatcggtaatgagtgggtgctgctgtgctgtccccgtggtataccgcgtgaaccgacccgttttctgaataccgcttcctgcgcgtatctggtcgggcagtttgattatgaaagcaaaaccttccgccacaaaccgcagatgtatgaagccgatgccgggtttgaattttatgccccgcagactacactcgcccctgacggacggcgcattatggtggcgctgatgggcgtgccgggcggcgaagagatgcagcagccgactgttaaaaacggctggctccatcagatgacttgtccccgtgagctgacactgcagaacggacagctgtaccagcggccggtgaaagagctggaggcgttgcgcggtaccggcgggcagtggtcaggtgaagcagataatgcgctggagctgagtgccgggcggctggaggtgattatccggctctccggcccgctgatcctgaatttcagcaaacagctgattttttcctatgacgggcatgaaatccgcctgtcgcgccgcagtctggtcagtggtgactggcagcaccgctactggcagggagaggtgaaacaactgcatatttttaccgatcactcgagtgcggagatttttatcaatgacggcgaggcggtaatgagcagccgttatttcccgcagcagacagcgacactggtatttcgcggtctttccccggtgcagctcagttactggcagcttaaccgcgcggaagtggcctgacggcagataaaaaaagaccggctgttaagcgccggtcttcttatgacagataaggattacagtgtgaacacaccaatgacggccatcacactgagaatggttgccaggccgtaaaagacccagcgtcccgcaggtacatgaattttcaggtcatgcatacagtggtggatacggtgaagcgcacaccacagcggcaggataatcatcagcagcaggaacgctttgccgataaagccctgacagaaggccagtatgcggttgtaactgagcatatccggtgccacagcaaacgggaccagaaaagccagcagcacaataacggccggtgaaacaatggcactccacatgccgcctgcgccaaacaatccccagaaaaccggttcctgtgagcgtttcggattcggattaatcatatcagtttccttccttatcacagtaacgcaacggccagaatgacggcgttaacaatgagggttactacccagagcagacggacaatcggctccggtcccattttttcgtctttgataacgatattgacggctttcggtgccagctggaaccaggtcaccgtgtgcagcagggtaccggccagagtcaggatattaaccagtaccaccaccggattctgcaggaagtggacataccctgcccagtccgccgggccgcccttaagacagtaaacgccgtacataaccagcaggctgaaccagagctggaccactgcggtgccttcccgcagcatgtaaaaacggtaaaaaccgagtttattccaccatgtcggtgtcatttcacgcacataaggcttacgtttggtcgtcatttctctcttccttattgtggtttcagacgggcaataatgtaatcttccgcactggcggctttaccctgctgaatagcggctgccgggtccacatgtttcggacagacttccgagcagtaacccacgaaggtacaggtccatacgccgttatcgccgttgatttgtttcatccgctcttttttgccgtgatcgcggctgtcggtgttatagcgctgcgccagtgtcagcacacccgggccgaggaattccggattcagaccaaactgcggacaggccgcgtagcacagaccgcagttaatgcagccggaaaactgatggtatttcgccatctgccccggagtctggttattcgggccttcggacggtttgcggtcattgccgataatataaggcttgatagcttccaggctctcgataaagtgcgtcatatccacaaccaggtcgcgctcgatcgggaagttgccgagtgcctcaatgtccataccctgcggatattcgcgcaggaaggttttacaggcgagtttcggcactttattgaccatcatgccgcaggagccgcagatagccatccggcaggaccagcggtaggagagatccggcgccaggttgtctttgatatagcccagcgcatccagcagtgacgtctgctcatcgtaaggcacctgatacgtgacagcatgcggctcattatccgtttccgggttatagcgcatcactgacattttcagcattttcatctcagccattgacgttttccttctcttttgccgcctgttcagccgccgccgcttcaccaccgtagacacgttttgccggggcggatttggttatcttcacatcactgtattccagatgcggcgaaccgtccggattgtggaaggcgagggtgtgtttcaggaaattgacatcgtcgcgctcagtacagccttcatccagacgctggtgtgcgccgcgtgattctttacggttaaaggcggagtgcgccatacattccgcgacatccagaccaaagcccagctcaatggtgtagagcaggtcggtattgaagacggaggagcggtcagtgatttcaacgcgtttaaagcgctctttcagttcggccagtttatcgatggttttctgcatcagttccggtgtgcggtagataccacagccttcttccattgcctcacccatctcatcgcgcagttttgcccagttttcagagcctttctggttcatcagcgctttcagattgttttcaatgtcagcggtgcgggcatcgatagcattactgttggcagcgtgtgtttcctgtgcgtgcttagccgcttcttccccggccagacgaccgaagaccaccagttccgccagggagttggaaccgaggcggttagcgccgtgcagaccgacggaggaacactcaccgacagcaaacagccctttgatgcgggtttcacagcgctggtcggtttcgataccacccatggtgtagtgcgcggtcggacggacagggatcggctctttgaccgggtccacgccgacatacgctttcgccagctcgcagataaacggcaggcgctccagcagttttttctcgccgagatgacgcagatccagataaaccacatcaccacggttggttttgatagtccggcctttgcgccactcgtgccagaacgcctgggagactttatcgcgcgggccgagttccatgtatttgttttccggatggccgagcggggtttccggccccatgccgtaatcctgcagatagcggtagccgtctttgttgaccagaataccgccttcgccccggcagccttctgtcatcagaataccggaacccggcagaccggtcgggtgatactgaacgaattccatatcccgcagcggcacgccgtgacggaaggccattcccatcccgtcgccggtaacaatcccgccgttggtgttatagcggtagacacgaccggcgccgccggtggccataatcacggagttggcgcggatctgaacttttgtcccttccatcatattgatcgccagcagaccgcgcacatggccttcatccacaatgatatcgaggacaaagtgctcatcaaaacgctgaatctgagggtatttcagagaggtctggtacagggtgtgcagcatatgaaagccggttttatcggcggcgaaccaggtacgctcgattttcataccgccgaaacggcgcacgttgacggaaccgtcttctttgcggctccacgggcagccccacagttccagctgggtcatttctgtcggacagtgttcgacaaaatactccaccacatcctgctcacataaccagtcgcccccggacaccgtatcactgaaatgataatcataggaatcatgggattgtgtcacagccgcagagccaccttctgcggccacggtgtgactgcgcatcgggtaaacttttgagatcagagcaattttcaggttcgggttagcttccgcagcggcaatcgccgcccgcagccctgcaccgcctgctccgataattgcgatatcggcattaaaggtttgcactgtgcttctccattgttcaggtaaatcgaaagttaaaatgtaaaaacgaaatctgaaacgggtacttaaaattgttatcagtaaccgaatcctttcagttgataaaaacgctaatcattttcggttactgactggttataaaatcacattctgttcaaagtatagcgaatagcggatcgtttaaatttgatataaccaagggttttaagcgctaattttgcatttttgcggatgaataaccggatatttcaggtaatcacctaagtaattacttgtgtgtagttattttgttttattccggttacataaaatatacagggtaaacatataattagcgctaaaagcatagcgtatatcagcggcagcacaataactaaatctcagaggtgtgaatcagacagaaaacaggcggaaaatcagtcagtttacgggtatttcctgcgggaaaatccggatgttgcggatatgtgatattcatcacgactatggattatttcgctcttatttttggtgttttgttttcgtttttgctcattatcaatcataaggaaaggaaaaacggctaagctataaccataataaaggaacatgactgagaggaacccatgtctgattcacctgtcaatgaagcggatgtcattatcatcggcggtggcgcaaccggtgccgggatggcgcgggactgtgcccggcgcggcctgcgcaccttgttactggagcggtttgatatcgcgaccggcgcgaccggccgcaaccacggcctgctgcacagcggtgcccgttatangcggtgacggatccggaatccgcccgggaatgtatttcggaaaacaggatcctgcggcgcattgcccgccactgtgtcgaggaaaccgacggtctgtttatcacactgccggaagatgagatggcgtatcaggccacgtttactgaggcctgccgcgcggcgggtattgagactcaggtgatgtccccgcaggaggcgctgcgttttgagccgtcggtaaacccggcgctgctgggtgcggtgaaagtgccggacggcaccgtggatccgtcccgcctgaccgccgctaatatgctggatgcgcgggagcacggtgcacaggtgctgacttatcacgaagtcacggatgtgctgcgtcagggcgatcaggtgaccggcgtgcaggtttatgatcatcagaatcaccgccgttatccgctgtatgcgccggtggtggttaatgcggcagggatctggagtcagcgtatcgccggttttgccggggtgcatatcagcatgctgcccgctaaaggatcattgctgatcctcgggcaccgccttaaccagcgtgttattaaccgctgccgcagaccgggtgatgcggatattctggtgccgggggataccatttccctgattggcaccacttctgttcatattccttatgatgatatcgacaatatgattgtcacggcggatgaggtcgataccctgatccgcgaaggctcacggctggctccggcgatggcgcaggcgcgtattctgcgggcgtatgcgggggtccgtccgctggtggcggcggatgacgacccgaccgggcgcagtatcagccgggggattgtgctgctggatcatgagaaacgcgacggactgcgtggcttccttactatcaccggcggcaagctgatgacttaccggctgatggcggagtgggcgacagacgcggtgtgcgcgaagctgggtataacggcgcactgttccacggcggaggagccgctgtcgggatcggcgcattcggcggaacagacactgcgtaaagtgatctcccttcctgccccgttacgcggatcggcggtgtaccgtcacggcgatcgcgcggcagagttgccgcacaccacgcggctggataacagcctggtctgtgagtgtgaagcggtcactgccggtgaggtgcgctatgccacggaaagcctgacggtgaataacctgctggatcggcgccgccgcacccgtgtcggcatgggcacctgccagggcgagctgtgcgcctgccgtgcggcagagctgctgactcagctgaaagtcaccactgctgaaaaatccgaaaccgaactgatgcatttcctgaatgaacgctggaaaggtgtgcgtccggtggcgtggggaaatgcgctgcgggagagtgaatttaccggttgggtgtatcagggattatgcgggctggaaaacagcggggcagaagaacagggagagcagcatgaaatatgatgtggttatcgcgggcggcggccttgccggtctctcctgcggcgtaaaactggcagagagcggactgagctgcgccatcatcagcgccggacagagcgcgctgcatttctcatcggcgtcactggatctgctctcggcgctgccggacgggcagccggtcacggagccgctttcggcactggcggcgctggcacatcaggcacctgctcatccctacagtgtgataggggaaagcgcggtgcgccgctgcgtgtcacaggcaatggcgctgttacagcaggatgccttgccgttgcggggatcggcggaacgtaatcactggcgcctgactccggcaggacaatggcggatgagctggctgacaccggatgtggtaccggttctcaccgaaaaaatgacggcagactggcagccggctgcggttatcagtattaccggttttcttgattttcaggcggaaatggccgccgcagcactgacccgtcagggatatccggcgcaggcgtacaccctgcatctggcgtgcctggataaattacgcaataatccgagtgagtttcgctctgtcaatattgcccgtgtgctggatttaccgcagaaccggcaggagctggctgatgaactggcgcagtgcgggatcacagaacaaaccctgattttaccggcctgtttcggagcggaaaacagtgacggaattacctttttacaacagcagctgaataaaacggtttatcagttgccgacccttccgccgtcactgttggggatccgtctgcatcaggcattactgcgccgtttccgccgtgcgggcggatttgtcatgccgggggacagtgtcatttctgtccgccgtgacggtgagcggatcactcagctgtttacccgcaatcacggtgatattccggtacaggctgagcagtttgtgctggcgaccggcagtttcttcagtaacgggctggcgagcgatattgatcatatttatgagccgctgctgaatctgaatctgaccgaaaccctgccgcgccgggaatggacatcggcggatctgtttgcccgtcagcgctatctggaagccggggtggcgacagacagacatctgcatccggcggatgcgcacggcactatcactaacctgtatgccgccggggcggtactgggcgggtataacccgttacaggagggatgcggggcgggtgtttctcttgtcactgcgatgtacgcagcggaacagattctggcgcagattggcgtggtggtaacggaggcacaggtatgagtacgggacaaacacagttcgagaactgcatcaaatgtacagtctgtacaacttactgcccggtggcgaaggtgaatccggattatcccggcccgaaacaggcggggccggacggcgagcggctgcgcctgaaagacgccatgctgtatgatgatgcgctcaccctctgcaccaactgcaaacgctgcgaagtggcgtgcccgtcggatgtccgtatcggggatattatcgcccgcgccaaactgacgtattccccgtcacggcctaagatccgcgacgcgattctgagtcatactgatctgatgggatcactctcctcgccgtttgcgccggtggttaataccatcaccggcctgaaaccggtgcgcaaactgctggataccgctctgaaaattgatcaccgccgcgagctgccgaaatattctttcggtactttccgccgctggtacaaaaaacagcaggaaaaacaggcgaaattcggtgaacaggtcgcgtacttccacggttgttatgtgaattataaccatccgcagcttggtaaagatgtgattaaggtctttaacagcatggggatcggcgtgcagttgctggagcgggaaaaatgctgtggtgtggcgctgatcgccaacggttttgcaaagcaggcgaaaaaacaggcggcggtgaatgtggaatccctcaccaaagccattgttgaacagaagatgccggtgattgcgacatcctccacctgtgcttttaccctgcgggatgaatatccgcatatcctggatgtggataccgcaccgctgcgcgataacatagagctggtgacccgttatctttaccggctgatgcaggacgggcgcaagccggtgctgcgccacacgccgctgaaagtcggttatcacacgccgtgccatatggaaaaaatgggctggacggcttattcccttgagcttatccgctcaattccgggggtggaactgatcgtactggattcacaatgctgtggtatcgccggaacttacgggtttaaaaaggaaaactacgaaacatcacaggcgattggttccccgctgttccgccagatagaggaaagcggtattgacctggtgatcagtgactgtgaaacctgcaaatggcagattgagatgtccaccagcaaaaaatgcgaacacccgatatccctgctggcgcgggcgctggcataaataaaggatgacagaaaccggctgaatattacgtataaaccgcattttctattcactttcctctcccgcccggtgctagcatcgggcggattttttaagaaaatgataaagatattgagaggaaaatgaacaacttcgcattacattcagtcactaaatatattattgccgtctccgtggtattcctgctttccgcctgctcaagccgcctgccggatcacaccgaacaatctgattttctgagtgactatcagcgcctgaccgaaacagaaacagcctccggtgaggtgattaaatcctggcgttctgacgatttcaccgcagaaagcccgaaaacaaagcttatcttcaccccggttgtgtttaagccgctgaatgaaaataacaaaatgggtaaacagtttatgactgttctgctcaattacaccaatcagcagattaaaagtgagctggcaaaacggtatcagctgacagaaactgccgcaccgggtgtgctgcgttttgagggcgtggttaccgccgttaaggtcaccaacaaagatttcaaaccctatgaggtcttaccggtgatgctgattgtcgccggaacacagctggcaatcggtaaccgtgatgcggatacgtcaatgtattttgaatggaaaatcaccgattcagtatcgaaaaaaccgtatcttgaagcgatccgtaaaaataaaggtgagcagatgagtaataaggaccagaccatcaccttacaggaactgaaagcagcggttgatacgattgctgcggaggtcctgcccgcagcataatgaataccggcggcggatcacagacaataacgcccggttatcccgggcgttacggaacagcataataagcagattaatacagccagtcgcgacccatgcggtcagcagccataatagcggcatagacctggtcggaatcgacttcaaacggcatgttgtagatggtttcgttgtctgcgcagctcagctcggcaaccgccatcactttctcttccagctcggtaccgatgctgtccacacccagttcttccagggtgattggcagaccgacctgagcacagaattccagtacggtttccagctcttccgccggggcattttccagtactaactgcacgagggtaccgaacgccactttttcaccgtggtacatgtggtggcactcttccagcgcggtaaagccgttgtggatagcatgtgccgcagcaagaccggcactttcaaagcccagcccgctgagcagggtattggcttcaatgatgttttccaccgctttggtgctgaccccggcttccaccgccagtttggctttgatgccgtcgctgagcagagtatcaaagcagagattcgccagtgccagtgccgccagtgtggtgctgccgcctgccatggtggcttttccggctgcgctgcacgcgcgggcttcaaagtaagtggccagagcatcacccattccggcaaccagcaggcgtgccggtgcgcgtgcgatgatattggtatccatcaccactacgttcgggttctgcggatagaacaggtagctgtcgaacgcaccgagttcattatagataacagacagtgcgctggtcggcgcatccgttgatgcgatagtcggggcaatgatcaccggcagtttggcaaaatgcgccacggccttggcggtatccagtgttttaccgccgcccacacccagtaccgcctggcatttgtggtttttcgccagtttggtcagacggtcgatctcctcgtgagtacactcgccgccgaaggtttcaaagacaccgctgacttcgtattcgctcaggctgtcattcacaatatcgcccaccagctcgcggacaaatttatcagcaatcaccaacgttttttccgctaatggtctgatgtatttacccacatggtaaagcgcgtccggaccctgaatgtatttggccggggattggatcacttttaacatactcaaactcctgaatgcattcgcgttatggtgtcagtgagggatattccgtctgaatcagactaacagttacagtaacggatatgtgagagctgacgcactgtacgggccgggagcacggaggcagatcgggaaaatgtgatacagacgacagcgcagaggcaggatagcgcctctgcgtgtcagaaaaatgaacaatcagtgatgcgcgggcagggagccgtcagcgcgttgcgcaaaaaaagagcgcaggatcagattaagcagcacgccgtaagccggcaggaagaacagcatacagatagtgactttgaaactgtaatccaccagggcgatttccccccagtttgccgccataaacggatcggtactgcgccagaaggcgataaagaagaaggccagggtatcgatcaggttaccgacaaacatcgcggcagccggtgccacataccagcggcggttctggcgccggcggttaaagacattcacatccagaatctgtcccagggcatacgccataaagctggcggcggcaatccgcgccacaaacaggttgaagtgtgacagtgcctcaaaaccggcccattccccctgaaagaacagggcggagaccacataggaaatcgccagcgccgggatcatcactgaggtgataatccgccgtgccagcggtgcgccgtagatacggacggtcaggtcggtcgccaggaaaataaacggaaacgtgaaagccccccaggtggtatggaagccgaaaatagtgatcggcaactgcaccaggtagttactggaggtaatgatcagaacatgaaaaagtgataaccagataagcgctgtgcgccgctggcgggcagataaatcaaacatattgtacctttttggtggttggggtgagggaacccaataatctcagcgcgcaataatacgccgtttgcgcaacaaaagcaaaggtctctcccggacggaaaacagcccggaagattaaaaatacagaagcggcgccgggcttttatttccggtataattcccggattcgttacttaacaggacaatcatgatgtctgatactttttcctgtgccgataaaacactcgacacactcgggctgcgctgcccggagccggtgatgctggtgcgtaaaaccatccgcgggatgaataccggtgaagttttgctggtggtggcggatgatccggcgaccacgcgggacattcccgggttctgccgttttatggagcatgagctggtggcccaggaagctgaaaccgcgccgtaccgctatctgatccgcaaaaaagagagtgcgctgtaatccatctttcagggactgaaccatgcttgaccgctttgatacctttctgctggcgcagaaacactcgtctctgaccggctggcgccggtttatccttgaattctggtttttcggtctgaaagaggcgcgggcgtgcctgtttgccgccttcttttttctcgccctgtttctggtgcctgccgccggtgtcgcggggatcccccgttatgattttctgctgatcctggcagttctgtttcaggccgcgatggtgtggaaaaagctggaaaccacggatgaactgaaagccatctgtattttccatgtggtcggttttgtcatggagttgtttaaaacctcatccgctatcggctcgtggagttatcctgatgaggcgtataccaaattatggaatgtgccgttattcaccgggtttatgtatgcggctgtcggcagttatgtgattcaggcgtggcgcttcctgaatgtcagaattgaaaacttcccgccgtactggctggcgaccctgattgcgctggcgatttatgtgaatttctttgctcatcacttcatcggcgattaccgctggtatctcaccgcctttattctcgggctgtatgcgcggaccatggtttattacacgccgtatgataaagagcgcaaaatgccgttattactgagttttgtgctgatcggcttttttatctggctggcggaaaacttcggcacctttttcggcgtctggcagtatccgaaccaaatcggggcatgggcgaccgtacatgccggaaaatgggcatcctggtcgctgctggtgattgtcaccttcacgattgtcgcctatctcaaacacattaaagctacgatcctggtggtgagataactgcccggcacattctgccgttatctgaatttttaccctttgccgttttcctgactacaatgatcatcatattccggtgataaggacaaagggacacgtcatgaaaacggaacaggggatgctgctgcttgccgccgcgtttatgctcagcgggtgtgattcgctgaatatcgcgctcgggcgggtgtttgagagtgatgcggcgaaggcgcgggatcaggagtcccgctggtgcaccacatcaccggcccgctcaatggggcggagcagtgcgctgaatgatgaatcccgcgaaggcgcgctgctgcgttatcagcaaatctgtcagaaatacggtatttcagtcaatgctgctgactggcaggccggatatgacgagggcgataaacactattgcgattataacactgcatataataccggcctgagtaacgagccctataacttttcccgctgtgacagtaaatccccgaaacaccgtaaaaacctgaaagaagcctttaccatggggcgggactattattcgctgcaatgggcggcagacagtgaatctgaggccatgacccgtgatgcggagcaactccgcgagctgcaaacccgccgtgaacgggcggaatacggcacagaaaaaatgacgtacagcgataaactgaaaaacagcgactatcaggcggcttaccgccgcagctatgcggaggcagaaggccgcaggatgcgttatatctcacaacaggaaatggccggaaagcagcatcaggtccggcttgcgcaaatggaaaaagaaaaatgaataacgccctgaaaaccgttttatatagtaccgcgttactggctctgaccggttgcggcagcatgagccgggaaattgacagttatctgcggggagatcagattttcctgtcttatgaggaaggaagcaaccttgcgggcagcaatacgattgaaattaccagacttaatcagccgtggccgatccggcctttttcggtcgtggtcagcactatcaataaagataagtttgcgcggcagagtaccgattattttatcagggatattacctttaaaaacaataaagcggtgatcccggtaccgctgaaaaaagggtatcagctggagtcggtgcgggcgtttgattatttcagcgtatctgcggatatcggtgttcagcaaaacaacagctactgttataacttccgggcaaccaccattaatgtgaatgaatcgtatatccgcaaggccgacagggaactgaacagcacagagttcgacagccgtctgaccatcacaccaaaactctcatttctgccgccgggcaccggtctgacctgcaatccggagagccggatgagcagcggaagcggcggtcactcataaaaaaagggatgccgcagcatcccttttcagtcagtaacccgtggttattttttcatgacccgcagcaggcggacggcgttggcggtcaccagtgcggtcgcaccggagtcagccagaaccgcaacccacaggccggtcagccccatcagggtggtgaccaggaacaccgctttcagacccagcgcgatagtaatgttctcgcggatgatcttacgggtggcccgtgacagcgtgatcacttcggcaatgccggtcaggcggttgtgagtcagtgcggcatcggcggtttccagtgccacatcggtccagctgcccatggcaaccccgatactggcggctttcattgccggggcatcattgataccgtcgccgaccatcatggtgtgatgctcattattcagtgccatcaccgctttgactttatcttccggcatcagtccggcacggaaatccatgccgatggtaccggcgatagcggcggccgcacgcgggttatccccggtcagcatcacggcgctgacacccatcgctttcagctggccgatagcctcaatggcatcactgcgcagcgtatcctgcatggcgataagtccggtcaactggttgcctgcaaccacagcaacgaccgttttcccttcattttccagccgggtcacttctgccgcagcggcatcggtcagcaggccgtctgccagtttacccggcgcgctgaccaggatggtcacgccgctgagttcaccttcaacccctttaccggcatgggctttgcggttttccgcttcggtgatagtcagtccccgggcttcagtgcgctccagaatcgctttggctaacgggtgatgtgacccgctttccacggcggaggcaaacgtcagcacatccgcatcactgtgactattcagggcaacaatatcagtcacctgtggtttaccctctgtcagcgtaccggttttatccagagcgacagtggtcacggtacccagctgctccagtgcggcaccacctttgatcagcgcaccacggcgggtggcggcggccagcgcggaggtgatagccgcaggggtggaaattaccagtgcacacggacaaccaatcagcagcagtgtcagaccacggtagatccacggataccattcctggcccataaacagcggcggaatgacaatcaccagggcggagaacagcataatcatcggcgtatagtaacggctgaagcggtcgataaagcgttcgattggcgcacggcgctcttccgcttcctcaatcagtgtcagaatacggtcgatggcgttctgaccctgctcggagaccactttcatctgtactgcgcgatccactgacagcgaacctgcggcgactttttcaccctgtgcccgctcaaccggtacggattccccggtcagggcgctttcgtcaaagctcgcaaactcactgagcagctcagcatctgtcggcaggcgtccgcccggtgcgatttcaataatgtcgccgggacgcagctgtgcaaccggtacggacactttctgtccgtccttaattaccaccgcatcttccggcaccagcgccatcagcgcgctgacaccccgccgtgcgcggcctgccgcataggattccagcatttcgcccagcaggaacagcaggataaccatggccgcttcttcagtagcgccgataatgatggcgccgactgcagcgaccgtcatcagcgtttcaatcgcaaacggagtaccggagcggataagacgcagcgagcttttggcgatcgggaacagcccgatcagcgttgaggcgataaaggcgtatttgcccagcaccgggttcacaaactccagcgcatagctgagggcaatcagcaccgccagaatcagcatcggtgttgcctgtttcagcaggctctgctcttcttttttctttggcgcggtgctgccgccgttcagatcccagaggacaaatccggcctgctgcacggcactggtcacatccgcgcggacatccccggcggcatccaccaccagtttttcggtggcaaacatcacttttgcctgggtgaccgccgcaattttcagaacggcagtttcaatcttgcgcgcacagctcgggcagtccatcccttccacctgccagttgtaacgctggctgccgcttaattcaggcagcgcggtatcatccggggcggagtgatcgtgtgaacagcagctgccgtgtgcgtgttcatgaccggcgtggtcatggtcgtgttcagaatgcgcatgatcgtgcggggcatgatcatgcgcacgggactcatcgtcgtcgtgttccggatgttcatgctcactgtgatcgtgtgcggtatggtcgtgtggctgatgagcctgtgactcactctttccgccggtgatgcaggcagatttgctgccgcagcagctgctggtatgagtatgctcatgatgttctttgttcgggtgcataaacacctccctgttcaacggtgagttgatgttaatttttctcattaacaggaagtgtacacattggagtctactccagagtcaacaacaggggcgcataattattggcaaattgtgcgctcctgttgtcagaagcagaattacatcagcgtgatggcgcggacaatcaggaaatgcccgaggaaatagaaggtggaatagaccgctttggccagtttaaaggtaaacaggaagcggttaatcagccacaggatcaggttcagcaccagacagaatgccccgatcatcagggagaagttgtaatcggtacccagcccgaagaactgctctccggcaagccagcccatcaccagcgcactgagcagcgctgtcagcaccggtaccttatgatcgccgagtttgtaccagagcagcgcgagtaccgcgatggcaatcaccggtacggcaatcatcagcggaatatagaaggtgaaattattgagcagggcgaaactcagggcatagagcagataaaacacggcactggtatacagtgacaggtcgattttattatcagcaaccaggcggatggtatcagagacaatggccactaacagcccgacacacaccagatatccggagatatccagtccgtaatccccgctccacgcccacagcagcaacagcagcagggtgacgggacggaaaacccagcgctgccagtttggtccccggtaggcggcgtcgatatagagccagccggaaaaaagtacagcaataaatggccaattcatagggtgtccttgaggtatgttgatggcgattaacacctgaatatttgataatatcccgtatttacagaacacgatcaaccagattgcaggaaaacaaccatactcatgaacaaattcggtttgttaggttttattgtcgccgctttgattattatcctggcgacccgccgcttctttgaacagcgcaaacaaaatgagataaacgaccactctgcggtagcgacatatcaggtcacagtgacagagaaaaaggattatccgtacccgaatatgcgttcccgtgagcgggatgtggtgttcccggaaaccttccgttatgaggtgcatttcacgccgctgtcggggaaaaccattgtggcgtacatcaaagaggatgagtataaagagattgccctgcattcacgcggaacgctgtcaatgcaggggacgcggtttatccgttatgagccgctgcgctgatcagggcttatcctgatctttcagttctgcctgctggcggcgcagcagggcgagcagttcaaacacaccgaataaaaagacacgcactttaccggcggctgtcagtttcttatcctgcggctgaccggcattgaacagcgacatcagcagcccgtgcatcaccaccataaaaaaggtagcgatatgcataaagatattcagcggtttcgggaacggatgcaccaggctgaaaatcagaaaaccccagacggccagcatcagtatgcggccaatattaatcaggaacatacggactcctgttcagtcatctgcgtctgacgcagataaagacgatacgcaacctggccggccaccttctcccggtggcacacccagttacccggaacaaccagtgtgtctgattccgcctcggcttcaatgtagatcattgcttccgggctgagccagttattctgctccagtaaatcaacggtttcctgaagcagtcctttacggaacggcggggcgagaaaaaccacatcaaacggcgttcccggntcgagaaacaccacatcaaacggcgttcccggctgcgccagaaactgcagggcgctctgattaacgacagtggcctgttcacatttgagcagacgggcattggcgctgatctgagccgcaacggcgcggttgagttccgtaaatgtcacggcggaggcatagcgggaaagtgcctcaaaaccgagtgcgccgctgcctgcaaacgcatcaagacagcgtgcgccgttaatcaccggcatcagccagttaaacagggtttcacgcacgcgatcggtggtcgggcgcaggccgtcatgtgtcagaaccggcagtttacgtccgcgccagagaccggcgataatgcggatctgcccttgtggtgcggtttgagcttttttaaccataaccttcgtaacttattaattctgaaattattaattcagaaatatgaataacagacgggaaaacagcggaatattatacgcaggttttgtaaaaattcgtttaaatttaatatgaaattacggaaagccgatgcgcaaccatcctgtgaaatgatagactgcgtctgatttgcaactaatgatgataaagacgccatatctgctcaggattttccggacataccgtgccggaaggtgacgggtggcagtatgcaaggagtatagtggctgtggcaaaagagaagaaaaaaggttttttttcctggctgggttttggccgtaaagaagatgaacaggcgcagcaggaacaggcggctcaggaagaacaggcgcgtttagccgaagaacaggctcgtcgtgatgaagaggcggctgaa

SEQ ID NO: 6 - DNA, 62449 bp, unknown
  Altogen 322075 strain
  misc_feature (36144)..(36144): n is a, c, g, or t
gcaacattaccgccgtggaatgatgatattactgtgggaatgagtgcacaggacgcagaagattaccggaccgattttgattatgaccggctggtggccaaaattcagttgacggggctggcaaaataaagcggaacaatacgtggtattgccgctgtctgtccggccggtaattcagggatgcaataaaaaatacaggtgaaaggatgaatataagatcaggaatatatttactggtactgcttctgatgacaggaagtaatgcgctggctgcctgcggtaaccggattgatatcgctattactatcggcggtcgtggtctggtatacgggaaaccgggtgttccgctgaatgatgattcgctgggtgttatttatagtggtgaattgtatatcctgcgtgaaaatggtcgtcaggttgctgtcggtatggcgaacgagcaaggacaggttcgttataaatttaaaaccggagaagtctatcagctggataatttacagaacccgagagtttttgtggttactgataaaggatgcaatttatctgcctatgatattcagaaaacgtggcagggagaataccggtgataacagcggatattaaccggcgggtagtcatcatgttcaaaatcacagccatatcactgctgctttgtccggtgctgtcagtacaggctgcaccggcggcatttgatattaataaaaagcaggaaaaaattaattttgtcactgtggcaatgccggtttgtcgggatgcccgccgttatgatctgccattgccgaaagatccggatgcggatttatactaccgtgccgctaataaaatcaaaggtcagcgggatactctgaactacagaaatatgtatatcctggcccgcaaagcggcagatatggggcactggaaagccaaactgctgatggcagatttatacctgcaaaaaacaccgaattattattatgaattcgatccggatcaggccagagcttatattgatgagctgatgagtcagaatatcccggaagcattctatgaaatgagccaaaaccggaatgccgggatttccggttttaaaacagccccggccccggcctcattttatctttatcgcgcggcagagttgggtaatccggatgcaatggtctcaatctctaatattttcctgattgtaaaacgccataaagaatcccgtgcgttactggaatgcggatttaaatatggcggcggcgggtcggcagcaaacgggctggcaatcagtgagtcactgaatgccagaacgcaggaagactggatacgggctttttattatctgtatgccggcgctaaagcgggtgatcgtgaatcgatggctgaaatgcagatgcaggaagcggaataccagcaaaaaaatccggggcgttattatctgaatggtgagttcgtccgccgtgcacaggttttatcgttagcgatgaatccgcaatttcaccatgatgatccgtaccggaaaaccaaagggctgccataccgcgtcaaaggaaatatcgaactgaaatttccggatcttgagaaaattattccgttacctccggcaacattaccgccgtggaatgaggatattactgccggaatgagtgcacaggatgcagcagattaccggactgattttgattatgaccgtctggtggcgaaagttcagttgacggggttaacaactaaataaccgtacctgtggtgatataaaaacacagggtattaacagagcgggtaagggatatacacatgaatataatctgtaaagcgggattaatcgggttgttttgcgccggagtcaatgcagaaacatttgatccggggaaaacatatccggctgtaaaattagcggaagtgtctccgccggcctgtgccgcatatcagccgatgccgcagagtttttcgtcggcggcagaccggaattatcagatagccgccaaaatatggcatgacgaagaagacggtttatatccgcagatgtaccagctgggggaacaggcggcaagagccggtcatcccggtgcgatgtatttaatggcacaattgtatacacggggagaaaataaaagtgctttttattcctatacagagtctgatccgaaaaaagcagaacaatatctgaatgcactgatgacacaaggttattcagatgcattttattctatggcgatgatcaggaacagcgggaagattaaaacaaaaacaccggcctcttattacttctggcaggcaatgctgaaaggccagcctgatgcgtggttttatattgctaatctgcacattaactggcagcagaatgataaagcccgggattttttatattgcgcggcgaagaatggttccggagaggcacagcttaagctggcactggcttataatttaaccgcgaccacgcaggccgactgggataaagcctttaattatttatggcaggcggcaaaatcaggccagcggaaagcatacacggaattgccgaaatttaaccgtgactataaacaacaacaggggcgggattatctctccccggcatttttaaagcgggccggtcagattgcggacagcctgcatagtgcaacattccatgatgatccttaccggaaatcacaggggcgggatccgtcgaaaagaggaacaccggcaaatcgttatccggcactggaaaatattctgccgttacccccggcacgtctccctgcatggaacggagatttaaccccggcaatgtcaccgcaggatgcgtataactaccggcaggattacacgctgacacaactgaatggcatgctgggacggaaaaatgaaatccccggtaagcggtttattattgttaactgcgatgcccggggtatatgtaatgtcagagagtaaacctatgtcaaattttttaaatccggcctttgatttgcgaactgaaatcgcagatgatggcactatagtcactgacaggaggtaagttgttatgtttccggaataccgtgatttgatctcccatcttcgccagaatagtcatcagtttcgcacgctgtttgataaacacaatcaactcgatcatgaaattgcccgtctggaaaaatcggacagaagcggctacagtgaggaagtggtggaactgaaaaaacagaaattacgcctgaaagaagaaatccaccagcttcttaaagatccgccggaagatgactgaatttccttaatatgccatcggttaatccggtggctttttgtttacggggacaaaaaagggaggaaacatgatttgttaccggcagatggttaatacagattgcggtcaggtagcagcattattacaggagaatgctcagtcacggcagggcggattgctgggggaatatcccctgcagaaagttgaaaatatgtttgcgcatgcactgacggtgattattgcacaggatgatgacgtgattgccggggtggtgttcagttttccggtacagtccgcacaaatatcgccggtgaccgcggtgatttcacagcaattcggtgagttgctggaaaataactggttttacggcccggtctgtattgcggcggattatcgcggacagggaattttaccggcgctgtatcagcggctatgtgcggaaaacagcggaaaaccggttgcctttattaatcaggataatgaacgttcggttcgtgcacatctgaaatccggtatgcaagaagccggtcattttatctgtgataataccccttacttactgatgattggccgctgaatatcagcggattttatcttttccggtttttatttcctgtttttacgtattagtgactatactgaaatcgtcattatgatttgccgtattaacatgattttcaaccgaggagcttgttatggggtattacgagttaaaaaaatcaaccaaagatacaccgcagccgtactatttcgttctgaaagccggaaaccatgaaattatcgccaccagcgaaatgtatgcctcaaagcagggggcaatgaatggtatcgcgtctgtacagaaaaatggcccatctgaagtgattaaagatttgacctgatcaataccggtaaattaaacgaaggctcctgatggttgctctgtcaatatcagtgagccttttatatttacagagaaataccggaaaatgacataaaaccgagagacatcagcccgacggagataaaggtaatacccagcccgcgcaatcctgccggaatatctgaatacttcattttctcccttaaccctgcgagcgccgtaatggccagtaaccagcctataccgcagcctgcgccgtatgtaatggcttcggtaaaggtataatgccgttcaatcataaaaatggtggcgccgaaaatagcgcagtggatagtcagcagaggcagaaaaacaccgagtgagtgatagagagacgggatgaatttatcaaggaacatttccagaatctgaaccaaagcagccaaaacagcaataaaagtaacaaatgacagaaaagagagatcgataccctcaataattgcgccatcagacagcaggtaatgataaattaagttgttgattggtgtggcaacggtcagaagaaaaacgacggtcagcccgagtttaaaagaggtattaacctctttggatacggcaaggaaggtacacattccgaggaaaaaactcagtgccatattctcaataaaggctgcttttatgaaaatgttaagatgattttctatcatgatcccccctttattatattttgattgattattctaataaaaacagtaaattaaataaagtgcatttcctgttaaatgaggtgatgtcatgaaaacagtcaaaaataaatgtgtgatagccttgcttgatcactattttcctgagttatccgctgatttatccggttacaatgttgcggagaataattgtttttttagcgtaagagtctggattaaaaacgaaatttatcctgattatattatttttgagaagtgtgatgtgtcaggagagctgtatctgattaaatcactgtcaaatcgctgttaatccccggtttctgtggatccgggactcagacatttattttttctgagaatggcatcctggctgaaatacaataccggttgtcctgcatgcaaaagcagattgcccgtctgctgtttatagtatgggtaacaattatgttcagcggggcggtttctgtgtttttactcttattagcgtgtggctgtgttgtcgggtcgacaacggtattgtttggttttggcggcggattttttattgttccgctgctttatgcattgttaacagccacggcagacagccataccgcagcggcggccatgcatattgcagtagcgacatccaccggggtgatgatattcagcgcatcaatggcaacactccgccagcaccgcgccggaatgattaactggccgcaggtgcgtccgctggcgggatatattgccgccggtgcggtggctggcgcattgctggcgattgcagttcaggggatatgggttaagtggatgtttattgcttaccttgccatcactattctggacagtattttccgccccgggtttatgacacagtcagcatctcatctgcggacaatgtcagcgggtgctgttgcggtggccggtactgtgattggtgtggtggctgcatttctgggggtgggcggcagtgtgatgaccgttccgctgatgcgccgccgtggtgcggaaatggcacaggcgacggcaatggctaatccgctgtctttgccgatggcactggccggtacgctgacttatattttgctggcccgccatgaaacggcggcattcggcagcggttttgccggttatgtggatattcaggcttttatgttactggttaccggatcctggctggggcagaaactcagcgcgccgctgattggccggatcccggataaactctatgctaaatcttatctggcgctgctgatatttgtgctgctggtgatggtgattgtgcagtaaacaggatatctccgccgaaaagtaataatatgcagtgaattaacagtgtgcaggttgccggttgattttgtgatctatcagctttacttatatctccggatgtccttaaatatctgcgggttctttgtttgtcagatactaagtaaggtttacaggagattcgatcatgtcaccaatgacgaaaagtacgatggtataccctattggtttcttcacctgcatggcactcattatctttattgttgcgttagtgatttgataacgggtaatgaagaagaaaggaaaacctcccgcgtgaacgggaggtttttttacggccccggtatggcgccggtttaatccgcggataacaccgttataatgatcagattgcgccctgtttttcctctttaacttttttcgcttttttccctttttcactttttacttttgcttcatgttttacggctttcgcatggctgtccgctttagtggcggtaataccggaatgcgcagcggaaactgccggtgccggagtcgatgccattgcaccgaaagagaataaaccggccagagttgcaacaataagggctgaatgtttcattatgatatcctcaggattacgggagtatttatacctgctcagcgggtatggatgaaacatattcctgtttttttcgccgcacaacgggatatacataaacagtggcaatattttcaaatctccagaaaactgacaaatcctgatatttcactatagttaataatctggaatttattgtttaaaatcagtctattactgtgtgattttttgaagtttaaacgaatcatcaacagaaaataaatatattattttcccggattaagttttttttgtaattcttctgtcagccggaccagttgcatcttgtctttttctgaaagatatgcagtgtaattatccgcaaagcggttaatacgctccattcctttgattatttttgctgcagctttatcgatatcactctgatttgtattcattgttttttcctttacagtaccgttgttattactattatcagaaaaaatagtgattaatagcttaaattgaattaatccggttcatcataaagaattaagggcgtcttcattttcttttttccggagaggattattgtggaaagttaaataagaaaatacgctttccacattgcataatccgccttcgcgcatttccatcgggtgaacgagcaccgcgtagcggggactgaatatctttttccacaacggcagcggggaggtcaggcgcgaaaccgtcttctgcagtgttttggcggcagagagcatatccccgaccagcagccggcttgtggtaaaaggcgtttccggtatccctgtcatttcgcggtgcgttctgacatcacggacgacaattttgtcctgatagagcaggatataaaggtaaaagatattcataagtaactttcccgggctgatattgttatcagttcaattttaaatctgctgataaaacaatccattacttttttctcaggtgttgatccggatcttgtcattgacggatttcggatcattcactacgatattaattcattcaaatgaattaataaaaggtgacttatgaaaacagtaaacacagcaataccggccgggttctctttacaggagcgggatcgccgctgggatctggcgcgcgacatcatgcgccagcgtaatctggatgttctgattgtttatggtgaccgggaatctgctgccccggcaccgttctgcgtggatcactattttaccaatgaccgccttgggtctgtggtgatcttttatcaggacaatgacccggttgtggtgacatttgcgccgatgatgattgccgaccatatgcaggccgcattacgcggggacaatcagtggttgtcgccgtcacagattatggtcggtaaaaccggacgtaatatcggggcactgctccgggagatgaatgtaccggccatggcacaaattggcgtgatcgggctggagccgtatccgccgttctattttgatggtgcgatgccgttcaataccctgaccgggattaaagaggcgtatccgcaggcggcgattgtaccggtttaccgtgacttttttgtccgcgcttccgtaaaaagtgaggaagagctggcacatatccgccacgctgccgccatcggtgaagcgatgagtgaagccatgcgtgtgacagcggtaccggggaacagtgaggcggatattgcggcggcagtcactgccacctgtttatctgcggggggatttacggcggagatcctgatggggtccggcccggaatatatcggctggggtcagcccgcctggcagtaccgctcacagaaaccccgggagattgagtgcggtgatattgttttgtcagaaattttcgcgctgtacggaatgtatgaaacccagcatcaggcagcggttgcggtcggtaatattcacccgcagctggagaaagcggcacaggtcgcccgggaatgttatgacatcggggtgtcatatctgaaagaaggcgtgacattcggggaagtggtggatgagatggaaaaaccgctgctggcttccggcggctggcatgtgcatccgctgatccacagcatcaatccgtatggtccgatcgggttcggtactgcgccggggattgaatctctgccgctggtatcccgttaccgcaaagtggagcgtctgccgaatcccggccgggaactggtgctgaaggcagggatgagctttgcatttgaaccgaattgtgcctttggttatcatctgtgtaaccttggcggtacggtcattgtcgggaaaaacggcggaattgagcttaatgataattccacccggctgatgcgtgctgatctctgattataccggtgaatcctgcagatgacggaaaagatgaataaacatacgctctcctcagagcagaccagagagaaactgatacaggcggggatccgcctgtttgccctcagcggtgtcagcggtgtccggacccggcagctggcggaggaggcgggtgtgaatcagtcagccattccgtatcatctgggcggtaagtcgggggtgtatgcggcagtgatccggaaaattaccgatgatctggccgcggtgacggatgtcagcaggatcgatgctgccacagcggcactgacggcacaggtgcagccgggcaaaacggcactgaaaacggtactggtcagtatgatctccgggctgtgcaaggcattgttatcgccggaacgcgctctgtacggtacgctgatcctgcgggaacagctggagaagactgaaaattatgatgttatttatcagtcatttattgaaccttttcataagcggctctctctgctggcacagctcgcagacccgcaggcggatacaaaaacaaccattatcagggcgcatgccctgatagggcagattctggggtttgtggtggcacaaaaggcgtatctgtgccgcagtgaagcggaatctgtcagtgaggatgaactggcggaaatcaccgggcagattgtactgctttcctgccgggctctgggactggatgaggcgtaaatgacagtgccggagagtatccggcactgtattgtcgtgattaccaaccgggaacggcgccgccgttaaacagcgtttccgcggctttggcaacttccggtgactgataagctttaataaatttttgtacattctccgcgtctttattatcttcacgggtcacaataatattgacgtacggtgattctttatcttcgataaacacactgtcttttaccggtgataaaccggtctgctgaatataggtggtactgataatggctaccgtgactttcggatctttaatcacccggggtaactgagcgccttccagctccatgatattcagtttcagcggattttcagtaatatccagcgcggtcggtaataaaccggtgccggattttaatttaatcagcttctctttttccattaataataatgcacggccgaggtttgtcgggtcattcggcatggcaatggtatcaccggtttttaattcactgatatttttaattttatcggaataaccggccatcggaaagacaaaggtatttgccacggcaaccaggttataacctctggcgttattatcctgggccaggaacgggcgatgctggaagacgttggcatcaagatcaccattggccgtcgggtcattcggcaacaatgaaccgctgaaaccgaccagttcgacatccagtccgtatttttctttggccacttttttggcaacctcagccacatcctgctcggcgccattaattacaccgactttaatttttgtcatgtcagttgtgcccttatcacagcctgacagtaaaaatcccagtgctaaaacagcaccggaaaaaaacagagaaaattgctttttcattatgttcaccattctgtttactgaaagtatgtaccagtaaatagcggtaaaatgaaagaaaggtcaacgggaagggtgatgcaaaaatttcatcttgacagaaataaaaaaaagcccgcaatccgcgggcataatcacaacatttcttcagggtactctctacttggatgaacttactataccggagcggatgtgtagtagtgtccggctttttaaagcttgattaatgtattatcgggatttgtcagcaaaccatgacaaagtgtgacagacagcacattaatatccgaaagttatcatgatgagaaaaaaagaatatagcaaaccggaaaatagccgttgtattgaacaaatacgcagttagtgacctgttcaggcaaatatattccgatatactcatttcggaagcctgcataatgataagtaatgcatgttgttatttatcaatgataaacggagcaacaatatgccaaataaaatattttccccaaaatataatccggtagagcgggtcgcttttgatatggcactggctcttgcatcaaaaattgaatcagttaacacaccagcacaattaatggccgagatcgcagcactgtatcctgaatgctacaaagcggctgataaccagcgtaagcgggaatacctcggatcacacgtcaaactgcattcggtcggataatgttgtcaatgacgggcggatttacaacataagtgcggcggacagagagtgcttttgtgactctgtccatcggacgtctgttcagagataagaccggtggtttttcattgtattctccgttgatggcggctttcagcgctgcattgagccggtattccgcctgtagttgttgtctgcgtgcagcccggcgggctctggcacactgatatccgcggcaactcatttttacctccctttatttctgaaccatcagcataaaaatactaatggtattattaccaggtattattttttccggaaaataaatactaaaagtattattagtgaacagtaaaatgccctccggaaggagggcggcaggagatgattacagtttcatcatcatctgaacggcaacaccgataattttacagtcaccgttaactttcatggccggccacgtcgggttgagtcctttcagataccagttgccgccatcgatcaccagttttttgaacgttgcttcgttggaatccgtcagctttgcgacgaccaggctgccattttcagaatctttgccggtgtcgatcaggatcagggagccgtcaggcacactcttgccggttggtgcggtcatggattcgccttcaactctcagccagaatgcggccccctgaacatgggtttccgattcataccattcgtcgatttgatccagcccgtaagcttcattcgcctcattccaggcacccgcctgtacccagctgattaacgggtatctcggggagggtttgtaagggcgaaggccggaaatattgctgtcaatagcggcactcagtgcctgtgcctctgcggcaagagacggactgaaatcagaaatagggacattgagttgcgcggcgaacacacttgctgtctgcaaattcaatgcattgcggccgttaagatagtgaccgacggcgccctggctgatattcagtatgtcagcaatgctctgctgggtgatacccagctcttttttctttgactcatacaaagctttcagtcttcggcagtctgccagctgttctgtcgtcagttgtcgtttttcattcatacaatattaataccaaaatcagaatttttgtcaatactaaagatattgacatatttaatagttatggtattatttatctatcaacagatgatgttgtcccgctctttaacagactgcgctgaaaaatgcgcaccaacagcctgaaccactccgtgtgtggataggcttcggcgatgctgaatgcaccgccatcaaaaaagcatcccgtaagcgggatggccgccggtattccccggctctatttatattcagtaactttatttaaatttgccctgcacattatttttatttaatgacatccggtcctgcttcgtttaatacgccgcacagccggtaatttacaggatgatacttcagaggatatattatgactgaggaaaaatttaaaatatacgtcaatattatccgggcctgccgggattatgattgctttaccaacagtgatgctgcgcgatatacagagacatctgaaatctttatccgcacatatactactattctgcataaaatcggcagtctgataaaaacagggatggttaagcaggggcggcattatattccgcaatatgcggtggcaccggatgctgtcacgcgtctgtaccgctatgtccgtgaaatcagaggggaacctgatcccaatccggtaatgaaatgtccgtcaaagggaatgaagcggattaaattctgcggacgggtagtcaataaagcctttatttctccggggttcggacgttctgcgattaccgatattgattcacgattaaaggcagtaagaaataaagatccggaaacgattttacattaatttttatatttcagacattatctgagtttacctttcaataatatttacggaacactctgcaagggagtgtatatgagcatgtcagataaatattccgggcccgcagcatatacctgggggcttatcacttccgttttgggtgtgttatcgctggatcagtgggcagtccttatcgggattgtctgcaccatcggtacattttttattaattggtattaccgacggaaagagtttcagataaaagccggagatcatcatgaagaatagtctgagcaaaaaagtaattgccgcagcagcaggcggcgcaatttctgccgctctggtgctgataccggcctatgaaggcgtggaataccggccttaccgtgatgtagccggagtattgactgtctgttacgggcataccggcagtgatattcaggccggaaagatttatacggcggatgagtgccgggcgctgctgcaccgtgatctggataaaatccgccgcgcggttgacccgatgatcacggttcctgtggatgacaccacccgggctgccatctattcctttgtttacaacgtcggcccgggggcgttttcccgctcttcgatgctgcgaaaactgaacaacggtgatattgccggtgcctgcgaggaaatgaaacgctggacattcgccggcggccggcagtggcaggggctgattaaccggcgtgaaacggagaatgcggtatgtcgtgcaaccctgtagtactgatcattgccgcgattctcatactgacagcctgcctgctggcaggctgttacctgtattcactcccggattactgtcagccgctgccgggacacccgcaggcggctgttatccactatcagtgtgaaactccatgaatatgctgacaaaaatactggccggtctctgcattgtaatactgaccggcctgctgctgacactgcatctgtacagtggtgcaaaaggtaattacctgatactgaaagataaatatgaccagcaactgactgtcaataacctgacccgggtggcgtttatggccggacatcatattgcgctcagtaatatcagggcaaagcagacggaggaggcggaacatatcaatgttaagacaattattaaaacagtacttaaagaaagtgagtgtgctgccgttcctgtgcctggcagtgttaccggcgggttgcagcaatacgaaagagacattcgtgcccgcgccggtggtgccggttccggctcatcttctcgctgactgcccgctgccggttatcccggatgaactgacttacggcggcgcgatcctgctgctgacggatatgatgaaaacaatcgcggactgtaatcacgataagcgcgcaatacgggagtttgagcaaatgcgggcttccggagcggattataaggcatcacaatagtgctgtatatttaaacagttcaatgtggaacaatgttatttgaggactaaaaaatgacagaagtaacaaaggaaatgtgttgtgaggatgggcagacggttatcagcattgtggttaacaactgctgtaaatgtaaatgcgggtgtgaatgtaaagaaccggaaaaaccggaaccgacgtgtccgccgataacgccgaagcccacatgcccaccggtcactcagacatgcacaccgccggatacaccgtggacaccgacaacaccgacaacaccgacaacaccaacatcaccgacaacgccgacaacaccgatgacaccaacgacaccacaaacacctaaaccaaccagaacggatagtattactcttttcttttaagtaaaaaccctgctctacagcagggttttgttgtatacagtctccgggttatgcaggagcatgttgattatattttaccggatatattctgtgtgttcggtgtacagactgaaatatggagacaggtgaatgcgttattatcagttcttgcgtctgtgtccgctgatttttgtgtttgatcagagtacgttacactgaactcattactgcataaccacagaggtgttgataatgaaatccggtacaataaagtatggtgttatcagtctgctttttctgactttaacaggcgttgcgaatgcggatgtttaccgtgaccgcagcggcagggttacaggctcatcagtaaaaagttcaggcgatactatttatcgcgatagtcggggtgtgaatacgggcagtgctgtggagtcatatgatggcagaacgacacactataaagatgcacatggtgttgtgacaggatactccacaactgatgcatatggtaaaacgcagtaccatgacaggagtggtgttgcgaccgggagtgctactaaagacgcatcaggaaatgtcacgtaccgcgataaaagtggcattgtgacaggaacagcaacaacagacgcgtggggaaaaacaactttccgtgatcgcagcggtattgtgaccgggacacagcaaaagcaaaattaatgacacggacagacgaatggtgttctggtgtcccctgcaggaatcgaacctgcaattagcccttaggaggggcttgttatatccatttaactaagaggacatgatgtctgatggtatggccggttttgcggcgggtcatatgttaacgctcaaccccgcattctatcaagtctttatttccgctttgttttttctccgtttccggttgccggtgcgttttttatgtggtgcgccggtcccggatgtacagattgagtgcattacctgcgggatcccggggggccggctgtatttatggcaatgtcttcgtaaccttttgtttcagccacgaaataaagatatctgctttcggattacgcctgtctccgagcatagcaaagtaatatcgctgactgcatgtcagtgaaatatcgccgaagggcatcaccagcatcctgctctgaatacgtttttccaccagttgtttacgtcccatcgcgacaccggcatgattcattgcggccacaatcgccaaatccgaacgatcaaaacacagattgcgccggtgagggaacaaatcaggctgatagtgttcactccaggctttccattcgtcgtaatctgagttactgctccatgcctggcggtcatgcaataacatgcagttcctgagctgatgaatattgttatgcagctcataacgttttgcatattccgggctgcaaaccggcacgatcgattctgacatcaaatcttcgcaatagagattaggtcttgatatatcgtcgtaataaatcgcgatatcaataccatagccgcggaaattgacatcatcattaccggttaacagattcagctgaatagccgggtattgatccgtaaaatctgcgatccccggaatcagccagcattgtgccagtgacgggcgggaatagacggttaactcgccggagatttcctgatttttgatatcaatgatttcctggttaatgtcatccaggtttttccgtaatgcccagtagatgcgttcaccgtctgatgtgagttcaccccgccggtgaaaacgctcaaataaccggaaacccagttcactttcgagggtgttaatacggtggcttactgcgccgggcgtcagcgccagttcctgtgctgccagagcaaatgaactgtgccgtgccgccgcttcgaaagtatgcaggcgtgacagctgatgacccgatacacgcttgttacgccgcagggatcctgatggttcataccggtttatatccgatgacatagccgctctctttttattaagcaggatgtttttacataaagaataccgcgtttaaggtgaatttatatgatgcaattcacgaaaaaagtgctgattttgacgaatgtcacgcgtttgagttaaccgggctaatccaaagcccgggtttcatcgtttgtcacccctgaatatttattatccaatgaatgcacaacaacaatataaccaggggtaggatatggactctgtaatgtggatgatcggcacgctggttttcagtatcttgctgattattatttcaattattaaatttaagtttcacccgtttttagcattgctgctcaccagcttttttgtcgggatcgccatgaatatggaaccgcaggatatggtcagcgccatcgaaaacgggattggcgggacactcggatttttggcggccattatcggactggggaccatactcggaaagatgatggaaatatccggtgctgctgagcgaatcgggatcacgctggaaaaatgccgctggttaagtcccgatgtcaccatgatattgatcggccttatttgtggtatcacactgtttgtcgaagtcggcgttgtattactgatccctctggcattttcgattgccaaaaaaacaaatacctcattattaaaactggcgattccgttatgtacggcgctgatggctgtacactgcattattccgccgcaccccgctgcgttatttgtcactaatgaactcggcgcggatatcggaacggtgattgtggccgggttagtggtggggctggttgcatcattgattggcggaccgctgttcctgaaatttttgggggatcgtttaccgttcaaagttgtaccggccgcgtttgctgacctgaaagtccgtgaagaaaaagatttaccctcattaggcgctgcgttatttacggttctgctgccgattgtgctcatgctgattaaaacaaccgctgatttaaacatgagcaaagatagcccgttattcacctttttacagtttatcggtaatccgataaccgccatgtttatcgccgcgtttgccgcttattacgtattgggtatccgccgtcatatgggaatgagcgtcctgctcagcaaaacggaagagagctttagctcgattgcgaatatcttattgattatcggggcgggaggtgcatttaacggcatcctgaaaggcagcggattgagcgattctctggcgctggtgctgtcaggtatcgatatacacccgattttacttgcctggctggtggctatcattcttcatgccgcagtcggatcagcaacggtcgccatgatgggggcgactgcaatcgtggctccgctgatgccgctgtacccgcacatcagcccggaaattatgacgctggctatcggctccggggcaatcggctgcaccattgtgactgattccttattctggctggttaaacaatattgtaatgccacgctggcggaaacattccgttattacagtgtcgccacgctgattgcgtccgttgtcgcactggccggcacctttgcactttcctatgtgatttaaaagagagtaatgatgactcagattaatattgaaaagttaattgctgactatccattagttcaggaactgattgatttaaaacaggtggcatggtttaaccccggcgtaaccaccacggaagcgggtttgccgtatgtgggactgacgcttgaggatgtgaaggatgcggaagcacgcttaagccgctttgccccgtatctgatgaaagtctttcctgaaacgcaggctatgcaggggatcattgaatctgaagcggtagcgattccggagatgcaggcggctcttgcggcacgttatcagacgccgctgacagggaaaatgtatctcaagaaagacagtcatttgccgatttccggttcgataaaagcgcgtggcgggatctatgaagtgctgacccatgcggaaaaattagcgttggaggcaggattgctgtcaaccggtgatgattatgcggtgttattctcggataaattcaggcagtttttcagtcagtatcgtattgccgtcggatcaaccggtaacttagggatgtccatcggcattatgagcgcgaagctgggtttcagtgtcagtgtgcacatgtctgcggatgccagacaatggaaaaaagacaaattacgttctcatggtgtcaatgttgttgagtatgaacaggattacagtattgcggtggagcagggacgtaaggaggctgaaaaagattcgtcctgcttctttattgatgatgaaaactcctccacactctttctgggctatgcggtggcgggtctgcggctgaaaaaacaatttgctgaaaaggatattaccgttgatgagcagcatccgctgtttgtgtacttaccgtgcggcgtcggcggtggccccggcggtgttgcattcggattaaaactggcatttggtgacgcggtgcattgtttctttgcggaaccgacgcattcaccttgtatgttgctcggggtgcataccggtcttcatgatgccatttccgttcaggagatcggtattgacaatattactgcggcagatgggcttgcagtcggccgggcatccggatttgtcggccgggctatggagcggctgatcgacggttattacaccattgatgatgcggaaatgtataacctgctgggattgcttgatcagactgaagctatccggctggaaccttctgcgttagcgggcatgcccggttgtgtgcatgtgacccggaatcaggcgtatttacaggctgaatcgctgacgcaggaacggatggggaatgccacacatctggtctgggcaaccggcggcggcatggttccggaagatgagatgcagaaatatttatcacaggccaaaggtaactgacagggcggtgagcaactgaacagaccgggaccggcgcgattgttgccggttccggtatcaggtgattatttacggctcatttccagtgatttttctgtcgcactgcggacaccggctatcaccgcctgccgtaaacccatttcttccagtttagtgactgcttcaatcgtggtgccacccggcgagcagaccatatctttcagttcacccggatgtttgccggtttcgagaaccatttttgcagcgcccataacggtttgtgctgcaaattcataggcttgtttacgcggcataccaccggccaccgctgcatctgccattgcttcaataaacataaaaacatacgcaggagcagacccgctgacgccgatcacggcatcaatcagtgattcagggactaactcagcgcggccgaaactgcggcacagtgacatcaccagtttagtttctacatccgtcagataagcattaacggtgacggatgtcatcgcggcattgaccagcgcgggggtgttcggcatcaggcggaccactttggacgatggtggcagggcggcttccaggacttccagagtcacaccggcggccatcgaaacaatcagggtatctgctttcagacaaggggaaatatcacgcaatacaccgggaacggcataaggctttacacctataaaaataatatcggattgttccgccacccgctgagctttagcctcaccgtgaacaccgaattcctgtgccacgcggtcggtactggccgggctgtggttatgtacaaaaacagtatcagaggaaataatttttcctgaaatcaggccgttaaggatggcttttcccatatttccgcaaccaataaatccgatttttttattcatgatggctcctgtattgctgacaaagactgacctgaagagcaggataccactctgtgctgccggggtaacccggtaatttcggcatgatttacatacacaaatatacaaaatccgggtaatattgacctattatagatacgtgaaactgtaaattttgctcacgttttggcatggagaaacatatgaagtatcaggtaagtggcctgacacttgctgcggtgctgctgattggcgggtgcgcaagttcggatcagacaccgggaacgcgcagtgatccgctcgaaggatttaaccgctcaatgttcaattttaactataacgtgctggatccttatgtgctcagaccggtggcggttgcctggcgcgattatgtgccgacaccggcacgaaacggcaccatcaacttcctcggtaacctcgaagaaccggccagtatggtcaacaattttctgcgcggggatttttaccagggatttaagcactttaaccgcttcttcctcaacacagtctttggcctgggcggcctgattgatgtcgcgtctatggcgaaccctgaactggcgaaaacagaaccggcccggtttggtaataccctgggttattatggtatgggttatggtccgtatgtggttattccgggttatggcggcgcaacaccgcgcgtggatggcggcgactggctcgatacaacgtatccgatgctgagttatctgactatctggatgggtgtcggtaaatgggctatcgaagggatcgacaaccgtgctcaggcactggatgcggaaggtgtgctgcataactccagcgacccgtatctgatgatgcgtgaagcgtacttccagcgtaatgatttccttgcttccggcggggcactgaaagtgcaggaaaacccgaatgcggcagcgattgctgatgaactggattctattgacagcgaataatgagctggtggcagacaaataaaaaagttctggtcagtgaccagaactttttttatgcattcagaccggaaaatcagaagctgtagttaaagttaacaccgtataaccaggctttaccggaggagctgaagttgtaagtcagcggcaatggttctgctttttctgaaatattaacttttcggccatgcatataagcgacaccgacatcaacagaggcatctttgttgaaggcgtaggttgaccccagactgaaccagatacgatcctgatccggaatggagattgaacggttacctgcaggtacaggactgtcatcaaaggcaacaccaccacggaaggtccagttatcgtcgtggtaataggtagtacctaatgctacacggtaggcattttcaaaaccttcatgtttttcgaataaaggttttccgcccgggttgttttttggtacagctttcagctctttaaactcactccagccagtataggcgaaggtataatgtactgcccatttgggagcaacacggtgatatgctgataattcccacatatccggaagattaagatccagtttacctttgacggtttgaccatttgttccgataatcggaaggtcattagtataatcaccatctttgaattttacttttactttagaacgataagtcaggctgaaccggttatctttatccagttcatataacactcctgcgttccagccatagccccagccatcaccttcgagttttgatgcatttgtgtttgcaggaatgacaggtaacccaatcatcgggccataggcaccagcctcaccagcatggcgtgaaatctcggcatcagcataaacagcattcaggcccaggccgaaactgaaattatcattcagacgataagcacctgctatgttaaagttaactgttttcaggtctgtttttccgccaatcaggcctgcggcatagtcatctttaaactctgttgccaaaccaaagtttgatgtggcagatgcgccaaaaaaccatttctcattgattggagtaatgaaatgcaggtttggtacaaccgcacttggtgcgatatctttggcatcagtactgttatgtgaaggaagcggggatctaccgctgatatccactgacgggttgatcaggatcgcaccggcggacatggacgggcgatcaaataatgtcattgctgccgggttgcggctgccgacgctggcatcatctgccacggcaccttcccctgaaaacgcacgcccgagagcagacgtggaatactcatttaattgaaaccccgccgcaaaagcctgagttgcttttaatgaaactgccactgccagtgctgaacgagtgaacaggtttttctggttcatgaccaaaaccctcttgtttattttgtttatgtactactttggtagttagaagtagcgctggattgtatgtttgcttgttgatatgacaaatcagaccagttgacagagtatagaatcagcacactgaaatgttatttttttgtacgaaaataagcggattgagatgtaaaaatgcgatttgggttacaaaaatttaacaataacgtgatttttgagagcaaaaagtggctttagcccgagtagatcaaacaatagattgaatttttatggtttactttgataaatggtatgattcagtactaagactgcaggctatttttaactaacgggagactgaaatggctgacgaaaaaaaactgtgcagcgcagaagaaaccgcagcatgctgctgtgtggatgtaggcactattattgataacgaaagctgcacctcttctttcgagcgcgtatttgcatctaaagcagacgctgagcagatgatggcagcactgactgccaaagcaaatgcagcagcatctgaaccatgcaaaatccacagcgaatataaagaaacggctgacggcgttctgctgaaagcggatttcactttcagctgccaggctgaaacactgatctttgaactgggtctgcgttaattcatcagaataatacgcaaactgaattcaggcctccggtgaatacgggggcctttttttatcgattttttgttataaaaagtttatttccctgagccacctcgcatttctcagctatctgcattgcgtgaatgcaacacgatgttaacaatatcagcaggtcagaccaccggcagttcgtgataacctctcatcatgtaaggatgaacgaatgaagcaggcacaggcagaacgcattgcaattgttgacggcttacggacaccgtttgcccggcagtccacggtataccgtgatataccggcggttgaacttggccgggcggtggtgcaggaacttctttttcgtcagtcatttccggcagaactggttgaccttgttgttttcggccaggtgatccaaatgcctgccgcgcccaatattgcccgtgaaattgtgctcagcaccggattgccggtgaccacagatgcgtattcagtaacccgtgcctgtgccaccagttttcaggccatcgccaatgcggcacaggcgatacagtgcggacaaaatcagatagccgtcgcaggcggggcagattccgcctctgtgcccccgattggtgtgtcacgcaaactggcgggagtattgctggatctcagtaaagcccggaaattatcgcagaaactccggttgctggccgcattgcggccgcgcgacctcctgccggttgcccctgcggtggcggaatattccaccggtctgcgcatgggcgataccgccgaacagatggcaaaacgttaccatatcagccgtcaggcacaggatgcgttcgcccatcagtcacatcaggccgccactcaggcgtggacatccggtgtcctgcgcgatgaggtgatgacagcccgttttccgccgttcagtcaggtatgtgaagaagacaatactttgcggaaaaactctctgcccggcagctatgcacaactgaaaccggcatttgataaacgtcacggtacagtgacagcggcaaacagcacaccactgacagacggcgcagcagccgtattgatgatgaccgaagcccgcgcccgtgaactcgggctgacaccgctgggctttttgcgcagttatgcatttacgggtaacgcagtgcaggaagatatgctgctggggccgtcgtatgccgcgccgctggctctcgatcgcgccggcctgacgttatctgacctgacactgattgatatgcatgaagcttttgcagcccaggttctgactaatctgcactgttttgccagtgagggctttgcccgtgaaaaactcaaccggacatcggcaattggtgaggtggatccggcgcggtttaatgtgctcggtgggtcaattgcctacgggcatccttttgcagctaccggtgcccggatggtgacacagacactgcgggagctgcagcggcggggcggcggttttgcaatgaccacagcctgtgcggcgggcggacttggcgtggcgatgatctgggaaacggaataagacgggagactgatgatgacacaacatgatgaaacaccttctgccttccgcctgactgtgcgtccggatcataccggggtcattactgtcgatgtcccggatgaaaaagtgaataccctgaaggcggagtttgccgcacagtttgaggcagtactgcgtgatgcccggcaaatcccggggttacgggcaatggtgattatctccggtaagccggatacgtttatcgccggtgcggacattcatatgatagccggatgtacagaggccgcacaggcgcaggcactatctgaatccggtcagcggttatttaatctgattgaaaattatcctctgccggtcgtggcagcgattcacggtagttgtctcggcggcggacttgagctggcaatggcctgtcacagccgtgttgtcacagacagtgataaaacccggctcgggctgccggaagttcagctcgggctgctacccggttccggtggaacacaacgtcttcctgccctgaccgggctggtggccgccctggatatgatactgacaggacggcagttacgggcaaagcaggcggttaaaatgcggctggccgatgatatcgttccgcccgatattttactggaaacagcggtggcccgtgctttgtcttctgatcctgcacggcgggccccggtacctttccggcagaagctggaaaaaatgaaggggctgcgggatatcatcttccgtatgacccgcaaacaggttcgccgccgcagtggcggacactatccggcggctgagcagattattgacgtggtgcagtgcggccttgaaaaaggccgggaggccgggtttaaagccgaagccgcggcattcggtaaactggcggtcactccggtatccggtgcactccgtcatctcttttttgcctcaaccgcactgaaaaaagagtctgccgatggggtaaaacccgcagaacttcatcatgtggcggtgctgggcggcgggctgatgggggcgggaattgccacgattacccgtcagcgcgcagggcttccggtcagaatcaaagatgtttcgcaggaaggggcaaataaagcactggcttttttctggcagcatctgagcaaacaggttaaacgcagacggctctccccgcgtgagcggacacaactgatgagcggcatgaccggcactacggattaccggggatttcaccgcattgattttgtggcggaagcggttttcgaatcgctggcactgaaacaacagatgattgctgagatcgaggcagtgacatcaccggatactatttttgcctcgaacacctcgtcactgcctatccgtgatattgccgcgaaggcatcacggcctgaaaaggtgattggtttacattatttcagcccggccgaaaaaatgccgctggcggagattatcccccatgaaggcactgatgcggtgacactggcaaccacgctgcaactggcgcgcagacagggaaaaacagcgattgtggttggtgataaagccgggttttatgttaaccggattctggcaccttatattacagaagcgttacgttgtctgacggaaggtgaaccgccggaaaaaattgataaagcgctgactgatttcggttttccgatcgggccggtagcactgctggacgaagtgggcattgatgtcggcacaaaaattatgccggtgctggaagccgcatttggtgagcggtttgcactgccgccgcagctggatgcgcttttccgtgacaaccggctgggcaggaaaaacaaacgcggattttatgattacaccccgttaccgtggtggaaacgctgtggccgcaaggcaccgcgtaaagcggataaagcgatttatccgttgctgggtatcaccgtacaggagcgtctgacatcacaggaaatcacagagcgctgcctgatgatgatgttaaatgaggctgtaaggacgctggatgaacaggttatccgttcaccggcggacggggatgccggcgcggtgtttggtattggttttccgccattcctcggcggaccattttactatatggatagtatgtcagccgtcgttatgacagaaaaactgacggcactggcggcacgttacggtgatcgcttcacaccgtgtgaggcattacagcagcgggctgcggataaccaccgtttttactgaggaagtgctgtgaagtcactgagaacacggggcggttgtttcatttttctgaacaggttctgaacaaaattcaggtttatctctgtgctgaatcattttaattatgattaatttgaggcagaatgcctttcacctcccctgacggggacacagaaataacgataattttaaacagatcattctttgatgtgatacggcccggggattcagacatgaccgtatccgtcctgttcagacggtgacgtatgcaagttcttattatgcgacatggcgatgctgctttgcaggccgccagtgattcagtccggccccttaccgcaaaagggataacagattcccgctgcatggcaaaatggctcgccgggcagcacgttcagattgataccgttctggtcagcccgtatctgcgggcagagcagacactgaccgaaatccgtgatgcgctgagtttaccggctcaggaagaagtgatgccgggactgacgccctccgggaatgcggagaatgtggcggattatatccgttttctggcggaagaagggcgcaatggggtgctggtggtatcgcatctgccgctggtcggttatctggtagcggcattgtgtccgcaggaaacggcaccgatgtttgcaacatcgtctgttgcctgtattgaactggatgatgacggacgcggcacactgctctggcaccgcggtcccggacagattgactgattactcgcgccgggcggtttcagcaatctcaatcagcagcagtaatgctgcggtaccgccccattccttaggggcctggtgaaaggcaatcacatccgggtgttgtgccagccataacggtgtctgttgtttcagtacatgcttgccgtgcccgtgcataatacagacacaataggtgttttcgcggcgggctgcggctatcagggcaccaatttcctgtttggcctgaagctgggtcagcccgtgcagatccaaaaacagttccggcacataatccccgcgacgcagttttttcagctcatacgggctggcattttcccgcagatagcgcgcagggccgtccatatccaggttcgggcgatattcatctgagaaataaaaactggcatcaatctgatcctgcaacagccgttcaggcgcaattttggtcacacttgtccgtggtttcgggtgcaccacaatatcctgtctgattttacgtgtcccgctgatggcctctttaaacaggttcaggtcatcatcagtcaggggcgtcttctttttcataacatctcatcactcagtattttccatagtgtaactgatttttttacggatgttgacgctatactgccggtcaccgctgacgggagccaccggaaaattgccgcgcatttcacaagatatgctgatttagcagcgacttcatggcaaactacgctatcagatatcttattttgttttaccccgccggaggtactttggataaaatttacgttgatgaagccgtcagtgagcttcacacgctgcaggatatgctgcgctgggcaatgagccgttttaatgcggccaatatttactatggccacggcacagataatgcctgggatgaagccctccagctggtactgccgacactgtttctgcctctggatttacccgctgaactgtatcagtcccggctgacctcctcagagcgtcaccgcattgtggagcgcgtactgcgccggatcaccgagcgtgtgccggtgccgtacctgactaaccgttcgtggttctgcggccatgaattttatgtcgatgagcgtgtgctgatcccgcgttcaccgattggtgagctgattaacaatcactttgcaggattgctggatgctgaaccggaaacgattctcgatctctgcaccggcagcggctgtatcgcgattgcctgcgcatacgagttcccggatgcggaagtggatgcggcagacatctccgccgatgtgctggaagtcacagaaatgaacattgagaatcacggcttatctcaccgtgtggtgccgatgcgttcagatctgttcaacgatctgcccggggtgaaatatgacctgattgtcaccaatccgccgtatgtggatgcggaagatatgagtgatttaccggatgaattccgcgtcgaaccagagctggcactggctgcgggcagtgatggtctgaaactggtacgccggatcctcgctaatgccccggattatatgtcagaagatgcggtgctgatttgtgaagtcggtaacagtcaggtgcacctgatggccgaattcccggaagtgccgtttatctggctgtcatttgaaaacgggggtgacggtgtctttatgttaactcgtgatcaattagcagaacatcatgacgcttttaaacttttcaaataaccgttcctcctgtaggaatagaaacataaaaacaggttaaaaccattcacttgcacacaatcagagacaggaaaacacgatggccggaaacagtatcggcgaactttttcgcgtaaccacctttggtgaatcacacggcccggcgctgggttgtattgttgacggcgtaccgccgggactggcgctgactgaagccgatatgcaggcagatcttgaccgccgccgtccgggcacatcccgctataccacgcagcgccgtgagccggaccaggtcagaattttgtcaggggtatttgaaggaaaaaccaccggaaccagtatcgggctgctgattgaaaataccgatcagcgctcacaggattacggcgccatcaaagatctcttccggccgggacacgcggattacacctatgagcagaagtacggctttcgtgactaccgcggcggcggccgctcatcagcccgtgaaacggcgatgcgcgtggcggccggggctattgccaaaaagtacctgcatgagaaattcggtgtgacagtccgtgcctgtctgactcagatgggggatatcaaatgtgatatccgcgactgggcactggcagagcaaaatccgtttttctgtcctgatgaacgtcagctggatgcgctggatgaattattgcgcggcctgaaaaaagagggagattccatcggtgcgaaagtcacggtagtggcggaaaacgtcccggcgggtctgggtgaaccggtctttgatcgtctggatgcggatctggctcatgcgctgatgagcatcaacgcggtgaaaggcgtcgaaatcggggacgggttcggtgtggttaacctcaaaggcagcgaaaaccgggatgaaatttatcagaccggctttaccggcaatcacgcgggcggcattctcggcggcatcagcagcggccagccaatcatcgcacatattgccctgaaaccgacatcatcgattaccgttcccggtaatacgctgaaccggcagggcgaagaggtggctatgatcaccaaagggcgtcatgacccctgtgtcgggatacgtgctgtgccgattgccgaagcaatgacagcgattgtgctgctcgatcaccttctgcgtcaccgcggacaatgtgcggatgtcacgccgccgttaccggcctggtcatgatttaaacagacgtcccgggtattgtgcccgggattttattggcaggtaaaaaatggaatggtttcagttcggtgttgaaatctatatattgctgttctttgttgcgctgattgccgggtttattgatgcgattgccggaggcggcggattactgacaatcccggcgctgctggctgtcggcgtaccgccggtgcaggcactggcgaccaacaaattacaggcggtcggcggctctttctctgccagtttctattttgtccggcgcaaagcggtggatcttgcggggcaacgggtgccgataatgatgacgctgattggcgcggttatcggctccgggctggtgcagtttgtgaacccggaattcctccgccagttgctgccgctgctggtgattgccatcggcctctacttcctgctgacaccctctatcggtgctgctgaccagaaacagcgcctgatgccgtttgctttcggctgtaccgccggtatcggcattggtttttatgacggtgttttcgggccgggcgcgggctctttctacgcactggcgtatgtgaccctggccggttttaacctggcgaaagccaccgctcacgccaaagtactgaactttgcctctaacgtcggttcactctcattctttattttcagcggtcatgttatctggctgatgggctttgccatgctgggcggacagcttatcggtgcccgcctcggtgcccgtatggtgctgagccgcggacaaaaactgatccggccgatgctggtaactgtctctttcctgatgagcatcaaactgatttatgacaatcacggcgatactatcagtacgtggctgtctcagcttttttaattttcattagtggttcatataatcaatgagtacacatcaatatcagcagttaattgagatttttgataacgaattttttgctgatttcaatacccgcctgattaaaggcgacgatgagccgatttatctgcctgcagatgatgaagcgccttataaccgtatcgtgtttgctcacggcttttatgccagtgctatccatgaaatatcgcactggtgcattgccgggaaagagcgcagaaagctggtggattttggttactggtattgtccggacggccgggatgcacaaacgcagtcagaatttgaggttgtcgaaataaaaccgcaggcgctggactggttattttgtcaggctgccggttatccgtttaacgtcagttgtgacaatcttaacggcgatttcgagcctgatcgcgtcaaattccggcgtattgtccacgggcaggtgatggagtatctggcacagaactcaatacccccgcgtgcagcaaggtttattaatgccctgcaatcgttctacaatacgccgccgctgactgcggaccaatttccatggccggaagatccgtttgcctgacaaacgattccggtgactgaactttaaggaacaaacatgcttgcggattatgaaacgcgtatcctcgcccagattgatgacatggtcgaacatgccacagacgatgaactgtttgcgggcggctatctgcagggacatctgaccctggcggtggcagaactggagcagtcgggtgatcactccgttgaggcgcttcacaaccgggtggaggagagtatccgtcaggcaatcagtgccggggaactgacaccgccggatcaggtgctggtgctggaaacctggaaacgactgctgcaaaccgcgcaggagcaggaatgacagccaaaccgcaataccgtatccgccaggcccgtccggcggacgccgcattgttaccggctgttgaatcctctgccggtgcgttatttgcgacagtgccgggttatgaatggatagcgcgcagtgaaggccattccgaaacggcattccgcaattatatcgccaatggcaatgcgtgggtggcagcggacagtcaggatcagccggccgggtttgtgctggtgtccaacctcggtaccgggatgcatattgatgagctttctgtctctgcggcgcatcagcgtcaggggctggggcgtcagctgattgagcgggtacagaatgtggcgattgcacgcggttgtgcgtcagttacgctgaccacattccgggatgtggcctggaaccggccttattatgagcatcttggttttgaggtctgtgatgtttcccgcgcaccggcacttgaggctgttatgcttaaagaggcagaatacgggctgcaattctgtgatcgctgttccatgatttaccggattttctgaaaaagtgaaatatctgaagtaatgagaaaaggtcgcactaatatgcgaccttttttatttatggtgaattaaatatctgactattaagatgtgagcagataataataaaagatcttgtgattgttacattaacggcgaaaatagtgccgtttttttatgtctcagcgatggatgttgttatcagattatagatttttctgttcaacagaatgatttttaatcattttccgtatatgcaatatgatgcttatttctgagattacagtctcttttgttgcgataaagtcaacaactacgtagatatgttgagtaaatagcatgaactattaacttgctattaacatttattgtgtcaaaatgtgttcgtccccacaaaacacaggtattgattatgtttgaattacaaccgaaaaacgcagcacaacaggctgtgactatttacacgaagatagcggttgctgcggtggtcttgctggcactgttattttctttctggtttaaacttgacggaatgagcgtcattgaaagagcagtcccttccatcggtatgattttatttaccggattaataatttttaatgccaaacgggaattagattcgctgtaccgttcagaggataaatgcgcgaaaagcgtggttgccctgaacgcctgacagaaacaggatcgcgtcacgcggactgataaatataaagaagagacgatcacggatcatcagcagcaatgctgatgatccttttttatgtcacattactgatacaaatcagcaccggtttcctgagcaatatagcggatagccgcctgtgctctgacactgttgcctgctttatccagcggcggggaatagaccgctacagcatatttccccggaaccacggccagaataccgccgccgaccccacttttcgccggaataccaacctgatacaaccaggtgccggaaccgtcatataacccggcaatagccatctctgccagtactttgccggtattctccgcactcagtaactgtttgccgttgtacggggacttaccgtgattggccagtaccgcccccatttttgccagatcaaccgttgtggcatccacagaacactgacgggtatagagatcaaccgcctcatccggattgccgtataacatgccgtaagactgcatcagccgcgccagtgcctggttgtgctgattggtttcggattcagagcggtacacttcatcgtttaccgtcagtttggtatcagcgtaagcttccatattctccataatctgctgccagcggtcgtccgggtttttagccttaatcagactgacggcgctgatagccccggcattgaccagcggattctgcgggcgatccggtcgcagttcaatcgccagcccggagttaaacggcaacccggtggcattggcgcccagtttcttcagaaccacctctgaaccctgctgatccatcaccattgcgagggtaaagacttttgacagggattccagcgggaacagcttatccttatctccggcgctgtagattttgccgtccaccgtggcaatcacaacggcgtaattatcggggctgtatttggcgagagccggaatataatccgccacgtcaccggatttttcgcttttgaatttctgatacgcctgctcagcaatcgtatcgtagcgaacagtattatcgggaatattattgttctttgcataagcagaggtaaaacaaaacagcgaaaaggttagggcgataactattttattcttcataatcttctccggttattatttccggatgaagcgtataggcgcactgacttttctgtaaattgatcattgagcaagagaaattgccgctgacaggcgaacagagccggtttttgtgagaatgaacacaaaatgacccgggtttgtggcggtgatcaataaagtctgctgatgaaatttcgtttaaccggcggaaaaaatatcaataatgtgatgaagaccagcccggtggccggtcaggggcggattatgatttttgcggcagcggacggcctttcagcaatttacggacatggaaacgggcgggatgaatggccgcgagtgtttcatcatccagcggaagagcctcaccgaaaatttgtgccgccagcacttcagccgccagcggggcggtgcataatccgcgtgaaccgagtgcggccagcaaaaacagctgaggcagatgcggaacactgcatacggtttcaggggacgatttttgttcatccagatgcgcataacgcgctgttaattcggcaaaatcaggaacatttccggccagcggcaggtgatcgcgtaatgtgcagcggatcccctgacgggattccccggcgctgatatccaccatctccggccagctgacatcaggcagcgatgtgagcagccgctgtttgttggcagcttgttcctcttcgcggtattccgtgcccaagtcattgcgctggtggctggcaccaatacagtgcagaccgtcagccggattcaccggggtcagataaccttcataacacagtacttttttcagcccggcaatcgccggtaccgatggcacatggctgacctggccgcgcaccggcgtgaccggcagcggggcagtctgcgggaactgtgtgatgcagtgaccgttggccagcaccaccacatccgcctctgctgtactgttgtccgcaaagcggagctgccagctctgttctgccgggatcaattctttcacctcacagcttaaatacagatgaagcccttctttctgtgccagcgctgcggtattgcgtaccagctcctgcgggcagagccagccgccctgcgggtaatgcaggccgtcaaaattgacatcggtcccggcaagttcagaaagctgttcccgtgacaggcgctgcaccatgtcatccggccatgcgacagatgaaatgttattgatttttttactgcttttttcgtgatacatcagttggatcacgccgcaccagtcatggtcgtatttcacgccttgagctgacagtgcatcatatgtacggcgggcaaacgggaatgcggcggtaaaaaagcgctcaagcgggtcatcgcggccggtcagcagcggataaagcgcgccctggcggttgccggaagcattgagcgccagagccgcatccgcgcaatataaagatacatccgcaccacggcgcagaagagcgagggcagagagacccccggctaccccgccgccaatgactgctatctnactccggctatcccgccgccaatgactgctatcttctgccgggcggcagccggttggcgatcaaaccacggtgtcacggacagtgccgcgtcacggggattcaccccagacaggcattcccgcttgtgcgcaaaacctttgcggcgctcaacgttaaacccggcctgctgcaaaccacggcggacaaacccggctgcggtaaaggtggcaaaggtaccgcccggttttgaaaaacgaatcatcaaatcaaacagcgactgctgccacatatccgggtttttggacggcgcaaaaccgtcgagaaaccaggcatcgatcttgttgtccagcgcgtgagtgagggaagggagcagttcattaacatctcccagccacaaatcgagggtaatttcaccaccggataactgaatacggtgacaaccgggtaatggctgcggccactgagcgcacagctgtaaggagaaatccgcgaactccggccagtggcggtgggcggcctgcaaatcagtcacggtcagcgggaatttttcaaaactgataaagtgcaggcgcttcagcggatgcgcgggattggcattccggaacgccaggaagctttgccacaacgtgagaaaattcagtccggtaccaaacccggtttctgcaacagtgcagaccggggtggtcatttgtgaaaatctgtccggaaaaccgtttccgttaagaaacacatagcgggtttccgccagtccgtcatcgttcgaaaaatagacgtcatcaaaatgttgcgaaacaggtgtaccctgttcattccaggttaaatgtgcagtttcaattgcggtttttttcacgttacggcctgaggattctgttcggttttccctgattttactctgctttgcgctgtactgccatgccggatgtgacacagcacaacatcagtatgtaaagatgcgaaaaaacgtctgatcggacttgttcagcttacaggtgtaagctaaagtagcgctaaaatcccgtactacttaaaatgacagaggtattaaatgaagcgtgcagtaatcaccggtctggggattatctcaagtatcggtaataaccgggaggaagtactggcttctttgagagaaggtcgttccgggatcacattctcagaagaatttaaagagatcggcatgcgcagccaggtttggggtaacgtcaaactggacaccgcgggtcttattgatcgtaaaactgcccgtttcatgagtgatgcttctatctatgcatatctttccatggaacaggccattgcagactccggtctgacagaagagcaggtatctcactaccgtaccggtgtggttgccggttcaggcggcggttccccgcgcactcaggctatcgcggctgacggcatgcgtgccaaaggtctgcgtggtgtcggtccttacctggtaccgcgtgcaatggcatctggtgtgtccgcaaacttagcgacaccgtttaaaattaaaggcgtgaactactcaatcagctctgcctgctccacctctgcacactgtatcggccacgcggtggaactgatccagctgggcaaacaggatgtggtgtttgccggcggcggtgaagaactgtgctgggaaatgagctgcgaatttgacgcaatgggcgcactgtccaccaaatacaacgaaacaccggacaaagcatcccgtacttatgatcagggccgtgacggcttcgtgatcgcaggcggcggcggtatggtcgtggtggaagagctggaacacgcgctggcacgtggtgcacatatttacggtgaagtggtcggttacggcgcgacatctgacggcgcggacatggttgctccgtccggtgaaggtgcggtccgctgcatgcagatggcgatgcacggcctggatacgccggttgactacatcaacacccacggtacatccacaccggtcggcgataccaaagagctggaagctatccgtgaagtcttcggtgaccataccccggcactgtcagcgaccaaagcgatgaccggtcactcactgggtgcggcaggtgttcacgaggctatctacagcctgctgatgctggagcacggttttatcgcgccgagtatcaacgtggaaaacctcgatgagaaagcggaaggtatggcgattatcaccgaaccgaccgaacgcaagctgacaactgtgatgtccaacagtttcggcttcggcggcaccaacgccacactggttatgcgcaaatatcagaactgattttgccctgttgatcagataaatgccccggtttaatcaccggggcattttcttttgcggcaaactctgtcagggtataacggtactgtttatccttttactgccacaggggtgatgaatgaaaaagctgactatcgcagagatgactgagccgcagaaaatccgtgtccgcacccggctggctcaggaacagaagaaactggggcgtccgctgaccaatgcggagcagaataaagtcaaagatcagattatcaccgaaatttccaaagaagtggatgccgctgccgctaaagtccgtgcacaaaaaagaaaggataaaatcaaacccggcggcggggaagaaacctttaactggtcagcgaaaacccatacgcggggattgcgctgagttacctgcactattctgactgccggaaatagtaatatttccggcagtagtcatttctggtcagtgggaatagtatatttccgcacatctgattcagaataatccacaggtcagatattgtactaatactatactatccttggtacagcgcgttcatgatttactgtggattatttaataacaaggagaatagttaaaatgtccgattttattatcagattgaataacggcaggaatctgaccagacaggaattcagactgacaccaaattattcagtcacattaaaaataagcggtttgcataaccgaaaacatttagaactgcaaaaaagtaacgaaagaatacgtttagatattaatgctgataacaaaaagttagagcaaacagtaaaagttacagcagtgagtgaaggggaaagtattgttacagcaaaaacagatggtattagccagtgtgatattcctgcagcaggtggtaaaatatcaaattgttttccaaagttgacttttattgtattacccacaatgtctgttcctgcagggttaacggtgaatcaaaaactattattgcaggttttactggcagaaacatcaacacctgaaaagggatattttaaccaggaaaaggccagagaggctatgtctctgatgcatgatgcactttataaccgaatcaactcgccggaatcccgttatcttgatgtaccggagagcggcgataaactgcaggggttaatttacaatggaaaggttataaatggttttaaagcaggtaatatcgactcgaatattcagaaaagaattaatcaactgataggttatgcaaatgatggcggagataatatggataaatacagaattttattatcagatgctatagacattgcaaaaaaagagaacattattatatcagaggacgtcatcggatggcgaacagatggccatggtcttggcggaggaagtgttgaagtatttaaaaaacttcaggggcaggtttttctgaaattaagtgatagctttaataaaaataaatgagcctgaacatgaaaaaaagcatactcatgatgctattattacttactgcagtttcaacagttaaagctgatacatggaaagaatcaggaaactggggggtatatgatagtaagccggaagtgaaatttaaaccacttgatattcctgtgtataaaaaatatttttcaagagcagcaaaatatctggtttcagtttccggagctaatgataaaacgaataaattttgtctgattggttataaatggaattcagatagtcgtgatgagagagtcaatgtcatctgggatggccactatttaattacctgggaaacaccagataactattctgatgattcaacgtatataaagtcactttctatgtccaggggaatgattaacctgaaagaaaatgttgttccttatagcgaaattggtgtgcacacagccctttggccggaagagggagtgaagcagataacggatgactgtttacataatggtaatctcgttgagattaaaccatttataaaagatacagataattaagtgttccgggcaataagatcatgcttagtctgttttgaataaagtctgtaatgcaggacagtgccggtattacagtatttatcactattaccggtaaagcgaaaggcagagactcatcactgcctttcactttttccggttatttctgaataccggcagaggggctattcccccgcaccacaccgctgcggctgtgtttttttcgttttgcggcggataatctgtgtcagtggtgtgcgcagacgctgcgccataatgaccccgatcagtaccacaccaccgccgataatatgatagctgtgcagctcttctttcaggaagacagcggcgataatggcggtcagtaccggtgccaggttcataaagatagaggcggcgtttgcacccaaacgggtgacgcccaggatccacagcagcggcgcaaaaatagaggctgcaatccccgcatacaataccagcccgatattatcgcggttcagtgtcacatcaccggcactgaggaataccgggatcagcagcagcacgccaaaaacaatctgcatatacagcgagtgaatgctcgacagcgggatagcccagcgcttggtcagcacgccgtagaaagcataagcgagaccggcgataaacatcagcatttcaccctgtcccagcccctgatgcagtaaatccgccggatgtcccttgctgataagccaggtcaggccgctcagggagagaattgtgccgagcacaataccgatggtcggtgcgatccgcagtaccgggatacttaacaccacggtcagcagcgggatcagcgaggtgataatccccataaaggtggcgctgacagtataagcggcgtagtacgccaggctctgatacagccccatgccgagaaaaccgaggataaacagtttccacgcgtgttgtttgatcaccgcacgctgctgccagattggcataatcaggaacggcgtcatcacggcgagtgccagtgcccagcggtaaaaggagatcgcgccgggggcgatggcaccggcggccagtttattcaccacggcattcacagaccagattaatacagccccgaggggtaaaagcaggtttttcattcttaaactcattttcattatcaggcaggtggtgtagtgtaatctgtcttaattattctatataacgatatcccgccaatttatagagaggatctgacaagatggcccgcaagtcagatatttcatcactgggtgtgaaagacccggtgacattaatctgccgtcatgaacagttttattcggaaacggaatttgctcttcatcatcatcccttcggccagttgttgtatgttgccagcggcgtgatggaaatgaccgttgaggggcagcgctatctggcgccggcggggttttgtatctggatcccgccgggaacggaacatgccagttataacaaagcctgcgcctctttcaaaattattgatatctcgccgcagtgggctccgcagttaccgcagatggcgtgtgtgatagagctgacgccggtgttcagtgccgtgatgcaggatttgttcggccgcaaagtccgtgaaccggaaactgacgcggacagacggctggcgctggtactgacggatcagctgctgctgtcgcgttgtcagccgacctatctgccggtcacggatgataaactgctggcaccggtactcagcgcgctggagaacgatccttctgataacacgtcactggcggagtgggcggcgcggcgctttacttcagagcggacattatcctgccgctgtcagcagaaactggggatgtccttcagcgaatggcgtcagcgcctgcgttttctgcgggcggtggcgttattacaggaaggccgcagtgtgcagaatgtcgcgctggatgtgggttacagctcatcatccgcctttattgccatgttttcccaactggccggtgtcacgccggaacggttccgtcatcagccttaattgctctctttagcaacaatcggtgttccgggcgtaggttttatcccgcagaagtggcaaaatagcggccatccgtttcaattccggttgtgccgccgcaccgacaggtctccgccggccgccgacagtatgaaggtgaagcccgtgaaaatcgttgtagatgagaatatgccttacgccgaaaccctgttttcccgtctcggggacgtggtggcggtgccgggacgtccgttaccggacggggtgctggatgatgctgacgcactgatggtgcgttctgtcacgaaagtgaatgcacagctgctggaaaataccccggtgaaattcactggtaccgcaaccgccggttttgaccatgtggataaagcctggctggcggagcagggaattggtttctcctcagcgccgggttgtaacgcaattgctgtggtggaatatgtcttttctgccctgatgctgctggcggagcgtgacagttttcagctgacagataaaaccgtcgggattatcggggccgggaatgtcggcggccgtctggcgaagcgtctggaagcactgggtgttaatattctcatctgtgacccgccgcgcgcggataacggtgatgccggggcattttatgatatcgataccctggtggcacaggctgatatcctgacattccataccccgctgaataaatccgggccgtacaccacactgcatctgatggatgaaacccgtctcagtgccatgaaagacaacggcattctgatcaacgccagccgtggtgcggtggtggataaccgggcgctgttatcggtactggccggcggcaaaccactgagtgtggtgctggatgtgtgggagccggagccggatctgtcaactgaactgctttcactggttgatatcggtacgccgcatattgccggttataccctggaaggcaaggcgcgtggtaccacgcaggtctttgaagcctttgcggaattcaccggacaaccacagcaggttgcgctgtcagaattgttaccggcaccggaattcggctgtatcacactgtcaggtaaagtaacgcaaagtattctcaaacgtttaatgcatctggtttatgatgtccgccgtgatgatgcggcattacgtgcggtggccggtgtgacgggtgagtttgataaactgcgtaagttttatcctgatcgccgcgagtggtcatcactgactgttatttgtgatgatgcacagagtgcggcgctgttgtctgacctgggtttcacggcagaataccgcgcataaaatcattttttcatcattctttttctgactgtaccgcgctgacgcggcgcagtctttgttccggagataactatgtcagaaggctggaatattgccgtattgggtgcgaccggtgctgtcggcagcgccgtggtgtcattactggaagagcgtgaatttccggtgggagagttatatttactggccggggagcgcagcgcgggagaatcggtgcgcatgaacggcaaaagccatctggttaccgaagcccgtgattttgactggtcacaggtgcagctggcctttttcatggccggtgcggaagccaccgctgcgtattatgaagcggcgacagacagcggctgtattgtgattgacagcagcggcctgtttgcgctggagcctgacgtgccgctggtggtgccgtcggtgaacccgcaggcactgagcgaataccgcaaccgtaacctgattgcgctggcagacagcaccgtcagccagttactgaccgctatccgtccgctggtggaaagcgccggattatcccgcatcaatctgaccaacctgttctctgtttcccgtttcgggaaaagtgcggtggaagagctggccggggagtgtgcaaaactcctcaacggcatcccgccggaagccggtcgtttcagcaaacagctggcgtttaaccttctgccgctgctgactgatgagcagggcagtgtgtcagaagagcgccgtatcgcggaagaaacccgcaaagtattacaggatgccggtctgccgatcagcgtgagctgtgtgcaatcccctgtgttctacggcaacgcgcagatcgtgcaactggaaacactgcgcccgctcggcagtgaggaagcccgtgatgaactggaacgggcagaggatattcagctctctgacgagcaggagttcccgactcaggtcacggatgcttccggcaatcatctgctgaatattggttgtctgcgtaatgattacggtattccggaaattctgcatttctggtcagtggcggataacgtacagtttggcggcgcactgatggcagtcgaaattgccgagcgtctgacgcaggagcagttttactgatgtcagaggtgattttaccggcggaagagggtaaaaccactatcgcgctgggtattgaatatgatggcagccgctattacggctggcagcgtcagtcagaagtcgcgagtgtgcagggctgtctggaaaaagccctgtcaaaagtggccgcagagccggtcccggttttctgtgcgggccggaccgatgccggggtgcatgccaccggccaggtggtgcatttccatacggcagctgtccggaaagatgccgcctggacgatgggcgtaaacacccatctgccgccggatatcgcggtacgctgggtcaaaaccgtgccggagagtttccacgcccggttcagtgccacagcacggcgttaccgctatgtgattttcaatcaccgctttcgcccggctatcctcagtaaaggtgtgacccactttcattatccgctggatgaaaagcggatgcatgaagcggcacagagcctgctgggggagaatgatttttcctctttccgcgcggcgcagtgtcagtcgagaagcccgtggcgtaacgtgatgcatgtgaacgtcacccgtcaggggcagtatgtgattgtggatatcaaagccaatgcttttgtgcatcatatggtgcgcaatatcaccggcgctctgctggaggtcggctgcggtaatttaccggttagtcgtgtcgcggaactgctggcactgaaagaccggacacaggcgccggcgacagcaccggcggaaggtttgtatctggtttcagtggattacccggaagaatttgccctgccgtcaccggcgatggggccgcttttcctggcagattaatttattggccggataagcagaaagctgcatccggcggggtgaaatatggaatatattaaatttctgatcgattttattctgcacattgatttgcatatgcaggagatggtggcggcgtacggaatctgggtttatgcgattttattcctgatcctgttctgtgagaccggtcttgtggtcacgccgttcctgccgggagactcgctgctgtttgtggccgggacactggcggcactgccgaccaacgacctgaatattcacattatggtactgctgatgattgcagcggcaattatcggtgatgcggttaactatactatcgggcactttttcggggagcggcttttccgcaatccggattcaaaaatcttccgtcagagctatctgcgcaagacccatgcgttcttcgaaactcatggcggtaaagcgatcattctggcgcgatttgttccgatcgtgcggacatttgccccgtttgttgccggtatgagtaaaatgtcttaccgccactttgcgatgtttaacgttatcggtgccattgtatgggtggtattatttgcctatgcagggtatatcttcggggaaaccgagattgtacagaagaacttgaaattacttatcgtggcgattattttcatttctatattacccggtattatcgaggtatggcgtcaccgccgtgcggcgaaaaaagcacagaaacgtgatgacgcctgagtggtttgagcagttttttatccacagtgcataagcaatgtggtttaatggcagataataattacactggctgagccagatttcagacggaaaggtcattaatgagctggattgaaaaaattctgaataagaccccaatgaaccagacacgcaaggcgagcattcctgaaggtgtctggacgaagtgcgacagttgtggtcaggtactgtaccgccaggaggtggaacgtaatcttgaggtgtgtccgaaatgtgatcatcacatgcggatccctgcacgtgcgcgcctgctgacgtttctggatgaaggcagcaccacggaactgggaactgatctggagccgaaagacgtcctgaaattccgtgattccaaaaaatacaaagacagactggtgtctgcccagaaaacaaccggggaaaaagaagccctgattgcgatgaaaggcaccctgaaaaccatgccggttgtcgcggcggcgtttgaatttgccttcatcggcggttcaatgtcctctgtggtcggcgcacggtttgtccgcgcggtcgaacaggcgctggaagataactgcccgctggtctgcttctccgcaagcggcggtgcacgtatgcaggaagcgctgatgtcgctgatgcagatggccaaaaccagtgcggcgctggctaaaatgcaggagcgcggtctgccgtatatctctgtgctgactgacccgaccatgggtggtgtctccgcgagtctggctatgctgggtgatatcaatatcgccgagccgaaagccctgatcggttttgccggtccgcgtgttatcgagcagactgtccgtgagaaattaccgccgggattccagcgcagtgagttcctgattgaaaaaggggcgatcgatatgattgtccgccgcccggaaatgcgtgataccgtcgcggaaattctgtcaaaactgacgaactatcagttcccgcaggaaggtgaaatcattgaaatcctgaccgcggatgaacctgataccgacttatcttccgaaacagagactgatgtcaaaaaacacgatgtctgataagcgagaaagaccgacagccgcgtcatcgatgatgacgtggctttcttatctgggtgatctgcatacgcaggttattgatatgggactggaacgtgtcggtgcggtggcggatatcatgaatctgcgctatcccgccccgaaagtcattaccgtttccgggaccaacggcaaaggcaccacctgccacacgctcgaatccatcctgctggccgcagggctgcgggtcggggtgtacagttccccgcatctggtgaactacaccgaacgggtgcggattcagggacaaaacccgccggaagcggatttctgccgtgtctttgcggatattgatgcgcagcgcggcgatatcacactgacctattttgaagcgggcacactggctgcactgcagctgttccgcgaagccaatcttgatgtggtgattctggaagtcggcctcggcgggcgtctggatgccaccaatatcgtcgattctcatattacggctatcaccagtatcgcgctggatcacaccgactggctcggcgctgaccgcgagcatatcgcccgtgagaaagccgggattttccgcccgcactgtgtggcggtgatcggtgagccggacgcgccttatactatcgccgacgtggcaaacaagctggaaacttcgctgttctgccgtgccgatgactggtcttacaaagagcagggcgatcactggacatggcagtgtgaggatgaaaccctcgacaatctgccgctgccgaatgtgccgctggcaaatgccgcgactgcccttgcggtgatccacaatctgcgtcaggtgaaagacaaaaccggccgcgccatcacccgtgaagcgattgataccgggctgcgtcaggcacaactgccgggccgtttccagattgtctcacaacaaccgctgaccgtgctggatgtggcgcataacccgcatgccgccggttatctggtctcaaaactggcacagttaccgcgtactgcgcagagccgtgtccgtgctgtgatcggtatgctgggcgacaaagatatcaaaggcaccctggcggtgctgggtgagcaggtgacagactggtatgtcgcgccgctgacggaactgcgcggagccccggcagaacagctggcggagcatctgaccaacccgcggcagtttgccgatgtggaaagtgcctgggaacaggcgcgccgtgatgcctcaccggaggatatcgtggtggtgtgcgggtcattccacacagtggctcatgttatggatgttttagcgaaggaaggtgcgggtggccagtaaatttcagaatcgcttagtcggaaccattatcctggtggcggtgggtgtgattgtcctgccggtgctgctggacggcgataagaaatataacgaagaccagttcgcagccatcccgcttatcccgaaagaaggggagcaggatgagattgatgcggtgaatccgatcaatcagactatgccgacgatgccgtcagaaggggcatccagcgccatgattaccgaagcggcacaaaccgggacggaagaagcccctgcggaagcatctgcgggcggcagtaccacctccaatgtgccgccgggggcggatccgctgccgccggtggtgattccggataaacaaccgcagccgaaaccggaacctaagcctgaaccaaaaccggtgcctgagccggaaccaaaacctgagccgaaaccggaacctaagccggaaaaagtgccgcagggacaggcttatgttgtgcaactgggtgcgttatccaatgcccgtaaggtggaggagatagttgccacactgcggttatccggttatcaggtgtataccgtgccgcgcggcaaactgacgctgattatggtcgggccgtcagcctcgcaggcagagctgaagtcctcgctgggggaactgagacagcttaccgggctggatggccgggtacagtcttataaaccgtagcgaatttaaggaattagcaatatccgttaataaaatcagttaactctttgcggcgattataattttttatttcgccgcaatttattttcggatggagcaaaaatccgttacgcaaacgttttcgttttctgttagaatgcgcccgtcactgatgccggggcatcaatttggatagtgatatggtttggattgattacgcaattattgcaattattgctttctcggcattagtcagcctggttcgtggtttcgttcgcgaagccttatcgttagtgacctgggtctgtgcgttttatgtggccagcgagtttttcccgctgctggcggactattttacgcgcttcgatgacccgctggtccgcaacgggatcgccattgcgattttatttgttgcgacactgattgtcggctcggtgattaaccatgttatcggttcactggttcagcggacaggcttatcaggcacagatcgtgttctcggggtttgttttggtgctctgcgcggggtgctgatcgtggcggcaattttgttcttcctcgacagctttacgcagatgagtcagagcagcgactggcagcagtcacaactcatcccccaattcagtcatgttatcaggtggttctttgactacctccagaatgcgtcaagtttcctgccggagaattttccttctccgcccggctgatgaggaaaaaactacatgtgtggtattgttggtatcgttggttttacgcaagtcaatcaatcaatttatgacgcgctcacggtgttacagcaccggggccaggatgcagccggtatcgcaaccattgacagtaacaatggtttccggctccgtaaagccaacggactggtgaaagatgttttcgaaacccgccatatgctgcgtttgcagggcacactcgggattggccatgtccgctacccgaccgcaggcagctccagtgcatcggaagcacagccgttttatgtcaattcaccgttcggtatcactctggcgcataacggcaatctgaccaatgcgcacacgctgaaacatcagctgtttgaaacagcccgccgtcatgttaataccacctccgattctgaaatcctgctcaacgtgctggcgtatgagctggatcgctttgatgctcacccgctggagccggacaatatttttgccgcagtcagcgcgatgcacaccaaaatccgtggcgcatatgcctgtgtggcactgattatcggccacggcctgctggcgttccgtgacccgaacggcatccgtccgctggtgctcggcaagcgcactctggttgatggccgcgaagagtatatggtcgcgtctgaaagtgttgcactggataccctcggttttgaatatctgcgggatgtggcgccgggtgaagcggtgtatatcacggaaaccgggcagctctacacccgccagtgtgcggcgaatccgtcactgacaccgtgtctgttcgagtttgtctatttcgcccgtccggattccgttatcgataaagtctctgtctataacgcccgtctgcgcatggggcagaaactcggtgcgaaaattgcccgcgagtgggaagatctggatatcgatgtggtgatcccgattccggaaacctcaatggacagtgcgctggaaatcgctcatatgctgaacaagccgtaccgccaggggtttgtgaaaaaccgctatgtgggacgcacttttatcatgccgggccagcaggagcggaaaaaatctgtccgccgcaaactcaatgccaaccgcaccgaattcaaagggaaaaatgtgctgctggtggatgattccattgtgcgcggcaccacgtcagagcagattgtggaactggcacgggaagccggggcgaagaaagtctatttcgcttctgcggcacctgaagtgcgtttcccgaatgtctacggcatcgatatgcctaatgccaacgagttaattgcgcatggccgtgaagcggatgaaatctgccgcctgattggtgcggatgccctgattttccaggatctgagtgaccttatcgatgcggtgcgtgaagagaatccggatatccggggtcttgaggcatcggtgtttgatggtatctatgtcaccaaagatatcgatcaggattatctcgactatgtggaaaacttacgtaaggatgatgaattaaagttgcgggatcataacgaaattgagaaccttgagatatataatgagggttaatctcttttttgtcaggtgatgttatgaaaaaactgattgtggggctgaccggcgcaagtggtgctgtctatggtgtgcggctgctggaggtcctgcaaacggtgccggaagtggaaacccatctgattgtcagtcaggcggcccggcagacactggcgctggaaacggcgtacagtctgcgggatgtgcaggcactggcggatgtggtacatgatgagcgtgatatcgccgcctgtatatcttccggctctgtcagaacactggggatggttatcctgccctgttcggtgaaaaccctgtcagggattgttcacagttatacggacaccctggtgacccgcgcggcggatgtggtgctcaaggaagggcgcaaactggtgctgggcgttcgtgaaacgccgctgcatctgggacatctgcggctgatgacacaggcggcggaaatcggcgcggtgattatgccgccgatgcctgcgttttatcatcagccggaaaccgtgcaggatattattgaccagacagtcaaccgtgtactcgatcagtttgatattgtattaccggaagatttatttacccgctggagcggggcgaaaaatccccgcaccgtacagcagtaatctgaatcacccggccgcttgtttccggccgggccctgcattaatagtccgccggactgtccagtaaatcccgcagtgcttcttccagattaataaactgacagccgaacccggcttcctccagtcgtttcggcagggcattctggccgcccagcgccagtactgcagcttctcccatcagccccttcaccacgaatgccggaacacgcagcagatgcggacggtgcaggatttgcgccagtaccgctgcaaactgctcattatgggacggataaggcgcggtcatattgaacgggccgttctgtgcgggatcgtcgagcagaaacagaatggcgctgaccatgtcactgatatggatccacggcatatactgacggccgttaccaatagggccgccaagaccggcgcggtacaccggcagcagtttcgccagcgcgccgccttccggggagagcacaatcccggtgcgcagcagacagacccgggttttctcactctgtgctttcatcgccagggattcccagcggtcgcacagagtgtgggtgaattcctgattcggttcgtcatcctccgtcaccacgctctgcccctgatcaccgtaccagcccacggcagagccggagagaaataccgccggcggcgtttcactggcattgataagttcactgagccgttcggttatctgccagcggctttcacacaacagctttttctgctcttcactccagcgtttatccgcgataggctcaccggcgaggttaatcaccgcatcgatgtcgttcagatgtgttatatcattgagtgagttaaggttttctgcggctgagcaaaaacgggaatagactttctgcggtgagcggctcagaaccaccacctgatatttccgggcaatcagtgcctgcaccagcggggtgccgataagcccggtgccgcctgtgatcagaatacgcatagatgctccttctgccggtaggtttctctgactatagcagtttttgccgccgggggatgtgatcggcaagaaagaaaaacaatcatagaaccgctatcaattcttgatatactgattcaatgaccataatggcacactatcattattagtttggtatataaaagcggtataaagcagcggcccgcagattaaccgcgtgtgtcactgaaaaaacagaaacagcatccgtaatgctgataaaaaagaaaaggttagaggatggaacaagatagcgctatcgagtgggtggacgtggtcgatgagaataatgatgtcatcggccaggcgacccgcgagcagatgcgggcggaaaacctgcgtcaccgggcaacctacatcgttgtgcatgacggcatgggaaaaattcttgtccagcgccggactgaacacaaagacttctgcccgggtctgctggatgccactgccggcggcgtggtgcagcagggcgagctgatgctcgattctgcccggcgcgaagcagaggaagaactcgggatcgccggtgtgccgtttgccgaacacggtctgttttattatgaagaaccggtctgccgtgtctggggcgggttattcagctgtgtgacacacgggccgttcgcgcttcaggaaagtgaagtatcggaagtcacctggctgaccccggcagaaattactgcccgctgtgacgaatttacggccgattcactgaaagcactctccctctggctgacccggaataatcagaattataccccggcagagcggcagaagccggttgcaacgcctgaagctgaaatgagcagcgacagcgaataaaaaaagaataaaaaccggagaagcctgcaatatgcaggcttttttatatttaaaatagggtgaaataaaacgcaggcagtaaatatatcggtaaaatagaatatcatcagagacagttcagtataatttgtgttattccggtttctggctttaatcattttcctgtagaatgccgttctgaatacagataataattccaaaccataaaaactttcgttaacagcatgaatcacaatgattttatgtaattattcttatgctttattaaagaaatattaaataacaaagcccggttaataagaattatccggaaataaacggaagataataaaatacaacctgaacgagaataatgatgagaaataaattagcaggatggctgttgttattaccactgctgctcaccgcatggggtgcatttcagtattggcgcatcagcgatgaatatcaggcttaccagtatattatgtcagaaaaagcggagcttcagcgtctgattgcggaagatccgaatacacagattacctacgatgacggggaaaccgtatctgccggtcagcaactgggcatgattaaccgtgatctgaataaatacagcagcgaaattgccatgattctggccggggcgggtgtcagcctgggaactgtcgccaccgggattttatcactgctgtttggcgcaggggcgatttatctctgcatcagcagcggccgggcggcccggcgctcccgcgatacgctgctgaacgtctttgcccgctgccgcaaaatgctgccgtttatcctgaccgggcagatgacgctggtcggcctgagcatcatttgcgtgatggcgtatgaagcgctgtggttcgccggtaatttcgtgctgagcggcggcggtgcgaagatcatgatctttattctgatcagtatcctgctgattatctggtacatcatcaaagggctgtttaagctgcgcaagagctttgccatgttccgcagcgaaccgtcagatgtgacagggcatgccgtcagccgggaggaagccccggggctgtggcagtgggtggatgagattgccgcgaaagtcggcacaccgtcgccggatcatattgttgttggtatgacagagtgtttttatgtgacatcccacagtatcagcctgaatgaaaatcagctgattgaagggaaaacgttgtacttcccgctgctctattccgcactgctcaatcgtgaggaagccagtgcggttatcggacacgaactggggcatttcaccggcgaagataccacctacagtctgaactttgcgccgatctatgccggaatgagccacagtatttcgctggtggccaacgaagtgcaggattactacagtaaagtgattatgagcccgtcggtatatctcgggatcttcttccttgagcagtttgatttcgctgtcagtcactggagccgtatccgtgagctggaagcggataaagcgggggcatcggtcagctcaccggcggcggtggcgtcgtcactgctgcgtatctctgcagtcagtgaagtgatttcggaaaccctgggtgagttgtatgaaggcactctgaaaacggatgatttactgcctgtggtgatggcgcgcctgcgtgagcgtggtgtgccggaagccggacagttcctgaatgaggcaaccagtcacccgagtgacacgcatccgcagacccgtacccgtatcgaagcactgtctcaggatctcagtgatgagctgctggccgacgcttcccgtgaagtgcagtcggatgattacggcaatattgcagatctgttcacagatgccaaagcgatttccatgatgctgacggcgtcactctccggcatggtcgcagagtacaccacacagcggacagaagcactggaaacgatactgcatgaatctgacgcggcagatgaagtgatcatcaccgagcggcggaagatgttccggatgatgtttatctttggtctggtggttgcggccgggatggggattgccacggtgaaactcggtgcggaagatctggtagcttccggtgcggttcatggcttctggctgttactgttgttctggggtgtggcctttatgtaccgagacagaggcaaagcgccgctgtttgcgttccgtcacgggcaactggtcagtgaaaagctgacacagccgtatccgctgcactatatcgttgattatgacatcgcggaaacttccggtgtggcgacactcacactgcatgtggctgatggtgcaccggcaccgggcatggcggtaaataaccgtttctttaaatacgatgccaaaaagcaaaaactgatgattgtgatggccggtgtccggatctggcagggaaaatcattatctctgcaggatttatcagaactggtacatggtcagttgcagacggcacatgtgaagcacgagctgcggcagtaatttttctgctgaaatacagggaaccgccgcaaggcggtttttttttgacaggatgcataaaaaaatcccggcggggaaacccggccgggattatggtctgtcacttttcagtcagcagaacttattttttcttcgcttcgtcctgcgctgcctgaatagcagtcagtgcgatggtgtatgcgatatcatcaactaacgcaccacgggacaggtcgttaaccggcttgcgcataccctgcagcattggtccgatagagaccaggtctgctgaacgctgaaccgctttgtaagtggtgttaccggtgttcaggtcagggaagatgaagacgtttgctttacctgcaaccggagagttcggtgctttggttttcgcaacgtcagccatcacggcggcgtcgtactgtaacggaccgtcgatgcacaggtcaggacgtttttcctgagcaatgcgggttgcttcgcggactttctcaacatcgtcaccctggccggaggtcccggtagagtaagagatcatcgcaacacgcgggtcgataccgaatgctttcacagagtcagcagactgaattgcgatttctgccagctgttcagggttcggatccgggttgatcgcgcagtcaccgtagaccagcacttcttcaggcatcagcatgaagaacacagaagataccagtgagctgcccggtgcagttttgattaactgtaacggcggacgaatggtgttcgcagtggtgtgaaccgcaccggaaaccagaccgtcaactttatcctgctccagcatcattgtacccagtacaacgttgtcctgtaactgctcgcgggcaacgacttcggtcatgcctttgtttttacgcagttcaaccagacgcggaacatacagctcgcggatgtcagccgggttaaccagctcgataccggtgcccagagtcacgccctgtgcagctgctacgcggcggatttcttccgggtcgcctaacagtacgcaggtcgccagaccacgttcagcacagatagcggcggctttgatagtacgcggctcatcaccttcaggcagaacaacgcgttttttcgctttgcgtgccagttcagttaacaggtaacggaatgccggtggtgacagacggttcggacgctctgaatccgcaaccagggaatcgatccatttggtatcgatgtggcttgccacgtagttctgaaccagttcgatgcgctcacggtcatcagcagggacttccaggctgaagctttgcaggttcagcgaggtctgccaggtgttggtgttcacagtgaagattggcaggccggtttcgaacgcacggtcgcacagtttagcgatgctgtcgtcgatttcaaaaccgccggtcagcaggatcgcaccgatttccacgccgttcatcgctgccaggcaggcagaaaccagcacgtcaggacggtcagcagaggttaccagcagagaacccggacggaagtgctccagcatatgaggaatgctgcgtgcacagaaagtcacagatttcacacggcgggttttgatgtcgccttcgttgatgattttcgcgcccaggtggttcgccatgtcgattgcacgggtggcaatcagttcgaagttccacggtacactgccgacaaccggcagaggcagggatttcagatcatccgcgctcaggtgagcgatagtcgctttggatgaatcatcaaagatttcagacagatcaggacgggtacggccctgctcatcaaccggagcgttaactttgttaacgatcacgccggcgatgttggtgttcttgtgaccaccgaactcattgcggatcagttccagacgctctttgatttccgctgcggtgtcattgcccggtgctgtcacgaatacgatttccgcacccagagtctgggcgatatcgtagttcagggactgagcatgcgggtagttgcgggtcggtaccaggccttcgatcaggatcacttccgcaccctgagtatgctcgtggtaacgggcaacgatttcttccatcagaatatctttctgattggtggtcagcatggtttccacataatccatatccagcggctctgccatcttcagggaagagtgagcacgtaagatctgggtggtctgatcttcaatacctgcacggcgcggctgtgcaaccggtttgaagaaactcaggctgacgcctttttgttccattgagcggacaaccccgaggctgacgctgcttaagccgacactggtgccggtaggaatgaggataatagtacgggacacatgaacctcttattttttcacaattcggtgttcaaaataaatccgccggcgggggccggcggagagcaaagattatgcagtcagacgggctgcatcctgtgcgatgactaattcttcgttagtcgggatcaccagggcaatgctgctgtcgtcagtggtgattttgcctgcgttaccgaagcgggcagccaggttgcgttcgtgatccagtttgaagcccagcagagccagtttctccagagtgtgttcacgaaccatcgctgcgttttcaccgataccgccggtgaagatgatcgcatccagacggccttccatcagggttgcataaccaccgacgtatttcgccagacggtggcagaatacgttcattgcacgggtcgcatcagcttgtttaccgtagttttcttcaacataacggcagtcgctggtgacttcagtcagaccctgcaggccggattctttggtcagcattttgttgatttcttcaacgctcatgcccattgaatcatgcaggtggaaaatgatagccgggtcgatatcaccggaacgggtacccatgaccagaccttccagcggagtcagacccatagaggtgtccacgcactcgccgttaacgatagctgcaacagaaccaccgttgcctaagtggcaggtgatcacgttcagttcttcaaccggtttattcagcattttagctgcttcacggctgacgaagtagtggcttgtaccgtggaaaccatagcggcggataccgtggtctttgtacaggctgtacggcagggcatacaggtaagcttcttcaggcatggtctgatggaaagcggtatcgaaaacaccaacgtttttatcagccaggtgagggaaggctttcagtgcttcttccacgcctaacaggttcgccgggttgtgcagaggagcaaaggcagagcactcttccattgctttgataacttcgtcagtgacgataacagagtgagcaaatttctcaccgccgtgaaccagacggtggccgatgcagccgatctgtgcggacagctcaggtttgtcgcccatgatatctttcacgatgaaacgcagtgcttcgctgtgagcagcgcccgcgcctaattgtgcttcgtgtttagcaccatccattttccacttgatacgtgcttccggcaggttaaagcattctgccagacccgtcagatattcatcaccagttgtagggtcaatgatcgcaaatttcagtgaagaactaccgcagttaagtaccagtaccagcttacttgacatggaattacctataatcttgttgtggataagtcttatgtattaagacagtggttaaaacgtaatctaactaagcgtagcgcaatatttcagcgccgttcatgattaacatcatgcaatttttatattgaacgataaatcatcgctgcaatctgttgtctgacgcctgatggcgtaaaaacacacattttgcccttgaaaaaggcggcatcagacaaaataattaactcaggattatttcaccgtgattaaacgggcgtagcatacccgcagatgacagcaatttcaaaatatacttaatcctacaaaaatattttgactgaatgtagccatattttaattattatgttttttattgattgaggtcataatgcctgataatacaccggcaaaaccgggtctgttccgcgcactgcgtctcggcaaacgttacgccgccacctggccggccgtgaaacagctcgccccggttttcccggagaatcgtgtcataaaatccacacagttcggtatccgttttatgccgccgctgtcggtgtttaccctgacatggcagatagccctcggcggggcgttaggtcccgcagtcgccaccgcactgtttgcctgctcgctgccgctgcaggggctgtggtggctgggacggcgcgccgccacgcctttaccggccgggctgctcagctggttttacgaaatccgcgcaaaatttgccgaagccgggattgcgattgcgccggttgagggcacaccggattatatggcactggccgagttactgaaacgcgcttttaagcagctggataactcttttctggatgacctgtaagtacggctgttttccgcccggttatgcgggcggaagaatcccttcctttattaatcgattcagcttttgtaaccctctgttttttctctccgtataattacccgggcgaaattccccgctgagatcaaaaaaggtgtgtatttcactatcttatagatttgagtaatgcgatgattctgaccataccccggattactttttcaggagatacaccatggaaatgaccaacgcacaacgccttatcctctctaaccagtataaaatgatggctatgctggatccggataatgccgagcgctaccgccgccagcagactattattgagcgcggcttcgggctgcagatgcgcgagctggatcgcgatttcggcgagttgccggaagaaatctgccgtcgtgtgattgatatgatggaaatgtaccacgcactgcgtatctccttcgataacctgaaagaagcaaaagatatcgacccgcgccgtatccacttcttaggttttgatgcggcgactgaagcacgttatttaagttatgtgcgttttctggtaaatacggaagggcgttatacccactttgacagcggcagccacggctttaactcccagacgccgatgtgggataaatatgtccgtatgctcggtgcatggcataactgcccgcgtcagtatcacctgagtgaagtggaaattaatcagatccttaacgcataatattccggtatccgtaacggcgaggcacgcatggcactgactgcaaaaggttttttgtttgatctggacggcacactggccgattccctgcatgtggtggagcgtgcctggctggcgtttgcccgccgtatcggtgcggatgaggatgaagtaaaacattttattcacggcaaaccggcggttgagtccatccgccattttctgccggatgcggatgagaatgaaattgccgcgcaactggcgtgggtgacagagcaggagatcagggagagtgatcaggtcacggatctgcccggtgcgcaggtactgctggcgcgtctgacctcccttgatattccgtgggcaatagtcacctccggttctgtggctattgcccgtccgcggcacagtgcggcaaatctgccggagccggatgcctgggtgacggcggataatatcacccgcggcaaaccggatccgcagccctatctgctgggcgcggaaaagctggggctggcgccgcgcgactgttttgtgtttgaggatgccaccgccggtctgctctccgggctggatgccggttgtcaggtaattgccgtgcatgttcctgccggaacaccgcgcacggatgaactggctatgcgggtggattcactgacagaaattgaggttgagaaagcggcggacggtacggtaacactgacccgccgtcccggctgacagccggaacaccgctgcacagcaccgatcagacgatgagggaaaacgggctgtgcgttaacaaaaacgatgagacaggatgttcgctgtccgggcattgacgaaagaggacgttggtgaatacggaactcgtgtgggtgctgaccctgctgtttatcgccattgttttatttaccaccaacaaagtccggatggatgttgtggcgttgctggtgatcaccgctttcgtactgagcggtacgctgacggttaatgaggccgtcgccggtttcagtgatcccaatattctgctgatcgccgccctgtttgtgatcggggaagggctggtgcgtaccggggttgcctatcagatgggtgactggctggtgcgggtggccggttccggggaaacccgtctgctggt

SEQ ID NO: 7 - DNA, 105190 bp, unknown
  Altogen 322075 strain
  misc_feature (36729)..(36729): n is a, c, g, or t
  misc_feature (52832)..(52853): n is a, c, g, or t
  misc_feature (98591)..(98632): n is a, c, g, or t
  misc_feature (104386)..(104478): n is a, c, g, or t
tcgcaggccacggatcagtggctgaaaaaaaccgagccattcgaccgcacctggcagacattgtcacaactgcgtccgctggttgtggccggtgtcagcctggcttccgtctttgctgtccgccatccgaaaaaactcatccgctggggacaacgcgccctgggtctgtggggggttttccgtacacttcagagcagttttccccgtaatcagcagaaataaccctgcctgccccggattcaaaatttttgatgttgtttattaagaattcttgctaacaatccttctcattcgcacttactattatcccaacgaaacggattggcatatcgtgccatttaaacaaaagaatatgtgactcaatcgtcatatttactattcagtattgttgagctaataaggatctcacaatgaacaactacgctattttagtcgcacgtatcatgatgcctgtcttatttattgtggccggatacggtaaattaggggatgcttatgcaggaactcagcaatatatgcaggcaatgggtgttccgggagcattgctgccgttaaccattctgcttgaactgggcggcgggctggccatcctgtttggtttcttaacccgcacaaccgcgattttcacttttggttttactgtgctgactgccctgctgttccacagcaattttgcggaaggtgccaaccagttaatgtttatgaaaaactttaccattgcaggcggttatttactgctggctgttaccggcccgggtaaattcagtatcgattatttactgaaaaagaaatggtaattgcattcaggcaaagccacacagcaatataataaataatactattgtgaaacatccgctccggcggatgtttctgtttccgcctctatcactttaccgtcacgggtaaaaaatgtcaggtcggataatggcttattgaacagatattcataatccagtaatgccccgcgaatatccgaaaatcctcttttctgataggcaatacagggatacagaccaaaccagttatctttggccatccgctcattccagacaacatcgatacttttgcgttcacttggttcgatatcggctgtaatccgctgaacagagtcattgaaagtatgatacagcgtttccgcataaccccggttaacaatgtaggcatttgtacaatatgaaaatttaagactgagagaatatatttccggctgatgatcatagacgaaatagtaattcccgcccagtaacgccacatcccagtccttttcctgcagagaagataaaaatatattcgcctgacggatatgatcatcatcactataaaaactattatcatcctcgacaaccaataccggtccccagccattgtccatgatcattttcatcacagcagcatgagaaagcgcacagcccagaaatccgggcgttttttcaatcgcatcgaagcggataattttatgatgcggaatttcgatctcttccagttcatccagaatatcgtccctgcgatccggccgggattcgagattgatataaatgactttttcaataaagctatgatcgagtgcgaaattctcatccgacataaaccgcttcagatccacgttgcctcctgcaaatacactgatgacataccttttattaccggtgaatatccacagcatgctaacggataaatatcaccggtcaatcgctgttgttcttattattgattaacgcatttcccggcagacacggcaaccgccctccggcacgcaaaaaaatacctgccgcggataaccgggcaggtatctgatggtgatcgccaataattattttccgctgaacaacttcggaatttcccgcagacaccaggctttggcctcccccatgctgtcgcggcgccacgccataatcacattggtttcatggctgtattcggagccgatcactttcaggcggccttcctgaatatctttttccaccagcgggtacggcatgctcgccacacccagaccggcaagcagggcgcgacgtttatcatcaatagagctgaccgtcaggcgctgttgtttatccagcagtaacaccgtcagtaccggacgttcccgggcggtatccgccacggcaatcccgcggtatttcacccgggtggtatcagataacggttccggctctttgtggatcgggtgatccggtgccgccacatacacattcaccacggaatagagcgggcgggagttgatttcagaggaagtgcggaaatgcatatccggcgcaatcacaatatcggcgcgcccggtttccagccgctcccaggcaccggcaagcacttcggtggccagggtcagctgagtggtggatttctgtgccagtttgtccaccagcgggaacagcgaggccgtcgggatcagtgcctcacagacgatggtcagatgcggctcccagcctcttgccagtgcttccgcatcactggtcagtttatccgccgcttccagcagcaggcggccgcgctccagcagcatccgcccgacattagtgaattttgtccggtgacccgagcggtcaaacagaacaacatccagctcttcttccagtttctgcatggtatagctcagggcggacggtacacgccccagttcttccgccgccgccgcaaaacttccccggcggtcgatggcatccatcacgcgcaatgattccagcgttaacgctttgtctttactcatcattatctcagtcagaaattttgaatgtcgccaccagattaactggctaacaattcagcgtccagccctttattatttcaccatgttgaataacaggcagaccattatgattatacacagaaccgccggacaggccgggtccgccgactatggctggttacaggcgaaatatgctttctctttcggacactattttgaccccggatttatggggtacggcccgctgaaagcactgaatcaggaggtactggctcccggtgccggtttccagcccaaatcctatcccgatgtggatattgtaaacctgatcctcagagggaagcacgatattcgtgataatgacggactgtatctggagagcagacaggatgagtgcctgtttttctcaccgcgcagggatgtcagttacactgaaaccaatccctgtgaggcatcaccgctgacccggattcagatttggctgaaagctgcacgcggcagcctgcgcggcagttcacaaaaactgatgctgacacagcagccggtacagctgattgcctcgccggacggcgaaaacggcagtcttgatttacagcagggggtgcggatttcccatatcctgctccctgccggagagtccctgacactgccgctgtacggcaaacgggcattctatcagtcggttcacggcacggtgacagcggatgacgggcaaaaacagggaataattgagtgcggcgacggcgcatttattcaggacagccgggaagtgacctttcaggcaaaaacgccctgccgggcactgctcatcgatattctggcctgatatatggccctgaaatgaaacaaccccgcgtcagacgcggggttgtgatagtgaggagtcagccgttaagccgggttctgtcgtggacaatcattcctctgggccagcactcacgcactggctcaagcagcctacccgggttcagtgcgggccgcaccatatgaacccctatttggccttgctccgggtggagtttaccgtgccacggactgttaccagccgcgcggtgcgctcttaccgcaccctttcacccttacctgtacccttacgggccatcggcggtttgctctctgttgcactggtcgtaggctcgcgcctcccagacgttatctggcaccctgccctgtggagcccggactttcctcccctttacccgtctcccggagggactacgataaagcagcgattgcctggctgactccgctgcggattataagcagctttcccgccgatgtacagaataactccgccccggaagagcggatggcggaaaaggcatcactctgcggcagaatccccgtccagggtgtaacggtaaagagcatttttcttcacgccgtacagttccgccaccaccgcagccgcttttttcggcggcagttctttctgcacaatcgccagcgcacgcagaatttccggactgaactcctcatcctgcaccggcttcgcaccttccgcaatcagcaccatctcccctttgcggcgggtttcgtcttccttaatccaggccagcagttccccgaccggtttcccctgaatggattcccaggttttggtcagctcccgcgccagtaccacataacgctcttccccccagacggtgaccatgtcggccagtgtatccagaatacggtgggtggattcataaaaaatcagggtgcgcggctcatcggccagtgcccgcagtgtgtcctgacggctcttggttttggccggcagaaatccctcgtaacaaaaacggtcagagggcagaccggcggcactcagcgccgtgacagccgcacaggcaccgggcagcgggatcacggtaagccccgcatcacgggcgcggcggaccagatggtagccgggatcgttaattaaaggtgtacctgcatccgacactaatgcgatactggtcccggactgtaatttggtaattaattgatctgctttatactgttcattatgatcatgcagcgcaaacaaccggttattaataccgaagtgcgaaagtaataagccggtatgccgggtatcttccgctgcaatcagatcgacattcgtgagcacctcaagagcacgtgccgtgatgtcattcagattaccgatcggtgtcggcacaacataaagtgtcgctgccgcaaccacggcttgattaggttgattcattgtttcgtccagatgatcacattagaattgagctttcagaaaactataaccgggtacagtatgttttccttaactttatcgcgttaccgcaggcaattactttgtaccgcactcttttccacgctggttctctcagggtgtacacttgagaaccggcatgcgggcacagccggcaaaggccagccggaaacacaggttcagcaatatcagaagattattgatgccgccgccggaaagccgtccgttgacgcaatccgtgcttatatcgctcaggagccgctgctcactgatccggatgcacatcagcagaatattgatgaaacctggctgatgctaacacgttttacccccgaagagcgcaataacattcaggttaacgctgatgaaagcgtattacagggctgggttgatctgcttattctgtatcagaacaaccagcaggatctgaaagcgctttccgccgcactgggtgactggcaaatccgttacccggataacccggccgccaaatccctgccgcaggatcttattcaggccctgagcagcacctacggccagaccggtaaaaatgcccgcgttgccctgttcctgccgctgagcggccaggcgaaactgatgggtgatgctatccgtcagggctttactgatgcacagaacggcgcggtatacagtaccggttaccgggttgctgatattccggccgcacaaccagtcagcaccgttccggcacagaccaccctcagcccggcggatccggataaagatatcaccacaccggatgaaacaaacggtgcaccgtcaaatgacagcaccgcagacggcgcaaccgccgcaagtccggtatctgccccgcaggcactgccgtacagcggcgagtcccgcactgtcactgacgtgaaaatctatgacaccgacagcaaaccgctggcaactctgctggcacaggcacaggctgacggcatggatctgattgtcgggccgctgctcaaaggggatgtggccacactggcgactgcaaacaccccgctgaacattctggcgctcaatgaattagatacaccaatcgcccgtccgaatgtctgctatttctcactttcgccggaagatgaagcccgcaacgccgcacagtttatccgtcaggataataaaaccgccccgctggtgctgacaccggataacagcttcggccgccggatcgcacaaagctttgccgatgagtggcagaaaaacggcggtggtgtggtactgcaccagaccttctccggcaatccgggcagatctctttcactgaccggcgtgccggtacagccatcctcaccagcggcagcgcagccggacggtaccgtggtacagccgcagcctgtcagtggtggtgtggattctgtctatattatcgccacttctgatcagctgatttacatcaaaccggcgctggaatttgccaccagtgcgcgcggtcgtccggcgttttatgccagctcccgcagcaataaagccgggaccggcaaggattttcagtttgagatggaaggactgaaactgacggatatcccgctgattgcgggcggtaatccgcagttactgagtcaggccgccgggaaattcggcaacgactatacccgtgtccgcctctatgcgatgggcatggatgcatggcgtctggccaatcagttcggtgacatgcagcgtcatactctgcgcatgaatggtgccagcggagacatcactgtcactgataactgcaccgtttaccgtcatctgccgtggctggtctttaagcagggtaatcttgctccgctgggtgcagcaaactagtctttatctgaattttacaggtgacaggatgtcacctttatattgctggtatacagggaacgtatttatgcttacatggctgacaggccatcgtcatgaacagtttgcccggcgctggctggaacagcagggactgacatttgtcgcgcagaatgtccgtttccgccggggcgaaattgatttgattatgcgggacagcggcacctgggtgtttaccgaggtccgctaccgccgcaatgcacactatggcggagcggcagccagtgtcacaaaaaccaagcagcgccgcttactttatgcagcgtcctgctggttatctcagcaacagctgagtatgctgacctgtgactgccgttttgacatttgcgccataaccggtgaccatatcgactggctgaaaaatgcctttggtcacgccgacttttgttaatgtcgttatccgttgctgatagcaggacttatacgtgttagacagaattaaacagtgttttactgaaagtattcagacgcagattgcagccgcagaagccctgccggatgccatttcccgggcggccatgatgatggttcagtcgctgctcaacggcaataaaatcctctgctgcggtaacggcgggtcggcggcgacagcttcgcgcttcgccaccagtatgatccaccggtttgaaaccgaacgcccgagcctgcccgcactggcactgaatacggataatgtggtgatgacagcgatcgccgccaaccggcagcaggatgaaatttatgccaagcaggtccgcgccatcggccagaccggtgatgtgctgctggcgatatccacacacggcaacagccgcaatattatcaaagcggttgaagctgcggtgacccgtgatatgaccattgtggccctgaccggctacgacggcggggagctggctggtctgctgggtccgcgtgatgcggaaatccgcgtaccctcacagcacagtgtccgcatacaggaagtgcatatgctgacggtgaattgtttatgtgatttaatcgacaatacccttttcccccaccaggaagactaaggagatattatgagaattgtgcccgtggcagcactaatctgcagcgcgttactgttacagggatgtatcggcgcagcacttgtcggatctgcggcagttgcgaccaaagccgcatcagacccccgttctgtcggcacacaggtcgatgacggcacactggaagcccgtgtcagcggccagctcaataaagataaagatatcaaacagcagcggattattccggtggcttatcaggggaaagtcctgctgattggtcaggcggaagatctctctctggctcggcgggcaaaagagattgccgccaaagtggacggtaccgaactggtgtataacgaagtccgccagggaacaccgattgatttggggactgcctccaaagacgcctggattacgacaaaagtccgttccaagctgctgaccagtgatgcggtgaaatccgcgaatatcaaagtgatcactgaaaacggtgagattttcctgttaggggtggttacccgtcaggaaggagcagcggcagctaaagtggccagtgaaacggatggcgcgaaaaaagtcaccaccgcctttacctggctgaattaattccgtctgctttcggaaaccgataagaaacctgacttaatgtcaggtttttttatgcccgtgccggatgcctgctttctgctcatccgcctgaatgcagataaaatacaggatatatcaataaataacaaattataagaacattataccaaaacagcctgagatgcggtcactattatatttacttatcatttttgtaaaaaaataaatcagtaagataaattcattatactgcagctaattatcagccagattatttttcttcaggaacgttgttccgcccagcaactgcatctgatgcaatatccattgctgacgctggcggagatacgcggaaggtttatccgcatgcaaccggtggggattcggcagcacggcagccagtaatgcagcctcagccgccgtcagatttttcgcgcttttgccgaaaaagtgctgcgccgccgcttcggcaccgaaaattcccggcccgaactccgcgatattgagatacaccgtcaggatccgtgactttgaccagaccagctcaataccgggcgtcagcagcgtttccagcccttttcgtacccagctgcggccatcccacagaaacaggttcttgaccgtctgctggctcagtgtggatgcaccgcgtgccgccctgcctttcttaccgctttttgacagtgcgtcggagatagcaccaaagtcaaaaccgtggtggtgcgggaaattctgatcctcagacgcaatcaccgccagcttcatctgcggggaaatagcgtcttcacccgcccatgtactgtgagcgacataagaaaaattgaatgttgaccatgccgaaagctgcctttccagcatcaccatagagtaagggacagggaggaacgcgaacaaaattatcattgttacccataacaacataacaaaaacaactatttttcgcagaaaccgcaatatcctccccatcatttccctcattctttatcaggccattccgagcactttcttcacgagtttatcaatcccgatctgtgcctgtgcgatattctcagccagcatataggctggggttgtcacgattttatgggtttcatctacgacgatattatccaccgtgcaattgacatgtacgccgcccatttccgcgatcgccgccgcaatatcagaatcattgccaatggtaagttgtactgatgaattaacgattttcgggatcatcaccggtgcaatacacataaatcccatcggtttgccctgagataacatcccacgcgtcaataataaaaaatatttatctatttcgcagtcagcaccttttacggcaaaatcgcacagattttttgccgcaccgaaaccgcccggaacaatcagtgcatccagctgtgacgcatccgcttcggccagcggacggatttctccgcgtgaaatccgtgctgactcttccagcatattgcgcttttctgatttttcctcaccggaaagatgattgataacagtgcgttgaggttcatccggtgcaaaaaaatacacctgtgcgccggattgggttaaactgagcagcgaaagaacggattcatggatttcactaccgtcgaaaacaccgcatccgcttaaaacgataccaacagatttcatatctgactccttttgtagtagattaatgcttaaccctttagaggtgcaaacaccaatcttcatcacagtttttaatgaatcttgtaacaaaaatacttatctttgctatgttgaagcctgtatgatgtaagagcctatttcatcactcgcctaaataacgataaatagttgtcgcgggtgaaccagtttccctggtgttggcgcagtattcgcgcaccccaacctcggttggggttattttttacctgcgatttgccagccagtttcttaaaatccccacctgactttcccaatcgtgattcagttcatcgacccactcctgcacgttatcatcccatgccggtaaatccggtgactgaatctgctgcgcaacctgccgcagatggataagcccgactgaccctgctgcccctttgattttgtgtccctcttccgcaatgcctttgcggtctttcgccaccatgttggaattgagaatcgccaggtaacccggcatcattttttcaaacacatccaggctgtcttcaatcagtttcggccccaccagttcgatgtactgattcagcatctccagatccagtgactgcgcatacacgtcctcagacgccgctgagccgctttcctccgcagacagtgcctcactgccgtctccccagaatttcgctatcatctgcgtcagagcgcccacagcgaggggtttgctcagcacgtcatccataccggcgtccagatactcttttttgtccttcagcacattggcggtcagtgccaccagcggcggtaaatcatccgcctgataacgctgatgcagctcacgggcgatatccagcccgctcatatccggcagctgaatatccagcagcacaaggtcatactcctccggcgagaacatcgccagcgcgtcacggccgttcatcgcgacatccaccgtgttccccagtttttccaggacagagcgcgccaccaccacattcagctcgatatcctccaccagcaggatattcagggccggcagcagcaggccgtcatcctcttcctcttccggtgcttcctgagccggcgcgcagactgacagcgtgaagcaggagcctttgcccggctcactggtcacggtgatatcaccgcccattgcctgtgccagacggcgggagaccgccaggccgataccggtaccggtggcagggcgtccgcccgcgctgtccgttacctggtaatacatggcgaagattttttccagctcatccttcggaatgccgataccggaatcccgcacctcaaagcagagcatatcattggcttcacgccacactttcaccgtgataccgccttcgcgggtgaacttcacgccgttgccgataagattccacaggatctggcgcagacgggtgccatccgccatgatcacagacggtaccggctggatcaggtcgagagtgaactgcagccctttcggctgcaccagcagcccggacaggttttccagatcagaaataaattcggtgaaattgaccggctgggtatcgaggcggacattgcgccgctccagtttgtccatctcaatcacgtcattgaagatattgccgagggtgacggcgctgacatgaatggttttcaggtagttttcctgttccggattgagatccgtatccagcagaatgcggctcagcccgacaatcccgttcagcggcgtacgcagttcgtgactgatggtggagataaaggtggttttctcacggctggcgttttcaatcgcttcctgataacgcttgcgctcagtgatatcacgaccaaagcccatcaggccgtggcgtttgccgacactgtcatagaacggcactttgcgcagctcaaagcaggctttgcgcccgtccgggtagaccagccactgctcataggtaagcgaaacattatgacggaacactttttcatccgtttccatcactttatcagcaatttccggttcataaatatcgcgcggagtcaggccgcgcagcagtttttcactgcggccggtaagcagttccatcgcgcggttacagccggaaaactcatttttctcattgcggtaatagaccaggtccggcgaggcatcaaggaaggagcgcagcaggacagattgctgttcaaattcgagctgggtctgttcgcggcggctgatctctttcttcagtttatccagcagaacaacctgttcatcctccactttttcgcgctcggtaatctcctgattcagttgggtaatgttctctttcagctgttcattgagttcgagatcccgcttgcgcatcacttccagtttactgaccagtctggacaggcgctggcgggattcctccagctgttcaaccaccacagacataaaatagaccgcccacggcgtgatcagcaggccgaagaagacagagcgcaccaggtcaatgctctgtacttccccctgaagcagcatggtgacagcaatctgcaccaccatcgccagcaccaccagtcccgatgccagcaataacgaaaaccggaccaggcccagtttcatcagtaaatcaacataatattgtgctaaaccgcgtagcaatttcatacctgctccacccgctgaatgagggttagtatcataacgtaaaattggcggatcacagcgtttccggcgcggattaagtaaaaaatcaaatcagccggcgttacaggcatcctcagccggataatatggccggattaccacccggtactgtttttttatctgaataaaattaaaaacacgacatttatctgcaaattagcagaaacagagcagataaaatcaggttataaataaaaatgcccatgctgcgcggtaataacccgcaaaaaacagtgatgtacatcacacaaaaaatcggtactccggttgcggaaacagcggattaaaatcctgaaaatagttttttttcattaaattatcgcaaaaaccatgctcacatactgtcagttacctgatatttgaccgtcaccgtatttcccggtaagttgaaaaacgacgttccggatcacctgtggtcagcaccgatataataattattcgcttgccggtcgcggcacaaacacacatcacaataccctttgctgagatatctgtcgtcagcagggctgactgaggcccggaaacagctttgccgcagaaatgcggcctaatgtgagacatgcaaaaggggccacttatgctttataacccgtcacaggataaggacaactgcggtttcggcctgattgccccccgcgaaggacaccccagccacaaagtcgtgcgtactgccatcagcgggctggcgcggatgcagcaccgcggtgcgatcctcgccgacggcaaaaccggggacggctgcggtttgttattacaaaaacccgatcgcttctttcagatgattgctgcggagaatgaatggcggctggcgcgtaattatgcagtcgggatgctgtttctcagtcaggatccggtcattgcacaagcctgccgcgatattatcgaagaagagctggcggacgaaacactgtttatcgcaggctggcgtaaagtgccggtcagaccggagatcctcggcgaaatcgccctcgccggtatgccgcagattgagcaggtctttatcaatgctcccgcaggctggcgggcacgggatctggaacgccgcctgtttatggcgcgccgccggattgaaaagcgcatcagcgacccggatttttatgtctgcagcctgtccaatctggtgacgatttataaagggctgtgcatggccgccgatctgccacgtttttatccggatctggccgatttaagaatggaatccgctatctgtctgtttcaccagcgcttttcaaccaatactgttccgcgctggccgctggcacagcctttccgctatctcgctcataacggcgaaatcaacactatcaccggtaaccgcgaatgggcccgtgcccgtgcttataaattccgcacaccgctgatcccggatctcatcaccgccgccccgtttgttaatgaaaccggttcggattccagctcgctggataatatgctggaactgtttctcaacggcgggatggatctggtgcgtgccatgcggctgctggtgccgcctgcctggcagaatcacccggatatggatgatgatctgcgcgccttttttgattttaactccatgcatatggagccgtgggacggcccggccggaattgttatctctgacgggcgctatgccgcctgtaacctcgaccgcaacgggctgcgccctgcccgttatgtcattaccacagacaaactgatcacctgcgcctctgagatcggtatctgggattatcagccggatgaagtcactgaaaaaggccgtgtcgggccgggcgaactgctggtgattgatacacaggaaggccgtatcctgcatacccgcgagaccgataacgatctcaaaacccgtcatccgtacaaagcgtggctggagaaaaatgttgtgcggctcacgccgtatcaggatctgatgaataaaacaccgccgcagcgcgccttcggtgatgcacaactggcggtgtatcagaaacagttcgggtacaccctggaagagctggagcaggttctgcgggtgctgggggaaaacggccaggaagcggtaggctcaatgggggatgataccccgtttgcggtactctccgcccgcccgcgcctgatttatgactatttccgccagcagtttgcccaggtaaccaacccgccggtcgatccgctgcgggaagcccatgttatgtcgctcgccaccagcatcggccgggaaatgaatgtcttctgcgaagcggaaggccaggcacaccggctgagtatggcctcaccggtgctgatgcacacggatttcgaacaattactgagccgtgatccggattattaccgtgcagaacatctgtcactctgttttgatccgcgggaaactacactggaacaggcgatccgcaccctgtgtgataatgcggaagccgctgtccgcgccggtactgtactggtggtactgagtgaccggcagatttccccggacaccctgccgatcccggcaccgatggcggtaggcgcggtacagcaacggctggtcagccagagcctgcgctgtgacgccaatatcatcgccgaaaccgccggtgcccgtgacccgcatcattttgctgtgctgctcggattcggtgccaccgccatttacccttatcttgcctgtgaatccctgctgaaactgtgcagtgataacgtcctcacgcactcaccggcacaggtattgctcaactaccgcaacggtatcaacaaaggactgtataaaatcatgtccaaaatggggatctctgctgtctcctcctaccgctgtgccaaactgtttgaagcagtcggcctgagtgattctgtggcagagctctgcttccggggtgtaccgaaccggatcggcggcgcggatttcagtgattttcagcaggatctgcataacctgtcccgcctcgcctggctgccgcgcaaaccgctcgatgcgggcggtttgctgaaatacattcataacagtgaatatcacgcctataacccggatgtgatcgcaacattgcaaaaagcggttcacagcggacattatgcggattaccagcactatgcagccctggtaaacggccgtccggcggccatgctgcgcgatttgctggcactgcgcaccgatacacaacctatcagtattgatgaaactgaatctgcagaatccctgttttcccgctttgataccgccgccatgtctatcggagccctcagcccggaagcccatgaggcactggctgtcgccatgaaccggctcggcggcagttccaattccggcgaaggcggtgaggacccggcacggttcggtacagaaaaaaactctaaaatcaaacaggtggcctccggtcgctttggtgtgacccccggatatctgcgcagtgcgcgggttatccagatcaaagtggcacagggcgcgaaacccggtgagggcggtcagcttcccggtgataaagtcacgccgtatatcgcctcactgcgctattcggtgcccggcgtcaccctgatttccccgccgccgcaccatgatatttactcgatcgaagatctggctcagctgattttcgatctcaaacaggtcaatccggaagcactgatttccgtcaaactggtctcggagccgggcgtcggcaccattgccaccggtgtggccaaagcctatgccgatttcatcaccatttcggggtatgacggcggcaccggcgccagtccgctcacctctgtcaaatacgcgggtaccccgtgggagctggggctggcagaagcccagcaggcactggtgagcaacggtctgcgccataaaatccgcttacagacagacggcggactgaaaaccggactggatatcatcaaagccgccattcttggtgcggagagctttggtttcggtaccggcccgatggtcgccctcggctgcaaatatctgcgcatctgccacctgaataactgcgccaccggcgtggcaacccaggatgaaacgctgcgccgcgatcactatcacggcctgccggagcgggtaatgaactatttccgctttattgcacaggaaacccgtgagctgatggcgcaactgggggtgagaaaactgaccgatcttatcggccgcactgatttgctggtcagaattgaaggcaccactgcccggcagcagaaactggatctgtccgatttactggtctctccggtaccgcatgaaggtgcggcactgttctgctctcaaactaacccgccgtttgataagggggaactgaaccgccgcatcctggaagatacccggacctgtgtgcagacacagcaatcccgtgccttttattatgatatccgcaataccgaccgctcagtgggggctgcgctctccggctttgtagcggagctgtacggcaacagcgggatcgccgcttcgccgctgaaactgcattttaccggcaccgccgggcagagttttggtgtctggaatgccgcaggtattgaactgacgctcacgggcgatgccaacgactacgttggtaaaggcatggcgggcgggcagattgttcttcatccgcatccgggttctgcctttgccgctcacgacaccacaattgccggaaatacctgtctgtatggtgccaccggcggcaaactctacgccgcaggctgtgccggagagcgctttgctgtccgtaattccggcgcactcgcggtggtcgagggtgtcggtgataacggctgtgaatatatgaccggcgggattgtctgtgtgctcggcaaaaccggaattaacttcgcggccgggatgacaggcggattcgcatatctttatgatgaagacggcaccgccgccggacgtgtcaacccggaaatggcggaaacccgcgatatcagcgggctgccggttctgcaggagcatctgcgcggtatgctggacgatcaccgccgcctgaccggctccgccagagcagacgcacttctcagagattggacagaacaggccgggcggtttatcctcgtcaagccaaaatctgcggatattcatgcacttgccggggtaacccgccacgcagacactgaattacggatccgggcacagtaaggggaatcaagatgagccgcaatgtttatcagtttattgaattacagcgtacggatccgcaaaagctgccgctggcactccgtaaaaccgaatttatcgagatttatgagtcgttttcgccgccgcaggtgaaagagcaggcgacccgctgcctcggctgcggtaatccgtattgtgaatggaaatgcccggtacataactatatccccaactggctgcggctggcggaggaaggccggattattgaggccgcagagctgtcacaccagaccaacagcctgccggaagtgtgcggcagggtgtgtccgcaggatcggttgtgcgaaggtgcctgcaccctgcatgacgagttcggcgcggtcaccatcggcaatattgaacgttatatcaccgataaagcctttgagatgggctggaaaccggatctctccgctgtccgtccgaccggaagaaaggtcgcggtaattggcgccggtcctgccgggctggcctgtgccgatgtgctgatccgcaacggcgtaacccccgtagtatttgataagcacccggaaatcggcgggcttctcaccttcggaattccgtcgtttaagctggaaaaatccattatgaagcgccgccgtgagttgttcacagagatgggcgtggagtttcagcttaataccgagatcggaaaagagatcacgctcagtgagttacagcagaactatgatgccgtctttatcggcgcgggcacctatcagccgatgagcggcgggctgaaaaatgaagatgctgccggggtatacagcgccctgccgtatctgatcggcaatacccgtcaggtgatggggttgccggatgatgattccgctccgtttattgacctgaagaataaacgcgtcgtggtactcggcggcggagatacggcaatggattgcctgcggaccgccatccgtcagggtgctgcagaagtgacctgtgtgtaccgccgggatgaggagaacatgccgggctcgcgccgtgaggtgaaaaatgccaaagaggaaggggttaatttccgttttaactgtcagccatccgccattgaaaccgatgcaacgggtaacgcctgtggtgtccgcgtattaaccacccggttgggtgatgcggacagcagcggccgccgtcagattgaaacggatgataattccgcctttgttattgatgccgatgcggtcattatcgcgttcggtttccggccgcacgcgatgccgtggctggacgctctcagtgtcacacgggatcagcagggccggatcagcgccccggcacaggcaacttatccgtttgaaacctccgtcagcggtatttttgccggcggggatgtggtacgcggctcggatctggtggttaccgccattgccgaaggccgccgggcggcagaaagtattctcgattatctgcacgtatgagcagagtaattacctgatcatgctgccttaaatgcaaaaaagaccgctttcgcggtcttttttatttatcggtctgttacttcacgacacgtaagttcggacggccacgcggtggtttcggcggctccgggtcatccccgtcggtgctttcttccgccggttttaccggttcgtcgtggatcagggtgatgttatccactgccggagtcagaatatcttcttcttccgcagcctcataagccacttccggctcaaacatcatcccggcaccgttttcacgggcgtagaccgcaataatggcagccatcggcacatccacctggcgcggaacaccgccgaaacgggcattaaaaccgacccactcgttggtcatttccagattgcccacagcgcgcggtgcaatattcaggacaatctgaccatcctgagcatactccatcggcacattcacaccgggggtgttcacatccaccaccagatgaggtgtcagttcgttatccagtaaccattcatagtgcgcccgcagcagataagggcgacgcggtgttaattcctgaatatccatcagcggttaaccccgtgactgtaaacgcatctcacgctcagcttccgtcagggaagccaggaaagagtcacgctcaaacacgcgctgcatgtagaactgcaggtgtttggtatcagaagacggacgtgcggacaggtcgatacccagtaccggcagacgccataacagcggggacaggtagcagtccaccaggctgaattcttcattcatgaaatacgcgtattctttgaataccggcgaaacagcaaccagctcttccgttaactgtttgcgggcctggttcgcttcctgggcagagcccttttcaattttattcatcagcgagtaccagtcctgctcgatgcggtgcatcatcacacggctctgcgcacgcatcaccgggtaaacaggcatcagcggcggatgcgggaaacgctcatcaaggtattccatgataatacgtgaatcatataaggtcagctcgcgatccacgagtgtcggtaccgtctggtatgggttcagatcgatcaggtcttgtggcagattgcctgcttcgacatgctcaatttcaaaacttacccctttttccgccagtacaatccgtacctggtggctgaaaatatcggtcgggccggagaacagagtcattaccgaacgtttgttggcagcgacagccatgaaaacctccaagtttatcaaaataaaggaatgaacagcgcactacgccattcttacctgtaatctctcactgaatccgggaaagaaaaccacagcgggccaatccgggcgcgcggcagtgtgttcaggggcgagaaaaatgtttgtgccagtttaccagattttgctcaacttagggtgagtcagggcaaaaaatcattcaaaaacactaaaaatgggggttaacagggacagattcatgaaataaacatgaaattacaggttatgtcgggataatttgcggcagttatacggttataaaaaaacccgccggcggcgggttttttgtattccaacgaaaccagtgattaacgtttggagaactgtggacggcgacgtgctttgcgcagacccacttttttacgttcaacttcacgcgcatcacgcgttacgaagcctgctttacgcagctcagaacgcagagattcgtcgtacgccatcagagcacgggtgataccgtgacggattgcgcctgcctgaccagagataccaccacctttaacagtgatgtacaggtccagtttttctaacatttcaaccagttccagcggctggcgaactaccatgcgtgctgtttcgcggccgaaatagttttcgaggctgcgttggttgatgacgatgttaccactacccggcttaataaagacacgagcggatgaacttttgcggcgaccagtgccgtagtattgattttcagccattgcctataatcccgattaaatgtccagaacttgcggttgctgtgccgcgtgattgtgctcgttacctgcgtaaactttcagtttacggtacattgcacgacccagagggcctttcggcaacatgcctttcacagcgatttcaataacgcgctcaggatggcgtgcgatcatctcttcgaaggtcgcttgcttaataccaccaacgtagccagtgtggcgatagtacactttgtctgtacgcttgttgccggttacagcaactttttctgcgttcagaacgatgatgtaatcaccggtgtcaacgtgaggagtatattccgctttgtgcttaccgcgcagacggcgggctaattcagttgcaaggcggcctaaagttttgccggttgcatcaacaacgaaccagtcgcgttgtacgctttctggtttagctgtaaaagttttcattaaagcttacccaataaataagttacatgttggtgaaccaatgttcagaaactgaggctcacacgacgcttgtccagtaaacctaccccttcgagcagaatcatctggcgctagttgcagtcttctttgggaaataaagaaaaccgctgtaacgtggggtcgcaagattatagagaagtccctgcaaaaaatcgaccccaaattaaaaaaatttccccgaaacccttttcaggggcgcgcattataccagatgcggcagtttcaggtactcctcactttgcatttcctgcagccgggagaggcatctggcgaactcaaaggacaataactgcccctgatagagagaatccatcccgctctgcgcctgaataatcagttttactttccgctcataaaactcatccaccagcgccagaaagcgccgcgcggcattctcattttccgtggtcagtaccggaacctcatacaaaagcacggtgtgatagattttcgacagcgcaatatagtcgagctggctgcgcgcatcctcacacagtgtccggaaggtcaccgccagcacgccgtccgtttcccgcaccaccggcagctgacggtgattgatggtcagcgccgcctgtccggctttttgtccaccggtcagccgggagaacatgctgtccattgccgctgacgtttccgcatccgccggggtcagccacagatgggcttgtgtcagcgtgcgcaggcggtaatcaatccccgcatccacattcagcacatcacagtattttttgatctgttcaatggccggcagaaaccgggcgcgctgtaatccgttacggtacagatcatccggcgggatattggaggtcgcgaccagcgcgatgccgcgctgaaacagcgcttccagcagagtaccgaggatcatggcatccgtgatatcggaaacaaaaaactcatcgaaacagagaacatccgtttcctgtgcaaagccgtcggcaatgctctccagcggattttcatgtccctgaagcgccgtcagctcctcatgcacccgcagcataaagcggtggaaatgcagccgcagcttacgcggcccgggcagactgtcataaaacagatccatcagccaggtcttgccgcgcccgaccccgccccacatataaataccctgcaccggcggacaactcaccggcgcaggcgcttttttcagccagcggttcagggtgccgcgcagccctttttccggctcaggggagcatggtgtgcgcatcaggagcgcctgatgcatctctgtcagccggtcaacggtacgccgctgcacgtcgtccggcgcaaatccgctgccgttcagtgcctgctgatacaactcacgcggtgttgtgctcataaacggtaatcccttaatattatcagaggtttttattgagatttttatgatgtagcggcgggtattatacccggaaatccgggataatgccggaaagccttaccttcactattccccccggacggcaaatccggttatagtgacaacagattctaacgcgcatgatgcacttaaaggagtagccatgatttgggtatatgcactcatcggattagcagttggtttaatcattggtgcgctggccgttcgtctgggcagttctaagttcagagagcaggaagccatgaaacgggacctggaaaaaaacaaggccgaactggaagagtaccgcaaagagctggtcagccactttgcccgcagtgcagaactgctggataatatggcgaaagattaccgccagttatatcagcacatggcgaaaagttcatcagaactgatgccggaactgtccgcacaggataatccgttcagctaccgcctgacggaagctgaggccgataatgaccaggcgccggtaaaaatgccgccgcgtgattattcagacggctcatccggcctgttccgtcccgtcgaaaacaaagaaagctaatcattaaaaccgcaggcgactgcggttttttttcgcctgaattcagccgcttaatactgtccttcaaactattccccgcactaatcttcagttcacgtaaagccttgtaaaggttgttttatttccgttgaatgaggaacttttacacacacatagagtcataggagtatctgcgtatgctgcggcttctcatgcctgcagattcagcttattaattgatgagacacaaaacgaatgatgaataaaaagaaaaaaaacctgctcagtgctgttgccatcagcctcgggttatccctcgcggcgctgcctgcggtatcaaatgcggccttaccggccaaaatggccaccggcgaatctctgccgagcctggcaccgatgctggaaaaagtactgcctgcggtggtcagcgtggaagtttccggtacagcggttgcccgccagcaggtaccggaagagtttaaattcttcttcggtcctaatacaccgtcacagcaggaaagtgtccgtccgttccagggacagggttccggtgtcattattgatgcacagaaaggctatattctgaccaataaccacgttattcagaatgcggataaaattcagatccagctcaatgatggccgcaaatatgacgcgaccttaatcggccgtgatccgcagaccgatattgccctgttacaggtgaaaaatgccccgaatctgaccgccatcaccctggcggattccgataaactgcgcgtcggtgatttcaccgttgctgtcgggaacccgtttggtctgggtcagaccgcgacctccgggattatatcagcattaggccgcagcggcctgaatgtggaagggctggaaaactttattcagaccgatgcctccatcaaccggggtaactccggcggtgcgctggtcaatctcaacggtgaactgatcggtatcaacaccgcgattctggcaccgggcggcggtaatatcgggatcggctttgctatcccgagtaacatggccaaagatctgacctcacagctgattgccaccggtgaagtcaaacgcggctccctcggcatccgtggtactgaaatgaacgcggatatcgccaaggcaatgagtgtggaagcccagcgcggggcgtttgtcagtgaagtgatcccgaaatctgccgccgccaaagcggggattaaatcgggtgacgtgctggtctccgttgacggcaaacgcgtcagcagctttgcggaactgagagccaaaatcggtaccaccgcaccgggtaaagaagtaaaaatcggtctgctgcgcaaaggcaaaccgctggaagtcagtgtgatactggatgacagcgagggccagaccaccaaagcggaaaacctgaccacccttctggaaggtgcaaccctgagtaacggcagcaacaaagaagggaataaaggtgtgaatgttgatgcggtacagaaagattctccggcggccatgtccggccttcagccgggagacctgattatcggcgtcaacaaccagcgtgtgatgaccattgttgaactgcgcaaaattatcgacggcaagccaagcgtgctggcactgaatattttacgcggcgatgacaatatttatctgctgctgaataatgccggccgctgatacatttttgctgtgaatactgaaaccgcgccgcgtaaaacggcgcggttttttatttcaggcagcacctgcctcataaaaatccacggcagaattcagaaccggttttaccaccccggcacggatcagataatcaccgaaatcctctccggccgcccgctcctgtgaccagcgtccgataagctcatcaagcactgataaaatcaccgctgagctgatattctcacagtacatgcgcggaatacgggtgccggtacggttgccgccgagatgcagattatagcgatccggcgctttgccgaccaatcccacctccgacagcatcgcccttccgcagccgttcgggcagccggtgacccgcagaacaatctcttcattccccactccgtgagacgtcatgattttctcaacctctgtgacaaactccggcagaaaccgctccgcttccgccattgccagcggacaggtcgggaatgacacacaagccatggagttttcccgcagcggcgtgacgttgtcgctgataagaccgtgtgcccgcgcaagggattcgattcgggatttttccgcctccggaataccggcaataatcaggttctgattggcggttaaccggaagtctccccggtggattctggcgatttccgccacaccggttttcagcggtttgcccggtaaatcaatcagacggccgttttcaataaacagcgtcagatgccagtggtcatcaatcccttttaaccagccgatctgatcaccacgcagggtaaattcatacgggcggatcggggaaaagatgataccggcacgccgttcagtttcctgtttaaatgtgtcaacccccacccgctccagcgtgtatttggttttggcatttttacgttccgtccggtttccccagtcgcgctgagtggtaacaatcgcctctgccactgccagggtatctttcagcgggataaagccgaactcacttgcgagacggggaaaagtcgcggtatcaccgtgagtcatcgccaggccgccacccaccagcacattaaaaccaatcagtttgccgttttcctcaatcgccacaaaattcatatcattagcgtgcaaatcaacatcgttcagcggcgggatcaccaccgaggttttaaacttacgcggcagataggtttcacctaagatcggttcctcatcagttgccgccactttttctttgtccagccagatttcagcataagcgcgggtacggggcagcagatgctcagagatttttttcgcccattcatacgcttcccggtgcagaccggactgaaccgggttcgaggtacagagtacattgcggttcacatcattggcggttgccagtgaatccagccccgcttcatgcagcatctgatgcgccggtttgacatcccctttcagaatgccgtggaactgaaaggtctgccggttggtgatccggatgctgccgtacagcgtctgttctgcggcaaatttgtctattttcagccactgttccggtgtgatcacccctccgggcaggcggcagcgcagcatcatggcgtggcgcggctccagtttctgctctgtgcgttccgcccggatatcgcggtcatcctgctgatacatgccgtgaaagcggatcagcaggaagttatccccctcaaatccgccggtcaggccgttactcagatcctctttgatggtgccgcgcagatagttgctgtcgcgcttcattctttcgctgtcactcagtttgccttccacaattaaaggcccgttgtgtttatcgctcattaatagacatccctctggtaccggcgcgctgtgcgcagctcacttaaaaactcatcggctgattcatggtcccggttaccgtaccggctgatgatctccagtaatgcatcttcggtatcacgggccatcaggcccgcattaccacagacgtaaatatgtgcgccgtcctcaatccagcgccatacgtccgctccctgctcccgcagtttgtcctgaacataggttttcgccggtttatcccgcgaccaggccagcgagatatgggtcagtacgccgtcacggacataacgctgccattcggtctgatacagaaaatcctcagtaaaatgctgattgccatagaaaagccagtttttacctgaggtaccatcattttcccgttgctgcataaaggcacgaaacggcgcaataccggtgcccgcaccgatcataatgaccggcacatccgggtcggcaggcaggcggaaattatcattgtgttcaatgaaaacccgcacatccccgccctcctgtatatgatcggcgagaaacccggaagccccgccggtccgcgcccggccatctgtgtcataacgcaccacaccgacggtcagatgaatttcatcatccgcttctgcctgtgatgatgagatggaatagagcctcggggtcagcggccggagaataccggcgaaagcctgcgctgaaggccgggaaggcgcctgacgcagcatttccgcgacaggtgttttctgcgcataatgcagcgcggcctgcttatcactgatcagggcggataacgcatcatgctgcgataactgcgcatatttgctgaccgtcactccgttattctgtgtgagctccagatgccggatcagcgcctcgcgcaatgtgtatgtcttgccggataccgtgatctccgttgccgcatccgcatgcagcaggctgataatctcatcggccagcaccggatcattctcaaaccagaccccgagggaatccccgggctgataatgcagaccggaatccccggcagaaatttcaatatgccgcacatccttcagggaattgcggccggtaattttctgattaacggagagggatgctgtcagcagtgcgtctttgctgtaacggttttcagtggtactgaccgcctgtacaaccaccggcggcggattacccgcggcaatacctctctctttcagcacctgtgtcagtgcgtctgtccacgccgcggctgcaggctgataatccacatccgcatctgttctcggcacaagtgcggttgcaccggcttttgtcagctgagtatcaaaatcaatacccgcctgacagaatttttcgtatgacgaatcccccagcgagaaaatggcatacgctgttccgctgagatccgggcgttttgatgaatgcagatatttataaaacgccaccgcttcttccggtggttcaccgtccccctgagtggatgtcacaataatgacaatcttctcccgggcgagctgtttatatttatattctccggcgtttaccaaattaaccgcgaatttttcactgaggaaacgcgtttttaattcttcacatacgcgacgtgcattaccggtttgtgacgcggaaataatggtaataatgtcactgtctgttgtgtttgatgccggtagaatagctgtctgcacagacgtatttccccgtccccacaaataaccggataaccaggccagttgctgagaggtaaaatctgctgttactgtctgcaaagccgcaagctgctccgcagaaaccggaaatacctgttccggtaatatctgtgctgccatagtcctgttactcccgcattgctcattgtggttattattccgttatgtcccaggttatcgtattacggcttattgagaataagaaaataaagccataactcataaccaaataatctgatatatcatgacgattattcattaaccgtatattttcggaattcatacttagacaaacaatgaattacacgtaaaaaataacgaattttttcacccttccttttaattgaaaaatgatcttcagcgggaatattattcatgtataacaaaaaggtatttcaatataaaaagtaattctttcccggaatatattccctgacactaaatagataactactcatgacttcataacggaagaaaataatgtcgttatatcagcctcagaaaaaaaataaattaaaggtcattttgtccttactggcggcgctggcggtgataagcgcatttatttacagccagaaagcacctgcaccgcaggcaaccgctgaaaaaccggtagtgatcgcttatcaggcgattatcgatcccggcaaaattgcacaggcaaaccatgcctatgaggccgccaccggtaaacagattatctggaaaaaattcgacagcggcgcggatgtgctgaccgccctggctgccggtgaggcggatatcgccaatatgggctccgcaccgtttactgttgccgccagccgcggactgccggtggaggttttttatatttccggcattccggacaccgccgaggcactgattatccgcagcgaccgtaatccgtcaggcggcctggccggtaaaaaaattgccgtaccttttacctccacggcccattacagcctgcttgcgacactggagaacctgaatattgatgaaaaatctgtgcagttggttaatctgcggccggctgaaattgtcgcggcatgggagagaggcgatattgatgcggcgtatgtctgggaaccggccttaagtcagttgaaagcaaacggacagatcctgatttccggccgcgacgtacgggcatggggtaaaccgacctatgacctgtgggtcgcagacagcaaatttgccgcacagcatcctgatgtgctggcgcagtttgccgccgttactgacattgaggttcagtggtatcagcggaacaaaaatactattgcagactttcctgacatcacaggcaaaattgctcaactgaccggtgcccgcccggaggatgtggcgggtgtgatggcgggtagtgattatcccgttctgaaagaacaaaaacagatcctgacgaccaccctggcggatgatatccgcaataccgcgctatttttacagcagcagggcagtattgattcggttaaagattcctatgccggaaatatcaatacggaggccgtcaccacagcggcggggaaataataatggcggatatcgtactggagaatattgatctggtttatcacggtcagccgcagacaaccttatccggtattaatttaaccattccggataacggtattaccgttattctcggcgcttccggctgcggaaaaacatcactgctgaatattgttgccgggtttttaacgccctccggcggaaaaataacgcggaacggaaacgacattcagcatcccgcctctgacagagccgtggtatttcagaatgacgcactgatgccctggctgaatgtctatgaaaatgtcgcactgggactgaaaattaaaaagctcggtaagcaggaagaaaaagcgattgtcgaagaaaacctgcaaaaagtcggattactgcatgctattaccgacaatatctggtcactctccggcggtatgcgtcagcgggtcggtattgcacgggcactggctgtaaagtctgattttattctgatggatgaacccttcggcgcactcgatgccgccaacagagaacagatgcaatccttaattctgacgctgtggcaaaaacagcagagtgccttttttattattactcatgatattgaagaggcactgttaatggccacaaagctgatattaatggcgccgtatcccggccggataatatccggagaagaacccccgttttataaacaatggtcgcagggacggcgtatccgtgagattaaatcggatccggcgtttattcatcaccgcgacacactgtcagacaaaataatggcgtatcagcgcggttaattaacggacacggagtgacatcaatggcagatatacccggaaataaacacccccgccacagccgtttattactcagcattgtgagtttatccgtgctgattaccggctggtggctgattaccgcatttcagtgggttaatccgctctatttacccgcccctgctcagataggacaccagtttctggcgttatccgaatccggttacatgaatgccacgctgtggcagcacctggcggccagccttgaccgcatgctcaaagcgctgcttctggcggttatcaccgggatcccgctgggggtactgatggggctgagttcacggatacgcggaatactggatccggtggttgaactgtaccgcccggttcccccgctcgcctacctgccgctgattgttatctggttcgggatcggggaaaccaccaagatcctgctgatctggttagcgattctcgctccggtcctgatttcaacgatgcagggcattatggccgcgccgggaaaccggatccgcgccgtgcagtcactgggagcaaaccggcttcaggtactgagatatgtgatcctgccgtcagcactgccgcagatgctgaccgggatccggattggtctcggcgtgggctggtcaaccctggtggcggcagagctggtcgcggcacagcaggggctcgggtttatggtgcagtccgccgcgcagtttcttaacaccggtattgtcatcaccggtatcgcagtgattgccgtggtggcactcgccatcgaactggcattgcgtcatttgcagcaggcattagtgccgtggtacggcaaagaatcttaaccgacagagaggtaatgaatatggatatcagacaattaacacccgctatcggcgcgcacgtcagcggcattgatcttaacctgacaccggatgccgccacgctggccgtattacaggatgccttactggaacatcaggtgctgtttttccgccagcagtatatcaaaccggaagctcagcgggactttgccgctgcgctgggagaactgcatatacatccggtttttccttcacataaaaatgtgcgggaactgattgtgctcgacagccacctgcttgatctgaaggataacgaactgtggcacactgatgtgacatttctggaaaaaccggccatgggctgtgtgttatccgcggtacaggttccccctttcggcggcgatactctgtgggccagcctgacccgggcttatgatgatttatcaccgccgttgcaggaatttttatccggcctgacggcggaacatgatatcagcctctcttttccggacagccgttttgcgcagaccggggaagccaaagccgcgctggaaaaagcccgccgcgatttcccgccgagacgtcatccgctggtcagaacccatccggtcaccgggaagaagggcttgtttgtgaccgcaggttttaccagccggatctgtgaattaagcccggaagagagtgatacattgctgacgttcctgtttaaacacagcacacagccgaaatattttgtccgctggcactggcaggacggcgatgtggcggtctgggataaccgctgcacccagcatctcgccagttttgattacggcgattttcaccgcattatgcacagagcaaccgtgatgggggataaacccgtttaaccggctgtaccacatgagactgtcagtgaccggcggctgacagactcataaccgtcagtgataaataaccgtctgataccgcacctgtttatttgtaccacatcataaaataccgcaattacacacatataatttccccggattatgctattctgccggaagtatctgcttcccgtactcacaacaccggttaaggactatgtggtttaaattattgcgctccgtttttatgggacttctcgtggctgccctgcttctggtcagtgtcccgtctattcgcccgcaatttgtgacccagtggtttacccatctgtttaataatgacgaaccggtcagctacaacaaagcggtacgccgcgccgcgcctgccgtggtcaatgtttacagcagtaatatgggcagcctctcccagcagggtcccgaaatgacctccctcggttccggtgtgatcatgaatgatcagggttatatcctgactaaccagcacgtcattaaaaacgccgatcagatcctgatcgccctgcaatacggtaattacggccgcctgtatgaaggcatgctgatcggcgcggatgatctgaccgacctcgcggtgctgaaaatcaataccaccgataaactgccggtgatcccgatcaacccgaagcgtcagtctcatgtgggtgatgtggtgctggcgatcggcaacccgtttaatgtcgggcagacagtcaatcagggcattatcagtgcaatgggccgtgtcgggctgagtccgacccgccgccagaattttctccagactgatgcctcgattatggccggtaactccggcggcgcactcgtcaataccgagggcgagctggtcggcatcaataccatgtcttatgacagcaacgatccgtcacggctgagtgacagtatcgggctggcgatccccgcagagcttgccctgcgcattatgaataagctgataaaagacggccgtgtgatccgagggtatatcggcatcacctccaaagagctgccgccgatccggactaacaacagtgatatcaatcagataaccggtctgcgggtctttcaggttgcccgaggcggcccggcggataaaggcgggattcaggtcggggatatcatcaccagcgtcaataacaaaccgagcacctcaccactcgaaatgatggatcaggtggcggaactgagcccgggcagtgttgttccggtcaccctgttacgcaatggtcagatgcggtctgtcgatgtgaccatcgaagagttcactccctctcccggcggacaggaataagacacaaaaaagagcggatatccgctcttttttgtttatgacttacgccagagaattactccgctgaatgaatgcgttcgatatccgcacccaggccgcgtaatttctcttcaatatgctcataaccgcgatcgatatgataaatacgatcgacgattgtggtgccttccgcgatacaacccgccagcaccaggcttgccgatgcacgcaaatcggtcgccatcacctgagcaccggacagtttttccacaccgtggcacagcacagaattactctcgatttccgcgtgagcgcccatacggatcagctccgggatgtgcataaagcggttttcaaagatggtttccgtgatcataccggagccttccgccaccaggttcagcagactgaactgcgcctgcatgtctgtcgggaagcccggatgcggcgcggtacggaaagtgaccgctttcggacgctgccctttcatatccaggcttatccagtcgtcaccggtttcgatttccgccccggcttcgcgcagcttggccagtaccgcatccagcgtatccggcttggcgttacggcacagaattttaccgcgtgaaactgccgctgcgatcaggaatgtcccggtttcaatacgatccggcacaacggtgtgagagccgccgccgaggcgttcaacaccttcaatcactacgtggtcagtccctgccccggtgattttggcacccagcgcattcaggaatgcagcggtgtcttcaatttccggttcacgggctgcgttttcgataacggttttgcctttcgccagggctgccgcacacataatagtgatggtggcacccacactgactttgtccatcacgatagtgttgccggtcagacgaccgtccacttccgctttgacatacccttcatcgagggtgattttcgcccctaactgctctaaaccggtgatatgcaaatcaaccggacgggcaccgatagcacagccgcccggcagagaaacctgaccgtgaccaaaacgggccaccagcggccccagcgcccagatagacgcgcgcatggttttgaccagatcataaggtgcacaatattcattaattgcagaagcatccacacgcagtgtggttcctttgcgctcaatttttgcacccagccgcgttaacagcttcacagaggtgtcgatatcccgcagttccggcacattgtgtaattcaaccggttcttccgccagaattgcagcgaacaggataggcaatgctgcattttttgcccctgagatagtcacttcgccctgaagaacggaaggaccttttacccgaaatttatccatctgtagacactctcattatcattaattgctgcgcgttgttatccgccgtacttacagcccgctcagtttacgatcccgttcccactgagccggggtataggctttgatagacaacgcgtggatacggttatccgcaatatattccatcagcggcgcatacacggcctgctgctgtttaacgcggctcatgccgtcaaaaagatcgccgaccgcgatcacctgaaaatggctgccgtcaccggtcacaattgcgtcagtaagtgctaacttatccatcagcacctgtttgatttcattcgtatccataatttctcaaattggttatcagattgtgtgttataggcactatcgtaatcgaatatgccccgctcttaaaccattaaaaatgcctccggctgtggtgacacaaccggaggcagttaccttacggaaaataacggtaaatatgtatctgtcgcgccgttatttacattattttaaattcacgcgttctgactgaattcaaactcaacgccgtagagtgacatcagcatctgcaagttagcgcttactccggataacacaaacggcgcttccggccgctctccccgcagacggaccagcatagccagcccggcggaatccacatgactgagaccggaaacatccaccgtctgcacggcgctcatctgctgctgacgtgcattccagaacgacagcagtgtatcgcgatccagttccccgttcagggcaagggtttcaccctgtttttcccacgtcagcgcagccgtcattatttctgatccagggtaatcggggttttcgcgctgcgttccagctccgcagtcagaccatcaacccctttctgacgcagaatagatgcccactcattttgtttggtggtgatcatgctcacgccttcggcaatcatgtcataagcctgccagttaccggttttggtatttttacgccactggaaatccagacggattggcggacgccctgccggctctgtcagtgtcacacggatagccacgatagttttatcacccagcggttgtgccggatcaatctgataagtctggttggtgtacatggccagtgcctggccgtatgcctgtgccagatacgcctcaaaggctttgaaataagcatcgcgctgtgccggtgtcgcatctttgtagtaagagcctaacaccagtgcaccggcgtatttgatctgcacatacggcagtaattcttcctgaacaacagtgcgcagatagtccggattctgccggatttgcgcctgttcggctttcagacggctgaaggttttcgccgccgcatcgttcatcagtgtatacgggtttgtctggtcaacagctccggcaaacggggctatcaccaccagcatcgccgctatcagtaaacgcttaaacataatcaactcctgattaatcaccggcactttccgccgtgaaggtgtcttcggtaaacagtattatgcaggatgtccgcccctgcgggcaaaaacatccgcttttacattacttttcgtatcagtgctgtgcagccggtgccgcttccggggtattacccccttcgccgtcgccgctcttatacaggaactgaccgattaaatcttccagcaccatcgccggtttggtgtcctgaatacggctggcggctttcagcatttcagtcatcggcnccgtctttcagcatttcagtcatcggcagatccggatcggttgtattctcaaaccctttactgagcgccagatactgctcacccagcagaccggaggtgcggatagataacgaactggtgtccggaatctggtcatactggctgtagatatccagcgtcacttccggtttatagtccttgtccagacggatgtcattgacgcggccaatcaccacaccaccgatttttaccggtgaacgggcctgcagaccgccgatgtcatcaaaggtggcagacacgcggtaggttttttcgctgccgacagagcggatatccgccactttcagtgccaggaagataatcgccgcaatggcaattaagacgaaaagcccgacccaaacttcatttttcttgctttgcattgtttaattcccgaacatcagtgccgtaagcacaaaatctaaccctaacacggcaagcgatgaatgaacgaccgtgcgtgttgttgcccgactaatcccttcagacgtcggaatagcgtcatacccgttgtacagggcaatccaggtgacggtgaaagcgaaaaccacactcttgtaaatgcagttcatcacatctttctgccagtccacattggcctgcatggaagcccagtagaaaccttcatcgatccctttccagtccaccccgaccatgactccgccaagaataccaacggcgacaaaaatcatggataacaacggcatactgataaaaccggcccagaaacgcggtgcaatcacacggcgcagcggatccaccgccatcatttccaggctggataactgttctgtggctttcatcagcccgatttccgcggtcagcgcagaaccggcgcgtccggcaaacagcagtgcggtcaccaccggccccaattcacgcagcagcgacagcgccaccatcatgccgaggctggcttccgcactgaaggttttcagaaccagatatccctgtaaggccagaaccatcccgataaacagcccggatactgaaataatcagcagggactgcacaccgacgctgtacagctgcttgcgcagcagcggccactgccgggcaaactgcggtttgccgaacagcgcacggaacagcatgtatcctgaccgcccgaaagacgcgcatgtcgctaacgcgcggcgtcccaaagcagcaagtgcctgtgtcaacatgtctcgtttatcctaataaatctgattggtaatcacccgccggatagcggaaaggaaccggtccgtcagcaataccatccaggaactggcgcacacgcggttcggtgttctcctgcaactcttctgcggtgccctgtgcaatcacggactgctccgcaacgatataagccttatccgcgatactgagcacttccggcacatcgtgagagaccacaatgcaggttacacccagtgcctgattgagttcatcaatcagttttaccagcacacccatggtaatcggatcctggccgacaaacggctcatcaaacaggataagatccggatccagtgcaatggcccgcgccagtgccgcacgccgtgccatcccgccggagagttccgacggcatcaggtttgccgccccgcgtaaaccgaccgcttccagtttcatcatcacggttgtccggatcagggattccggcagacgggtatgctcacgcagcgggaacgccacgttgtcatagactgtcatatccgtgaataatgcgccggactgaaacagcatgctcattttacggcgcgactgatagagtttactgcgggaaagtgccgggatattgtcgccgtcaaaccagatttcgccgctgtccgggcgcagctgcccgccaatcaggcgtaacagtgtggttttcccgatcccggacggccccataatcgcggtcactttgccgcgcggcacatccaggctgatatcattaaacagcatgcgcgaaccgcgccggaagcacatgttccggatctcaataatattttccgtctgtcggttcatgacctcacaaccttaacgttatgttttttgtgtttctgcaacacatacaggactgacccatcataatataaaaaaatccggcagttttcgcctttaaatgcgggtgttactgtctgaattatttatcccctctgagtaacagggtataaacagcgtgatacacaagtatatcagcatttaacattaacgctcccgccgggcgcaaaacgtctgttttacttttgcgcctcagcccgtacaataccctcaatttcccgtacttcattatttctgactgtttttcagcccggaggagagccatgttactcaccagcatccttttactgaccgggttgattctgctggtttatgcctctgaccggattgtgtacggcgcggcggttttctcccgttctctcggcatctccccgtttatcaccggtattctggtggccggtcccggcacgtcgctgccggaactgctgacctccgccggtgcggtgcttgaagggcagccggatctggcgctcggcaccattatcggatccaatattaccaatttactgctgattgcaggcctcgccgcccttatccgcccgctgagtgtccagtcggcggtactgcgtcgtgagcttccgctgatgctggcggtgatggcgctgttcgggctgtttatctggtccggcggtatcacgcgggttcagggcgggtttctggtgcttgcggggctcgccagcctctggctggtggtgaaaattgccgcaatggcgcggcgtgatcagtatgacggcttcactactgaacaaaaccatgaactgccgcaggaaaataatttgccggttgctttattgtggctggtcgccgggttgctgattatgccggtggcggtccggattgtgatcgataacgcctctgcattcacccgctatgcggagatcagcgggcgcatcaccggactgactatcctggctatcggtaccagtctgccggaactgtgcaccacgattgcggcggcggtcaaaggtgaaaaagatatcgcgctggggaatcttatcggcgcgacactgtttaataccacggtcgtggcggggatcccggcgttattagccaccgcgccgatggcagcagacaattttatgaccgatttcgccgtgatgatcgcggccggtgtgttatttattttctttgcggccggccggaaccagcggctgaaccggctgaaaggcattattctgctcagtgcattcaccgcctggttgataagtctttttaccggctgataagcgtcagccattaatacacagacagatactgaaagtgagaaaaaactgatgtcccgaactgattttcaactaacaggtaaacgtgtcctccggattgaacgtgaaggtctcgcgtcactcgaacagtatattaatgatgatttcgataaagcctgtgaactgatattccgctgtgaaggcaaagtgatcatcatggggatgggaaaatccggtcatatcggccacaaaatggccgcgacatttgccagcaccggcacctcctccttctttgtgcatccgggcgaagccgcacacggcgacctggggatggtcacaaagaaagatgtggttatcgcgatttcaaactccggtgaatcctcagaaattcaggcgctgatcccggttatcaaacgtcagaacatcccgcttatctgcatgaccggcaacccggacagtaccatgggaaaagcagcggatatccatctgtgtattaaagtcccgcaggaagcctgcccgctcggcctggcgccgaccaccagtaccaccgccacactggtgatgggtgacgcactggcgattgccttattacaggcacgcggctttaccgctgaagattttgccctctctcatccgggcggcgcgctcggccgcaaactgctgttactggtttccgacctgatgaacaccggcgatgatatcccgcgtgtgccgaaaaccgcctcactgcgtgaagcactggtggaaatcacccgtaaaaaactgggtatgacggttatctgtgatgatgacatgatcattcagggcattttcactgacggcgacctgcgccggattttcgatgcgggcacggacctcaataactgccagattgccgatgtgatgaccccgggcgggatccgcatcaaagccaataccctggcggttgaggcactgaatttaatgcagtcccgtcatatcacctctttattagtcacagaaggtgataaactgctcggcgtactgcacatgcatgatctgctccaggccggagtggtgtaaggactgacgatgacacaaattaccactattgacacctgctatggcccgatagcgcaaacagttatggaaaaagccgctaaaatacggcttcttatctgtgatgtggacggcgtgatgtctgacggcctgatttatcagggcaacagcggtgaagaactgaaggcattcaatgtccgtgacggctacggtatccgctgcctgctgacctccggggtggaggtggcgataattaccggtcgtaaagccaaattactggaagatcgtgccaatacactcggaattacacatctttaccagggacagagcgataagcttttggcgtatcgcgaactattagataaactggtacttcgccccggcgaagtcgcctatatcggcgatgacctgattgactggccggtcatggcagaggtcggcttatccgccgcagtggcggatgcccacccgttattgttacccaaagcggattatgttacacagattgcaggcggccgcggggctgtccgcgaattgtgcgatctgattctgctggcacaaaataagctggatgcggccagaggcctgtccgtctgaaaagaatttcattggttataatggctttatcagggatctcatgagtaaatttaagctttggctgatcattattctggcgcttatcgccctcggtctgctcggctggaacctgtcggtcacccgttcaggtgacaccgacggtaagattgtggaagacggtacgccgacgtataaaacccaaacgtcctcaaccctggcttacgagccgacagggctgctggcgtaccggctgaatgcggatgatgtgcagaactttgctcaggaaaaaataacctggtttactaatcctgtgctgaccacctacgaccctgataaaaccgccacctggactatccgggcaaagcgggccaaattaaccaatgacagaatgttatatttatacggtgatgtgcaggttgacagcctgaccaccgatacacagctcaggcagatcaccacggataacgccgaagtcaatctgataacccaggatgtgagttctgacgataaagtcaccattctgggaacaggactgcgttccgtcggattgcagatgcggggtaattttcgcaatcgtaatgcggaactgatcaaagatgtacagacttactatgagatcccaaatgaaagcaaacatccttaatactctgattgcaacagcaattctggccgtcagtgtccctgctttggcgttaaaagaagatacacagcagccggtgacggtaacatcattaaaacaagcccttgatttagaaaaaaatatcaccacatttactgataaggtcgtggtaaaacagggaacgattgatgtccgcgctgacaaagtggtggtcacccgtccgggcggcgattccaataaaatggtgatcgaagcattcggtaatccggtgactttctaccagatgcaggataacggtaagccaatcaaaggacgcggcagcaaactgcgttatgaaatggccaatgagctggtcacgctgaccggtaatgcctatctggaacagctggacagcaatatctccggtgacaagattacctacgtggtgccgacacagcagatgcaggcattcagtgacaaaggcaaacaggtgacaaccgtgctgctgccgtcacagattcaggaaaaaggcccggctgcaaccggccagaaaggtaagtaacgatttatggcaaaattaactgcaagcaaattagccaaagcctataaagggcgcaaagtcgtcgaagatgtgacgcttgaagtcagctccggcgaaatcgtcgggctgctcggcccgaacggtgccgggaaaaccacgaccttctatatggtcgtggggattgttccccgtgatgccggtgcgataagcattgatgatgaagatatctccctgctgccgctgcacgaacgtgcccgcaaagggattggctatctgccgcaggaagcctctattttccgtcgtctgacggtatggcagaacctgatggcggtgcttgaaatccgcaaagatctgaacaatgatgaacgccgggagcgggcggaagagctgatggaagagttccatatcagccatctgcgcgataacctggggcagtcactgtccgggggtgaacgccgccgtgtggaaattgcccgcgcactggccgccaacccgaaattcatcctgctggatgaaccgtttgccggtgttgacccgatttccgttattgatatcaaaaagattattcagcacctccgtgattacgggctcggcgtcctgatcactgaccacaacgtccgcgaaacactggatgtctgtgaacgggcttatattgtcagccagggccatatgatagcccacggcagcccggaatctattctgaataatgagcaggttaaacgtgtttatttaggcgaaggtttccgcctgtaatgccgtaaggagcccgtgtccgtaatgaagcagagtctgcagcttaaactcagccagcaactggcgatgacgccacaacttcagcaggctatccgtttgttgcagctttccacgcttgaactccagcaggagatccgcgaggcgctggaatctaacccgttgctggaacttgatgataaccatcaggaaattgacacgccggctgaatctgaaccacagaaagagctggacagcgccgaggcactcgaacagaccgccatgccggatgatctgccgctggatgcacagtgggaagaaatctacaccgccgggacaccgtccggcaccggcaatgattacggcgacgatgagctgccgctctatcagggtgaaaccactgaaaccttacaggattatctgatctggcaggcccgcctgaccccctttaccgaaaccgatgccgcgattgccttctcaatcattgatgcgattgatgaaaccggctatctgaccgtttctgtcgatgatatccgcctgagtatcggtgacgatgaagtcaccaccgaagatgtggaagctgtactcaagcgcatccagcgttttgatccggtaggtgtgggcgcccgcgacctgcgggagtgtctgatggtgcagctgaaaattctgccgccggaaaccccgagcctgaaagaagcccttgctatcgcagatcagcatctggcattgttggggaaccgggatttccggaccctgggccgggtgaccaaactgaaagaagaggcgctgaaatccgctattgatctgatccagtcactggaaccgcgtccgggcctggtagtcaacaccggagaatcagagtatgttattcctgacgtcctcgtgagaaaacacggcgaacgctggatagtggaactcaattccgacagcattccccgtctgcgggtcaataatcactatgccgcaatgggttcgcaggcccgcagtgagagtgacagtcagtttatccgcaacaatttgcaggaagcaaagtggctcattaaaagtctggaaagccggaacgatactctgctcagagtcgcgacctgtattgtggaagagcagcaggcgttctttgaacagggcgaagaatatatgaagcccatggtgctggctgatatcgcactgcgggttgagatgcatgaatcaaccatttcccgggtcacaacgcagaaattcctgcacagtccgcgggggatctttgaactgaagtactttttctccagccacgtcagtactgacagcgggggcgaggcgtcctccacagccatccgtgcactggtgaaaaaactggttgccgccgagaatccggcgaaaccgctcagcgacagcaaactgaccgatatgcttgccgaacagggcattcaggtcgccagacgtactgtcgcgaaatatcgtgagtcgttatccatcccgccctcaaatcagcgtaaacagctgatttgatacacattgagaaggaagacactatggaattacaaattaccggccacaacgttgaaattacagatgcattacgtgaaactgtgacagccaagtgtaagaaactggagcagtttttcgataaaatcaacagcgttcaggtgatcctgcggattgaaaaggtgagtaaaattgcggaggcaacggctcaggtaaacggtgcggatcttcacgcctcagcggaaaaagaggatatgtacgcggcaattgatgagatggcagaaaaactcggccgtcagttgtccaaacacaaagaaaaactgagaaaccggtaaattttctgcacccgggtgcatgactgaattaacagtctgaattttctcaggaaaaagcagtgctctgatcccggttaccatggtggttgccgggattctgatcctaagtgaacaatgaaatgaataacgaagcaaatttgtccctgagcgatgtactgagtatcagctgtacacgcaataatattcactgtaccagtaagaagcgcgcgctggagattatcagtgaactggctgccaccgcgctggcgctgccggaaaacacgctgtttgaggcactccttacacgggaaaaagtcgggacaaccggtatcggtggcgggattgccatcccccacggaaaactggacaaaagcgaggcgcaaaccgcctgcggcgtatttttacacctggagcaacctatcgcgtttgatgcgattgataatcagaatgtggacattctgtttgcgttatttgttccgtctgatcagtgtcagacgcatttacacacactgtcgttagtggccaaaaaactggctgacaaagcgctctgccgccggttgcgtcaggcgcaaagcgatgaagagctgtacagtatcatcactgagtgatgataaccggctgacgacaacggataatggcgtattgccattgaaagagaaacgatagggagtcccctcatggtgctgatgattgtcagcggtcgctctggttcgggtaaatctgttgccctgcgggcgctggaagatatgggtttctactgcgttgataacctgccggtcactcttctgccggagcttgccgctaccctggcaacacgcgatacctctgccgcagtaagtattgacgtccgcaatatgccggagtctccggaggtgtttgaggaagccctgaccagattaccggacagtttctcaccccagctgctgttcctggatgcggatcgcaatacgctgatccgccgttacagtgatacccgccgtctgcatcccctttccagtaaaaatctctcgctggaaagcgctattgatgaggaaagcgatctgctggagccgctgcgctcccgtgcggatctgattatcgatacctctgaaatgtcagtgcatgaactggcagaaatgctgagaacccgtctgctcggcaaacgcgaacgcgagctgaccatggtattcgaatcgttcgggtttaaacacggcattccgattgatgcggattatgtgtttgatgtccgcttcctgccgaacccgcactgggatccgaaactgcgtccgatgaccggtctggataaaccggtggcggcgttcctcgaccgccatacagaagtacataactttatttaccagacccgcagttatctggaactgtggctgccgatgctggaaaccaacaaccgcagctacctgaccgtcgctatcggctgtaccggcgggaaacaccgttctgtctatgtggcggagcaactggcggattacttccgctcacgcgggaaaaacgtgcagtcgcgccaccggacactggaaaagcggaaataatccatgactatccgttgtcaggttgaaatcaaaaaccggctggggctgcatgcccggccggccatgaaactgtttgaactgatccagaccttccggtcaacggtggtattccgtaataagcaaaatgaagaagcccgggcagacagtgtgctcgccatgctgatgctggattccgaacagggcagttttattgaagtggaagcaacaggacctgatgaaaattctgccattgaggcaattatttccctttttgattcaggttttgatgaagattagttatactaaccgaaatattttacttaaagaaaactgatacgctgtttcgttcacgcagcccggcggttcgtgatcctgatctctttcctttcggaggagaacagcctactatcagattaattatcaaatgagcacccccctccttctggtgtgggggtgttcttttgtattggaaatgatttggagtgtggtatgaaaaagcccaatataattattaatgaactggacgcggagcgtctggatatgctgctggaacagccggcttatgctgacagtccggttgccgaagccctgaatgaagagttagatcgcgcggaaatcctgccgccggcagaaatgcctgccacggtcgtgacgatgaacagccgcatccgctttgaagatttatcgagcgggaaagagagtatccgtaccctggtgtacccggcttcactgaaagacagtgctgaacagctgtctgtgatggcaccactgggagctgcgttactcgggctttctgtcggtgatgagatctcatgggaactgccgaacggtgaagcaacgcgcgtaaaagtatcagaaattatctatcagcctgaagctgccggtgagttacaccgttaatccgctttaagccggttctgcgtccgtttcaggcaatctgcgggcgcagcttcctcaggggttcctttcttcacacctttattgcatgatgtttctctctttatttcctgaaggaaactgatcatggctgcctattctttgacatctttgtttggtatgagcggagctccgggcggatttccggtcattctgggttttgaacagcagctgttattactgtggcggggctttatgctgctggcagtctgaatatcatccgtacagcacaattcaataacgcaagttaatcatgccgcagcggcttcttccgctgcggcatttttatttccgccccgcccttcacggatgattatcacaaaaaaattattgcgcatagtaatcattatcaatatcattccgtttttattttggctgtttattcttctgatattgagactcacacatgaaatctgctgcgcatttacgcagaccgcattgctgttcccggtttgtgctgacattcccctttatctttattcctgtttttcatgcggttgccgccgatgatactctggttgtcactgccgccccgcaagaccgcgaagggagttacagcggggataatgtctattccactctgaaaacactgaccccgcgtaatgaaacgccgcaatccatcagtattgtcacgccgcagttgatccgtgactttaatgtcacttcagtggatgacgcagtaaagtttgtcagcggtgtaactcagggcaacacgctgggcggcattgaggacgggtttgtcaaacgcggcttcggctccaatacggacggctctgtgtttatcgacggggtacgcagcaaccaggggctggcgatggatgccactactgaacgtgttgatgttctgaaaggctcttcttccctgctttacggtattctgaatccgggcggcgtgataaacctgatctccaaaaaaccacagtatcagtggcagggacgcatcagcggacggacaaacagcaacggcggcggtaccggtacgattgatgtgaccggccctctcggcaatggcgtggcagtccggctgatagcagaacgccgccatgaagattactggcgcaatttcggggaagatcagcacacgttgctggcgccttccctgagctggctcggtgacagcgcctcgttcaatgtggcttataccgaaaataaattcgatgtgccttacgatcgcggaaccgcttttatcggcggcagcccgatccgtattccttataatgaacggatagatgacaacgctaatcacgcatacgggaaaaataaacgtctgaccgcagaataccggcaggaatttgacggcatctgggaaaccggaattaagtatgcgtggatgcagcgccgctacgacagtaatgagatccgcgcgacggctatcaacccggagaccggaattgttacccgccgtgctgatgccaaccgtggctttaatcatcagaccacctatatcggctgggatatcagcggtacaccggaactcgccggtatgcggcatgacatcacgctcggggctgattacgaaaagaacgaaacctacaaagccaggtccttccgcggcaagccgtcaaaacaattcaatatgtaccatccggtatacggcgaatcaccggtcaccacagataaaaccgccgatgacgcaaaaagcaacctgcgcgccacggtgtacaacagttcactctatgccaaagacagtatccatctgaatgaccagtggattgtcgtgctcggaggccgtctgcagcgctatacgcaaaatggcagcagcggatggataaaccatcagacaacactcaatgacagcggttctgaatttgttccgcaggccggggtcgtctacaaactcacaccggaactggcactttacagcagttacagccaatccttcaccccttccgcacaggtggatgatgacggcaatgtggcctccactgaaaaaggtcagacatacgaactgggtgcaaaatggcagacaacaccaacgatgctgacgacctttgccctttaccgtattgatgaaaaagacatgtccatctttatgaacggcctgaaccggaatatcccgaaatcccgctcggaaggtgcggaactggaaattaacggcgaatttgcgccgggatggcagatagcggcaaactacagcctcaacagaacgcagattaaagaagataatctgaaaccccagaatgtcggtaaccagctggtcaatgccccgcgcaatatgggcagcctgtatctgacgcataccctgactgtaccgggcttaccgggtgaactgcgcttcggcggcggcggacgctatgtcggcaaacgggccggtgatccggaaaacagtttttacctgccggcgtataccgtcacagatgctttcgccgcgtggaacgggactgtcagcggacatgagacccaactgaaactgaatgtgaacaatctgctgaacagggaatactatgcgtccagcgccggaaacctgcgtgtcatcgccggagagccgcgcaccctgttcctgaatgcctctgtggacttctgatatgaaacatctcttttccgggctgctgctgatggcattttcgctgctgtgcggggcaaaaaccgttacggacagtctcgggcggacagtcacggttccggatgatccgcagcggatagtactcggtgaaagcaggatgctctataccctggcactgatcgaaaccggtaatccggcggcacgcgtcgtcgggtggccggctgatttacagcgactcgattcgcagacatggggaaaatatgcggctgcatttccggcgatcagggatattaccattgtcgggaacgataatttttcacagcttaatattgagaaaatcatcgccctgcaaccggatctgattattatgccggtgtatgccaaatcccgtcctgatgaaacgcaatttgcacaccagaccgcagccgccggtattccggtgatttacctggatttcagggtggatccgttgcggaacacggttccgtcactgaaaacgctgggcgaagttctgaaccggcaggaaaaaactgccgcttttactgcgttttatcagcagcatatgaacgtgatccgcaaccgtctggctatgcacaatccgcatcgccccaaagttttgctgcagttacatctcgggaaaaaagcagaatgctgcacgactgcagcttccggaaatctggccgatttactggccttttccggcggggataacattgcagcagggaagttcagtggtgttttcggacggctcagcccggagcaggtattgtcggataatccggaatattatctggtgaccggcagcggcggaagagataaccgggggcagttacagctggggccggatctccgccctgacaccgcccggcaaagcctgcaggaacaattacagaaagatccggtgattgccgcactgcctgctgtccgggaaggacggaccgccgcactctggcatcatgtttatctcagcccgtggcatctgctggcagcggagtttttcgcgcgggaactgcacccggatctcttttctgatgttgatccgcagaagacactggatgaaatgaaccggcggttcctgtctgtaccggaaaccgggacttactggctgttttcgcgataatcgctgctgttttctgcattttcactcccggaggcggatattccgactccgggagtgacacacttactgccccgcaatactcatttccggcagccagactgagccgcactgaatgttgctgcgggtttcaatatcgtcgccggtggcgataatgctggcccacatgtctttcaggtttccggcaatggtgatttcactgaccggatactgaatctcgccgttttccacccagaaaccggatgcgccgcgggagtaatcaccggtaataccgctgacaccctgtcccatcagttcggtaaccaccagaccggtgcccatttcccggagcatgtcgtcaaatcccagcccctgaccggcaatgtgccagttgtggatcccgcctgcatggccggtgctcttcagccccagtttacgggcagcgtaggtggtcatcagccagttgttcagcacaccgttttcgataatcaggcgatcttctgtccggaccccttcgctgtcaaacggggtggaggccagtccgccgatcacatgcggcagttcgcggatagtcagccagtccggcaggatctgtttaccgaggctgtcgagcaggaaggtggatttgcggtacacggaggtgccgctgatcgccccgaccagatgcccgaacaaaccagttgccacttccggggcaaaaatcaccggcgctttctgtgttgccagtttgcgcggagcaaggcgggacagtgtccggcgggcacactcttcccccacccactgtgcagatttcaggtcatccagtttacgtgcgatggtataggcgtaatcacgctccatatcaccgttttcttctgcgatcacacaggcggacatggagtgacggctgctgcagtagctttgcagcatacccagcgtgttaccaaacacacggataccgtaatggctgttaaagctgccgccttctgtgttggtgatgcgcggatcggcactcagtgcggctttttccgcattggcggcatagtcgatagcctgatcagcactcacttcggacggataaaacagttgcagatccggtgcctcaaaagccagtaaatcacgatctgccgggcccgaacacggatcttcagatgtatatttcgcaatgtcgatcgccgcttgtacggtacgggcaatcgcctcttcgcttaaatctgtggaggatgcgctgcctttgcgctggttatgatacaccgtgatccccagtgcgccgtcactattaaactcgacattctccacctcacccatacgggtgctcacactcatcccggtggttctgctgacagcaacttcggcgctgtcacaccctttctgtgcaatactcagtgcctgcgaaaccgcttgttccaggcgcgtacgctgcgccataatctgagaagtgatattcatcaatcaggttccaattcaataaattaaggggccgtcagctaatcagagagctgaataggtgttatccggccttttccccggttacaatacgcaataatcaaatgttaacactcacaaacacagagatcatccggcacccgccgctctgtgtttcgccacnnnnnnnnnnnnnnnnnnnnnncccggcccccgccgctctgtgtttcgccacaggaaatactattatggcaaagcagcctgaagactggtttgaagaacccgatgcacttcctcaggaggaagaggatgacgagataatctgggtcagcaaaagcgaaatcaaacgcgatgctgaagtcctgaaaaaactcggcgctgaactggttgcactgagcaaaacccagctggaacgtattccgctggatgaacaactgctcgaagccatcctgcttgcacaaaaaatcaagcgcgaaggtctgcgccgtcagttacagctcatcggtaaactgctgcgggcccgtgacccggagccgattaccacggcactcgacaaactgaaaaaccgccataaccagcaggttgtcctgctgcataaactcgaagatctgcgcgaacgcctggtcaccggtgatgacaccgtgacggaagaagccgttgcgctgttcccgcaccttgatcgccagcagctgcgtgcgcttatccgtaatgcgaaaaaagagcgcgaaggcaataaaccgccgaaagcttaccgccagctgttccagtatctgaaagaactggcagaaagcgcttaatccgccgtcatggtcaggggggtcagcaccagctgaatatcccccggccactcttcttccgcatcccggcaggtaccgataatggctgaaaacagccgccgctgccgtgcggtaatatgttcaaacgccagtatcaccggcagatcaatcccgcctgtcagcatatcccacagtgcatccgtgttacacccgaagtacggcagctgaaatttatcactgaactgctgataaaaatcgtctattgtccggatggtgcggaagtcaaaacgcacaatgctgatatcaggtgtcatgggttaattggcctgctgaaacgaacggtaatgatcagtggtgacataaatcagcccgtcactggaataaagcagacgatcactgccgcgatggccgcagttatagtttatgtccgcctcaaaccactgccgtgatggtgcatccggcagccctttttcccggttgccgaaacggtcaccgccgatagctttacccggcatcacctcacagagattaccttttgacggttgccagcccgcattacgggcggcttttttcgtcacatagtaatccggcagacgctggtgctgctgcacatagctgaccacccgtgactgtgctgtcagggcatcaatgctctgcggctgttctgtatgctgcggcaccggctctgacggacgggtttcgataaactgccccggtaaccccgccagccaggcggagaccgccacaatcagaacaatcaccagcgtgccgtatttctgcatcatcaggccgttccgccgacggtaatgctgtccagtttcagcgtcggctgaccgacacccaccggcacgctctggccttctttaccgcagacaccgacacctttatccagtttcaggtcattaccgaccatcgacacctgctgcatggcctcaataccggagccaatcagtgtcgcgcctttcaccggtttggtaattttaccgttttcaatgagatacgcttcggatgtcgagaacacaaacttaccggaggtgatatccacctgaccgccgccgaaattcggggcatacagaccgtttttcacactggcgataatctcttccggcgacgtttcgccggccagcatataggtgttggtcatgcgcggcatcggcagatgagcataggattcacggcggccgttaccggtcgggtcaacccccatcaggcgggcgttaagtttatcctgcatataacctttcagaatgccgttctcgatcaggacgttatactgtccaggcaccccttcatcatcaattgccagtgacccgcggcgatcgccgatagtaccgtcatcaacaatggtacagagtgatgatgtgacctgctgaccgatttttccgctgaatacagaggcaccacggcggttaaaatccccttccaggccatgaccgactgcttcatgcagtaacacgcccggccagcccgcgcccagcacaaccggcattgatccggccggtgccgcaacagcagagagattcaccagcgccatgcgcaccgcttcgcgggcaaaatggtctgcgcggatctcaccgtcttccgtaccgaggaaatattcataaccgaaacggccaccgccaccgctgccgccgtgttcgcgtttaccgtcctcttccaccagcacactgacagacaggcgcaccagcggacggatatccgtcgccagcgtgccgtcagtggcagccaccagcacttcttcatagacaccggtcaggctggcattcacttcctgcacacgcggatcttccgcccgggccacacggtcaaggcggtgcagcagcgcgattttttcctcacgcggcattgcacgcagcggatcgagtgcggcatagagtgctgtgttattgacacggtgcaggctctgcaccttgccgttaccctgctcacggacaatactgcgggcggcggatgcactctgctgtaatgcggtcaggcttatctgatccgcataagcaaagccggttttctcgccgctgacggcgcggatcccgacaccctggtcaatattgtaagagccgtttttgataattttatcttccagcacccaggcttcatgaaaactgctctggaagtacagatcgccataatcaatatggcgatccgctaactgtgtgaggacagaaaagagatcctgttcatcaagatcatgggcggtcagcagatgattgctgacagttgaaaaactcataatttactctttacctgtggtgtttttctcaatcagtgaggtcagctgcgggcggaaacggttatgtttcaccacgcggatctgctcacgcattgaggttaagctgtccggacggatatccacgccgatggcggccaccgcatccgtatttttcttcatcactttgccccagccgtcaacagccatggtgtgtccccatgtgcggcgggtgccgtgtacaccgacctgtgccggtgccaggataatgcactggttttcaatcgcacgggcgcgcagcagcggctcccagtgggatttaccggtcagccgggtaaaggccgccggaacagagataatctccgcgccctgctcacgcagtgcctggaacaggcccgggaaacgcagatcataacagatggtcataccgagacgacccaccggggtatccaccacggtgatgtgctcgccgcgctggaagatttttgattcattgtatgaaccctgctcatcatcgatattcacgtcaaacatgtgaattttgtcgtaacgggctttgatttcccctttatcatcaaacagcaggctgctgctggtgatacgcgccgggtcttcgcggctgatcatcggcattgagccgaccaggatccacaccccgtagcggcgcgccatatcagccactgctgactgcagcgggccttcgccctgcacttccgcatacttctgataagtgttgcctgatgcaaaaatcagcgcattttccggtgtcatcaccagtttgatattatcaggcagttgtttgatctgttgttcgatttgcgccaaattgtgtttaatatttgtgccgctgcacagctgcaataaagccacatttgcgtttttcattcccgggtctcctttaactgacgcaaaacttcatctatcttcggctcttctaaactgccgctcaggtgataccgtatcaccgaaattttactccagagcgggccgagtaccttactggccacaaagactgccgctccggctatcgggttaaccacaaaggctgtcgccaccccgaccgtcgcagagagttccggtgtgacaaccaccgacatatcaatacgacgctccacaagataaactgaaccgctgaagctgatatccgccattaatccgtccacgcgggtatcggttgtctttaaaataccatcttttatcacgcctttaccgcgtatgctgtcaaaaacgaagtcattactgaaagtatccgtgaaatcgagctgtaatttgcgcagtaatgcatcaaaactgacgagccgcagcagtttaccggcgttaccgccgcccatccgctcaatcgcccctttaccgagcgacgtgctgataataccgttcagggttgccacatccggcgaccagggtacatcccgccagctcaggtcaaaatccacattgaacggtgagccggtgataggcaccagtaccccgaaataggcagccatattatcaaagaccggccccttaaactgacctttaaagtgcgacaatggctccggaccggcatcccagcggccgctgagtgtcagttcactggcactgtttttgacggttgccgcatccagcaccagtgaattattttccggccagactttcgcattcaccgtaccgatattcaggccgctcacccagcaggcttcacagcgcagtgtgaccgcaggccagctgccgacgcggtaatccgttttggtggtttgactgcgctgcgactccggcagggcattctgaatcgactccggattatagtagagataatcaatacttgcctgccacggtccggaagccggaatgcggatatccccgcgcagctcctgactgtccgaactgagcagccagccgttttcctgcggatgaatgcgcagtttcacctgattccagcgctgtccggcaaaatccgcatacggggcggaaatatcaatattgcccggcagtttcagtgaggcaggctgctggtgattctgaccggcaacggccagcgcaccgacccactcttcaccgctgatcggcggcagggcaatgctgataacatccggcgtgactttctccggcacttttgtacccggaacgattgccgcaccattcagcgtgaggatatcgccgaggcgccagtccgtcagaacgctgaacgatttgccgacggttcccccggctttcagggtgtgttctgtccctgaggcatgcacgttcagtgtgccgctctctgctgcccagcgccggacagccggtaaggtgctgctggtcagtttgccggtctgaccttccagatccacggtgtagctcatttcccctttctgcggcagggcaatgttcaccttccctgtccacggtaacgagccggttacgtgctgttttatcaccgccggtacgccgtcgatgcccttcatctgccagttaccgtccaggtcgatattgacggcaaaatcagacggattttcttgggtggtaaagcggatattcagcggctgcccgaaccagtgtgccgtgatgcggtcactttccaggtcgccgttatcaaaacggaattgtccgctgacacctttgagtgtgctgccgagcggtaccacatcaatatcattatttttcagattaacatgcccggtcgcccgcaccatctcattgaagttaagcgggatttccagtttaagatcacccttaacctcaccaccgattttcagctgctccagagtattgccgatagagcttttcatcggtgtctgatcaaaatatttacccagtgattcgcctttgccttcaatatcagactgaatatagaggcgttcaaccatgaaatccggaatatccgctttcagattgcaggcggtggcctcgcccagttttgcttcctgtgcactgatccacaatccctggttatggaagttcagatccgcgtccatgtttatcagagcaggccattcctgatcatatttaaaggtggcgtcacgcagcggtacccaaatctggaactgcccttcgtttttgcggaacgggaagtccgccgggttaccctgaaatatgaccgtggcattttccgctttcccggcgatcagtgcctgtgtcaggtattcgctcagaaattcccccatcagcggcacagggaaatagcgccaggcttcaccggcatccgtcagggtcacaccgccgaggatcccgagagacggcggtctgtccttatcatgctgatagcggaagttgccgttcgcccgcaacgcaccggattgcagatctaaattatcactccagaggctgaagttgccgtccgtattattccactgcacctgtccgcggctttctgataccgccagcggtgcggtaaacatcggacggtagtccagcacactgtcatcaagggcaaaacgcagaatgccgcgtgcctgcccgccgcgcaatacgccgctgaaatgagataccgacggtaattcttcccgcgctttccagctgacatcctgccaggaaacatccagttcgaggttttccggggcggccggggtgatatcaagagcaaaatcgcggataagacctgacggctcgcgctcctgccaggctttgacaatatcattggtgaggaaagagaacgtcggcacaatactgctcagacgcgccagctcaatatcattggcgcggatacgcagatgcggattgccgccgtatttggccgacggcggggtataaagcagtgacagactgccttccggccactgctgcccgtcagttttcaggttcagcagatccgggatattaaacagccagccttccccctggcggcgcatctgcaccagcagatcctgaacttccagggtatgagtgtccttgccgaccagccagtccgcctcgccggagttcagtctgaccaggccccgggttatcgtccccttttctaccgtcatccagccggccaggctgaaaccggccttgttcagcccggtgttatcacgcagccagcggctgaaccacggtgtcatatcaatatcatccgcctggaggtagaccgttccctcatccagcagaccattgacatcccgcagatccagacgcacctgcagccagccgcgcgggttattcaccgaggaaagactgatctccccctgagcacggtggcgtttgctctgattgagccatgacagacgggaaaccagcaaagtggcgggatcgccggatggcgtgagaaaacggatttcactgtcgcgcagatcaaaattatcaaagcgctccagccagaggccggacatcgcatcatcggtttcaatgctgctgccgtcactgctcagcggctgtttgtaatccagcgtcatatgccagaacgtcagatcacggaaactgacctgaaaacggaataacgtccgccagatatcgagggagaggtcgattttttcagctgagatgtctgcatccggggcggtaaccgtcagatcacggagtgtcagcgccgggccgaacccctgccagcggccgctgatttccccgattctgaccgtggcaccggtcatttgtgagagtttttgttcgatctgcgggcggtattcattaatctgaggcaacagatagcgcagaccgccgagcaccagtgccgcagcaatcaccataacaatcacacatgtcagtaaaatcccgggcagtcgcctcactggctctccttctcctgcagctgtcaaggccggcggaaccggatatccgcttatatccggcagtataccgccaatgaattacatcatgacgacatcaaaatgttcctggctgtagagcggttcggcgcgaacctgaacctgtttaccgacaaaaatctccacctctgccagggcatgggattcatccccctgcaatgcctcagtcactgccggtgaggcatagacgaggaagcggtcaacatccagcagatggtgcacgcggacaatctcgcgcagaatttcatagcagaccgtttccaccgagcggacactgccgcgcccctgacaggtcgggcatttctcgcacagaacatgttcgaggctctcccgcgtgcgtttgcgggtcatctccaccagcccgagctgtgaaaaaccgttgatagtggtcttcacgcgatctttggccagcgccagctccagcgaactgagcacccggcggcggtgatcttcatcggtcatatcaatgaaatcaatgataatgataccaccgaggttgcgcagacgtaactgccgcgcaatcgcctgggtggcctcgatgttggtattgaaaatggtttcttccagattgcggtgcccgacaaacgcgccggtgttgatgtcgatggtggtcatcgcctcggtctggtcgataatcaggtatccgcctgatttcatttcaaccttgcgctccatcgcccgctggatttcattttcggtatcatagaggtcaaaaatcggctgactgccctggtacagttccagtttggcggtcatttccgggatgtaatcatccacaaattcctgtaactctttaaagctcaggcgggagtcaatccggatgcggtcgagtgactcaccggcaaaatcccgcagaatgcggtgtgccagcgccagttcaccgtagattttggtgcgggtggtattgcgttttttgcgctggataactttggtccataaccggcgcaggaacgcggcatcagaagtcagttcttcttccccgaccccttccgctgccgtgcggataataaaaccgccgtcctcatcacaataacccgccacaatgtttttcaggcgctcgcgctcttcttcgctctcaatgcgctgggaaacccctacgtgagaggcgcccggcataaacaccaggtagcgggacggcagcgtgatatcggtggtcagacgcgcgcctttggtacccagcggatctttgaccacctgcacaataatatcctgcccctgatggaccagttccccgatatcgcgggtgcggaatttctctttttcatccccggaaatacattccgtgtgcggcataatatccgaggcatgcagaaaggctgctttatccaggccaatatcgataaaggccgcctgcataccgggcagcacccggctcacacgccctttatagatattgccgacgataccgcgtttagcctcgcgctcaatatgaatttcctgcaggatcccgccggtaatataagcgacccgtgtttcagacggggtcacgttgactaaaagctcggctgtcatggtatttctttcccgtcaatatgttccggtacaaccccgttcagggtatccgtgtaccgcttaattaattcttcggtttccactaacggtaatcccaccacagcatgatagctaccgttaattttgcggacatagcgcccgccctggccctggatgccgtaagcaccggctttgtccatcggctcacctgtctgaatatactcgtttatttcgtcatctgataaccggcggaatgtcacatccgtcacaatcagtgtactcagtgtccggaaacgatcagaaaccgcgaccgccgtcatcacctgatgtgtgcagccggacagtgcgctgagcatggcaaaagcatgtgccgcatcgcggggcttctccaggatatcaccaccgagtaccacaatggtatcagagccgataaccggccgctcttccgctgccagcgccaccccggcctgtgctttctcccgcgccagacgtaccacgtaatccgcggcgggttcaccgtcacggcggatctcatcaatacagggggagagtgtttcacactgaacattcagcagccggataagttcccggcggcggggagaggttgaagcaaggtaaatcggcagcattcagaggtcctgacgttttgttaacgtatcacgccgccgttccctgattaatgaacagaaaagtgacggcgggtcttacgcagtaataaaaaaatccatggccataagataccattgaccagactgttccagaagacttccggatgaaacacaatatcggacaataaaaattctgcccagaaaacaaagaactgcatcagcactgacagtaacataatgaccagcgactgctgccacagcgccatattgcgcagcagctgatgtctgaatgagaccagataggtgacgatagacagactcagggcatgcacaccgagcgtggatccttcaatcaggtcaatgatcatgccgagaaagaaagcggagccgacactgacccggtgcggcagcgccatcacccagtagataagaaacagcatcgcccacgacggacggtaaaactgaatctgctccggccagggcatgatttgcagtaccagtgctatcagaaaggaaagccagacaataatccggttttgtccccggtaggtattcattgttgcggcctcatcctcagcggccgggccggtgcgggatcagcagccggatcctgagcggccggtgcggcagtggccggcgtgtctgccggttttggctgtgcaggtttaggtctggccggtttcggcggtgtcgtaccggcggaaggtgccggagcggcaggtgcgtccggcgctgccgccgccgggtcagtttccggcgtctggacagacgggatcacctgcggcataacctgcatgatacgttcgttggctgcgcggtacacctcagacggaccggaaggctcacgcgggttgctgtctccgccccataataagagcagataacgcagacgctgaaggtcagccgtcggtttggcactgataatggtataagcgcgctgattatccacttttaccgaagagacgatcccgaccgggtaaccttccgggaaacggccgccgaggccggaggtgaccagcacatcccccacgcggatatcaatattgttcggcagtggttcaagctgtaaatcgtcagtacatccggtgccggatgcaatgacgcgaatgtcgttacgcagcacctgaatcggcagtgcgtgagtggtatcgcagatcagcagaacacggctggttaactgagacacggcaatcacctgccccaccacacctttatcactgatcaccggctggccgtcatacacgccgtcacggctgcctttgtcgatcaccacctgctcacggtacggggtgttggctcccgccatcacctgagtgaccatcatgtgctcatcctgacgcagcggtgaaccgagcagttcacgcagccgggcattttcctgcttaaattgttcaagcagctgattctgactgcttttaaccagcagttcctggcgcagagcgcggttttcaaattccagctgctcgcgggtggcaaagttatcagagataccgtccagtaactgacgcgggccgttggctaaaaaatagaacgggctgaccgccgtatccagatagttacggattttggtaaaagcatcaatccggttatcaaccacaatcagtccgatggcaaaaataaccgcaacaataatgcgaatctgaagggaaggcccccggctaaaaatcggcttcataggatgcgatatcaggcactacagtaattccgtccgggaagacagagtgtgtatccggcgagctgggggagcggactcccccggcctgcagtattgaacggacgggagtccgcttattcttcactgagaagatcgctgccgtgcatgtcgatcatctcaagtgctttgccgccgccgcgggcgacacaggtcagcggatcttccgcgacgataaccggaatcccggtttcttccatcagcaggcgatccaggttacgcagcagagcgccgccaccggtcagcaccattccccgttcggagatatcagatgccagctccggcgggcactgttccagcgccagcatgactgcactgacaataccggtcagcggctcctggagggcttccagaatttcgttggagttcagggtgaaaccgcgcggaaccccttcagccaggttacggccgcggacttcaatttcaagcacttcgtcagtcgggtaagccgaaccgatttcgtgtttgatgcgttctgcggttgcttcgccaatcagtgaaccatagttacggcgcacatagttaatgatagcttcgtcgaaacggtcgccgccgatacggacagaggaggaataaaccacaccgttcagggagataacagccacttcggtagtaccgccgccgatatccaccaccatggaaccggtcgcttctgataccggtaaaccggcaccgatagccgctgaaaccggctcttcaatcagataaacttcacgtgcaccggcgctgagcgcggattcacggatggcacggcgttcaacctgggttgcaccgaccggcacacacaccagaacacgcgggctcgggcgcataaaactgttactgtgaacctgtttgataaaatgctggagcattttctcggtcacaaaaaagtcagcgataacaccgtctttcatcggacggatggctgcgatattgccgggggtacgacccagcatgcgtttggcctcatgaccaacagcagcaacacttttggttgaacccggacgatcctggcggatagccacgacagacggttcatccagaacaatgccttgtcctttgacataaatcagggtattggctgtacccaggtcaatcgacaggtcgttggaaaacatgccacgaatttttttaaacatacaaaaggataatcctgcaagccggggacggggaaaaacccgtctactttaccaaccacgtttctttgcgacaagccacagattgcaccttgccaacagcgtgtccacatcacatcagggagcggtctattctagataatttttatatactgcgcagtataaagctgcataaaaacgcagactttttcacatatttgatgaaatacgcacaggcagattaaaattaatgtaaaaaatccggcagttgccctctttttttcattaattcctgcaaacttccgaacagttgacctgtaactatgcatcaagttcaaccggattctatataatatacgcaatcttacaatcggtctgatgcccgttatctctatcctcgcattaaaacaatccgcttaatcacggataagacgacaaaaacaccgggttattcaccggattatgatgaatcagcaacaccctttgctcagaataatctcaaaataacctgaaatataaatatccgtatcccggatacagacccgttatatcccgttctgtccgtattcagcgccataatatttccgggacttgccaatctgccggtgcggatgcactataacgcaccacaacagcagacaactattcacaacggcttattcctgcgctgttcatcttacgtaatatccgcctccggaacgccggttatgtgagcacaccggcagaaaagcaccctgacctccgggcgtacctgttaaaaggccggcaggcagactactatcagcaaacggatgcaggatgcagacagataatacgtatgattaactggtcagccttgtaccggttccggtctgttcagaccagtattttgctgcgaactgcaatgaaatgtttataatgtcgcccttcctctgtaaaaattaatattgcctgcggtgagaaaaaggtgacaacgcattaacatcgcgttatcttgtgcgtttacgttagattgcaggagatggcagcaggatgaccgaaagttatcatatattgttactgaacggcccgaatcttaacctgctgggcacgcgggaacccgataaatacgggacgctcactctcgcggatatcgttgcaacgctgacccgcgatgccggtcagtgtggcgttacactaagccacctgcaatccaacgccgagcacgaactcatcgacagaattcatgctgcacggggaaacaccgattttattctgataaacccggccgcattcactcacaccagtgtggctctgcgtgatgccctgctggccgtcagcatcccgtttatcgagatccatctgtcgaatgtacacgcacgggagccgttccgtcaccactcttatctctctgatatcgccaccggcgttatctgcgggctgggtgcggaaggctaccgttatgctttacaggcagcggttcaccgtctgtcacaattaactcaacactaagagtacggaatcatctcatggatattcgtaaaataaaaaaactgatcgagctggtcgaagagtccggtatttctgagctggaaatttctgaaggcgaagagtcagtacgcatcagccgcgctttaccggttcaggctatggccgtaccacagcaatacagcgcacctgttcagcagcctgctctggcagccgctgttgcaccatccgcaggtcttgctgatccggcgccggaaaaagagattgccggccatgtggtccgctctccgatggtgggtacgttctaccgttcaccaagcccggatgcgaaagcctttattgaagtcggtaaacaggtcaatgtcggtgacaccctgtgcatcgtcgaagccatgaaaatgatgaaccagatcgaagctgacaaagccggtgtggttaaagcaattctgttaaaagacggcgatgctgtcgaattgggggagccactggtcgtcatcgaataacggggcgaatcatgctggaaaaaatccttattgccaaccggggtgaaattgcactgcggatcctgcgggcctgtaaagagctcgggatcaaagcggtcgctgttcactcttctgcggatcgtgatttaaaacacgttctgctggctgacgagaccatctgtatcggtccggcagcctctgcgaaaagttatctgaatatcccggccattatctctgctgctgaaatttccggcgcacaggccatccacccggggtacggattcttatctgaaaacgctgattttgccgagcaggttgaacgctccggcttcacgtttatcggcccgaaagctgaaaccatccgcctgatgggcgacaaagtttctgctatccgtgcgatgaaagaaaccggcgttccgtgtgtgccgggctctgacggcccgctcagcgacgatatgccgctgaaccacaccattgccaaacgtatcggtttcccggtcatcatcaaagcctccggcggcggcggcggacgcggtatgcgcgttgtccgcaatgatgaagatctggaagaagcgattgcaatgaccaaagccgaagccaaagcggctttcaacaacgacatggtttacatggaaaaattccttgagaacccgcgtcacgttgaaatccaggttatggcggatggtcagggccatgctgtttatctggcggaacgcgactgctccatgcagcgccgtcaccagaaagtggtggaagaagcccctgcaccgggtatcactccggcgctgcgcaaaagcatcggcgaacgctgtgccaaagcctgtatcgatatcggctaccgtggtgccggtacctttgagttcctgtttgaaaacggcgagttctatttcatcgaaatgaacacccgtattcaggtagagcacccggtcactgaaatgatcaccggtgttgacctgatcaaagagcagctgcgtgtcgcatccggcctgccgctctctgtgaaacaggaagatatcaaagtaaaaggtcacgcgatcgaatgtcgtatcaacgccgaagatccgcacaccttcttaccgagcccgggcaaaattacccgcttccactctccgggtggtttcggtgtccgctgggaatctcatatttacgccggttatactgtaccgccgtattatgattcaatgatcggtaagctcatcacctatggtgaaacccgcgaaattgctatcgcccgtatgaagaatgcgctggcggaactgattatcgacggtatcaaaaccaatatcgagctgcaccagctgattatgaatgatgagaacttctgcaaaggcggcaccaacatccattatctggagaagaaactcggcctgcacgaggtctgattttctgtcgcttttctttctcaggcccctgtcaaacaggggcttttttataaagagccttttataaagagtatgttatgccctggatccaaatacgattaaattccaccggtgctgatgccgaagttatcggtgatgaactgactgaaaccggtgcggtctccgtcacctttcaggacagccacgacaccccgatttttgaaccgctgccgggggaaacccgcctgtggggcgacaccgacgttatcggcctgtatgacgctgaaacggacatgaaagccgttgttgcgcaattacagcagcatccgctgctcggcgaaaactttgtccataaaatcgaacagattgaagacaaagactgggaacgcgagtggatggataacttccacccgatgcgtttcggtcagcgcctgtggatctgcccgagctggcgtgagatccctgacccggatgcggtcaatgtgatgctcgatccgggccttgcattcggtaccggtacccacccgaccacctctctgtgcctggaatggctcgacgggctggatctgaacggtaaaaccgtgatcgatttcggctgcggctccgggatcctggcgatcgccgccctgaaactgggtgcgaaagaagctatcggtatcgatatcgacccgcaggcgattcaggccagcagggacaacgctgagcgcaacggcgtttcagacaggctgaccctttacctctctgataaaaagcctcagacgctctctgcggacgttgtggtggccaatatcctggccggtccgctgcgtgaactggctccggtgatcggcgcactgcctcaggccggcggattactcgggttatccggtgtgctcgccacccaggcggaaggtgtggcagatgcttaccgtgacgtctttgagattgatgagattgccgaaaaagaagaatggtgccggatcaccgccacaaaacgcggctgacattcttactttttggtatataaatcgtgcatttgcgtgattcagtgaatatattttaagcagtttcacgcaaacgcattttattctgaaaattaaatcagaaaaccgcactgtatgctattttacgctaacttattgttacaaaacattaattaataaaatctgaaaaaagcaataaaaaaaatttcgccgtaaaggtcgatttgctcaaagtttgtcctttcatatctttgaaaaaatgcgtaatatacgcgcccttgcagtcacagtatggccacacttcttcgtctatgcgtatcggacaataccagttgaaaaaccgccttatcgcggcccctatggcaggcatcaccgatcggcctttccggtcgttgtgctatgaaatgggtgcgggtatggccgtctcagagatgctctcttccaaccctcaggtctggaagacggacaaatcgagattacgcatggtacacagtgatgagccaggtatccgttctgtgcagatagccggtaatgatcccggtgaaatggcggccgcggcaaagattaatgttgccggtggtgcgcaggtcatcgatatcaatatggggtgtccggcaaaaaaagtgaaccgtaagctggcaggctccgccctgctgcgttatccggcgctggtggaagagattctgaaagcggtggttaatgcggtggacgtgcccgtcacactgaaaattcgcaccggctggtcaccggaagaacggaactgtgtcacgattgcccaattggccgagcgttgcggtattcaggctcttacgatccatggcaggacccgcgcctgtctgtttaatggtgaagccgaatatgacaacatccggacagttaagcagactgttgccatcccggttattgccaatggcgacattactgacccgcttaaagccagagcagtactggactacaccggcgcagacgcgctgatgattggtcgtgctgctcagggaagaccctggatcttccgggaaatccagcactatctggacacaggcgaactgttgccgcccctgcccggtgcagaggtgaaacgcataatgtgcgagcatgtgcgggaattgcacgacttttacggtcaaagcaagggagcccgcatagcccgcaagcacgtttcctggtatatgcaggaacatgcacctgatgttcagtttcggcgcacattcaacgccattgaggatgccggcgaacagctggaggcgttggaggcatattttgaaaattttttgcgtaaataaagaaaagagctgacagaactatgttcgaacaacgcgtaaattctgacgtactaaccgttgctactgtaaattcacaagatcaggtaactcaaaagccgttacgtgactcagttaagcaagcactgaagaactattttgctcaattaaacggtcaggatgttaatgaactgtatgagctggtactggctgaagttgaacagccattgttggacatggtgatgcaatacacccgtggtaaccagacccgcgctgccctgatgatgggtatcaaccgcggtactctgcgtaaaaaactgaaaaaatacggcatgaactaagtagtaccgtacaatgcattgaatcgaaaagccttttcaggataactgaaagggcttttttgttgcctttatcataagtaattccacatcattgtttttcacttccccgctgtgtttaataatactgcaacggcttgcgcagcgggcaggattctgtacacaccgccgttcagaatataaagggagttatatatggataatcaaaaccaggcagaaaataaagacactcagcattccccggatacgttacccggtgaagcagctgtccggcatcagctgagaataacgattatttttgcgcttgcagcagcaatattctggataatcagtatctattattatacggaagtgtcttatatgcatgaatatatgagaggcgggtttacctataacgaaatgggcaaactgctgggatatccggagcagaaggacagcgctgaactgtatagtggagcctcatttgtggccggtgcggtgtttttttgtttttatgtccgcgcacaccttaagtaccggaaatattgccgtcagtaatatcttaatcccccccttttcctctcccggggtaagcacaattaaaaagcaacaaccggagtgttccgtttcttttcctcttccatgataaccgcagatatttcgccggacagcgaagcattgattttcctgtccgctactatccccggtacagcagcccggatatcaggagagagaaatgaacacactgcagcaggcattacatcaatcattacaggcagttcaggcggagaattccccggcattgatacacagcgggaaattactgaattttataccgtcacaaatttcacagctgcaggatgacctgttgtgcctgtacggacagccgctgccgcgttttccggatccgcaggtgatcagcggtaagctggaagcagcacagcgactgcaccggcaaattcccgcccagaacggggtgttatggcagcatttccggaaagaagccgcaaaactgaacccggcggatgatgccgctctgaccgatgtgctgctccgctggctgttcacacatatcgctgccgcctgaacaaaagcgccttttctgagcagcagaaaaggcgttacggacagatccggttcagattataacggcagacgttcgcggttaacaaaaaccatgccgctttgtgccatataaatagcaccgtcctgttcggccattttgcgtatccggtgggtatcggtggcgagaaattcaaaattgtatcttttcagattatcaatccagtattccggcgactgtaaattcacatgatgatatccgccctgtcccggcagtgcatgcgtcatcaccaggatccggccgcaggcaaatgaatgcaggagatgatcaacaaacatttcctcaatatgttcaaccacttcctgacaatgaaccagatccacacggcactgaacggaagagcgggtcaaatcaaccttcagagagggataaagtgagttctcaacattggactccagcccttccaccgccagcgtctgtaaaccggcacggtaaaaataatccgccgcgtagcccataccggcaccgatatccagcacagagcgcagagcaaaacgtttaatcagataatcccatactgtcggcgaataggtatacgggtctccctccaggatattcccgcccaggtgttcatcctcaccataaccacgatttacgataaaaccggacatttattgcttccttttcagtcagtttccggacagcgcacggcaaacgtaatcagcccggcagtcaggtgcctgttataacggaacggttaaacagcaacaagcggaggattctgtttctttaccatccggcgttactgtttttcatcaaaccagggctgctgaaataaccggatgatcagcgcgagattttcctgtccgacggcagcaccaatttcatcacacaatccggttttgatggcctcataggcgtcatagcattgttgcccgtacggtgtcattttcacccctttgagctttttactgccctgaacatcaaaaatggtgattaatcccttctcttccatctggcggatgaatttatgaatcgcctggcgggagatggtcactgtcgcggaaatatcggctatggataccggctggtcatacaccctcgataaaatgtaccactccgaattactcatgtgaatttcgctccggacattccagagtgcatcaatccgctcacggagcagtgtgtgccgctcactgataaggtcaataaaatccaggtcgtttaatgcaattttcacgcgctcccccctttcctttttgtgcagtataccaaaaacacttagtcaactaagttgaccattatcgcaaagtgcgttactttccttttcgtcaacctggttgatgaaataataggataagaatgtgactacagaggcagcaatacaggtacgctacccgaaaatgatgctgagcgtactgatggccgggacatttaccggcctgttcggggaaaccgcattaaatatggcgctcaccaatctgatgagccagttttctctctccgccggtcaggcacagtggctggtgaccggctatctgctgaccctggcggtgtttgtgccggtatcggcatttctggtgcgctggtttaataccagggtgctgatcctcacggcgctgtgtgtatcgctcgccggttgtctgattgccgcactgtcgcccggttttgcggtactgcttctggggcgggttattcaggctgtcggtaccggggtgatattgcctgtgatgatgagtgccgcacttctcattttcccggtctatcagcgcgggatggtgatgggaatggtggggattgccattaccctggctccggcactgggaccgacaatctccggctttatcatcaccctgttcagctggcatgccattttctggctcagtgcgctggtctatgccgccatcattttacttgccgtgaagtctattgcgccgattggggacatcaccagaccgcgtattgatattctgtctctcctgctttcctccgccggattcagcggcatcatatacgggctggctatcctggcggaacacagcctgcgtgatcccgctgtctggggctccctgctggcgggggttctttgcctcgccgtatttgcccgccgtcagacgcacatggcgatgccgatgatccacccggatgttttccgcaatcctctgtttatcattggcctgatcatgatgatcctgagcatgatgagtgtgctctccgccgcgattatcctgccggtgttcctgaaagatgtgctgatgctgagcgcggcaatggccgggatcctgctgctgccgggcaatattatcaacgtgctgttctcaccacttgtcggttttctctataaccggtttgattcacgcccgtttgtggtctgcggctccctgtttatgctgatgagttccgcgctgtttctgtatgccgtcggggagaatgcgccggtgtggcagattgtcgccgcctttatgctcctgtgcctgggtgtcacctgtgtgattatgcccgcgcagactaccgcgatgagtgctttacccgcccggttatatgctgatggctccgccgtctggaataccttttatcaggtggccggcgccgtcggtaccgcatcggctatctctctgatgtctttttaccgtgatgcggcagcaacacagcagacagcaaccgccgcactggcgtcggggatccatgccgtattctggctgagccttctgctcggtctgatatcactggttttcgccttcttcctgaaaaaaccgcatccgcagaatgatgcggcgtaatcacctgtattaaccctgatggctgctccggcagcctttttcattatttatcactgccgtcatccgcacacatgccttttatgacggtaataattatcattcaatgagataagatgtatgactgcactttaccgcccttccctgttccggctttcgctggcggctttattggttgccggtgtctgccacgccgctgaagatgaaatcgtggtcaccgccgcgccgcctgctgtcagtccgctggacagtaacggcacataccgcgccacacacagcgacagcgccaccaaaacagccacaccgctgaataaagtcccttcctcggtctctgtgatcagtgaggaggagatcaccgcccgcaatcctgccacactgaagcaggcactgggatacacacccggcgtggtaaccggcacctccggcagttcatccgttttcgacagtgtgatgatgcgcggcttccataatgtcagccagaatatctatctggacggattaaaggtacaaggggatatgtatgcggagagccggatgctgccggaatttatgcagcggattgatgtgctgaaaggcccggcgtctgtcctttacgggcaatccaaccccggcggcgtggtcaccatgacctccgggcgcccgcagatgaatccgctgcgggaaatccgctcacaggccgggaatcaccacctgtggcagaccgggtttgatctcagtgatgccctgaatgatgaggaaacacaggcttaccgcctgaccggcacactgcatgaccagcaccagcagcaacagggggagcgggaacggtattatgccttgcagggttcttatctctggcagccggatgatgccacttctttgctgcttaccgcccaggccatgaatgcccctcgtaacggctattacggctggctgccgcgtgaaggtaccgttgacggcggcgctgccgggaaattgcccgccgggtttaacgaaggcgaaccgggctataaccgctttgaacggcagcagcggctgatcggctggcagtttgatcatacattcaatgataactggtcactgcatcagggcgtacgttaccagcagatcagtaccaactggcgcacgatttacggcagcggattatgcagcagcaatccggcggcctgttacggtgtgccaaagcaggatctctcatcaacgcttgcccgcagccatatccgtaatgacgaacggctgtccggactggtcactgatactcatgtcatccacaacatcagcggccacggctggcgcaataccctgatgacgggtgtggattactcacagctgcgcaaccggatggttaatgaggtcggtgttgctgccccgctggatctgcgatccccgcagtacggggatctgacaacaatgcccgtggcagacagcggcactgttaataagaatcatcagaccgggatctacgctcaggatcagctctttctgaaggactggacattcaccctcggcggccgttatgacgaaaacaccagcaaatcccgcagccacgataacctcagcggcgcagacagcgcccatcaccagacagacagggaattcacctggcgcggcggtgtgaactatcagctgccttatggtttcgctccgtatttcagctacagcgaatcctttgagccaagtactgcggccacggtcagcggcaaaccgctggatccgtcccggggcaagcagtacgaagccgggctgaaatacctgccggaaaatgccgcgctgtcagccacacttgcagtctacgaactgaccaaagacaataacctgcaccgcgacccgctgaatccgtttttcagtgtgcagggcgggaaaatccgttcgcgggggattgagctggaaaccaaagcggcactgacctacaactggaacctgatcgccggatatgcttataccgatacccgttttcgtcagcaggaggaaaatgccaatcatcaccccgccatggtgccggtacacaccgcctcactgtggacagattacacctttgacagcacaccgctcagcggcctgactgtcggcggcggcgtgcgttataacggcaaaacacagggggatgatgccaacagcttcaccgtacccgcctataccgtggcggatatgatgctgcgctaccggctttataaactcccggctcttgaagatgcggagatcgcgctgaatatcaataacctgttcaataaacactatgtatctgcctgctttacggatgcggcatgcagttggggcaatgaccggcaaataactaccacactgacccttcactggtaaaacagataaaaaaggggattccgtattaaaccggaatccccgaaaaggcgggatcactaagagagaccgctgcccaccgcagcgcactgcacatcaggccttattcatcgcctgagtaaaaaactcatcactgtaagcctgtgcgaaatggaaggaggccatccgctccgccagacggaagaacgcttccacttcctgtgcattgaggatcttccggtcatggatgcgtgtttccagctcagccaaagcgttacgggataaccgggtcacttccggaagatcaaaaccggtcagtacgccgttttgtttgcggatcacaccgtcggccagcacagtatcgacatcaccggtgtgtgtcatctgcaccacactgcctgcggcgtgcaccggtgccacaaaaccatctctgtggcggataataatgatgtccgcttttttcccggccaccagcgagccgatctcgttttccatgcccagcacctgtgctgcgccgagggtcgcccagtgcagagcctcgcggacagtcggggtgatttcaaacggcatagtatcgcgctgatgtactttttcattcgccagtgcccgttcaatctgcagcgccatattcatctgagtgaacagatcatctgttgtcacaccggtgaaatccgttccgagtgcaaacgggatcccatactccgcgcaaggctgataaggcaggaaccccatccccatctgtaactcgctggacggcgtgctcgccacatggccgccgcttttggcgatcagtttccagtcttcgccggtcagcccgttactgtgggcgtggatatgtcccggcagcagtaaaccgtggtcgtccagttcacgcaaaccacgcagcagaacagaggttttggccgccccggtgtgtgaggcgtgcttcaggccgagatcatccgccagacggatctgttttgccgattccgcaaacggcacggtgcccgggtccgaaatcagcataccggcagacaggcgatcctggccgcggaacagcgtttcggcgatctcacgggcgcagccccggcgttcatccatggaggcaaacccggctggtttaaaatcatagacctgcataccgtaaccgtagacaccacggatgccgctggctttcatcgccgcaaccgcattggcggcgtgttccggtgagttaacgcagtcattcacttcataaacggtggttgtaccggcattcagggcgctgatattaccgttcagaaccgccgcatacatattgtctgccgtcatcattgcgccgaatgcatggaaggtattgataagaaatgccggtaacgactcttccgccgaaacaccgcgaaacagtgccatccagttgtgacggtgcgcatcgatcatgccgggggtgacaatcgccccttgcgcatcaatcacctgagcatccgtatgatgatcaaatgcctgtatatccgcactgattgcgctgatccggttgccctcgatcagtatcgcgccgttgataatatcgccggtggcatcatccattgtgatgattgtgccgccgcgaatgatttttttattcttttccatgcaggcctctctggttaatatcaatataatgtactcattagtacattataatctgattataaaatcaacctgtaaatcggcagcataaaatccatctcattttccgggaaaagaacacgtttattctcccttccgggataaaaaagaaaataattcttatttttcagcaaaatatcccgtgatttctgacagaaaaaaataagaaatccgcgcgtttttacctcattttttgcgccgtactgacataaaaactcagcacaaaacatcaacaaagcgtaaaacaaaggtcttaagcactgaaataatcccccggaaagatcactcctgaagaaaaataaccaaaccaacccgttgttatctctgctgttattgtcatgtgcttataaattaatttaattaattgataaagttttctctatagtttccgataaccagtcatttactgagtatccggaggaatgatgcttctgcgcagcattaaaatcagtacgaaactcttcgtggcttttggcttttccattctgctgatggtcatcagcgccacactgtcggttgtcagcctgaataacgccaatgacggcatccgcgatatcctggacgaggattatccggtcacggtaaaagcaaacttactgattgattattttcatgattttgtcggcattcagcaactcctgctgctggatgataaaaaccctcagattcgtcagctggccgccggtgcttctgaaaccagtaaaaaaattaccctgattctggatgaatttaatgagacgctgaaggatgaggcatctcagaacatcctgaaagagatccgctcagtccgccagcagtacctcacttctcagcgccgcatggttcagttctcgcaaaacggagatgaagccgccgcaatcaatgagatggtgaataccaccgccggtattcagcgcgcttaccgcgacaatgtgatgcagctgattgccattcaggatgcgcatatgaaagaggcgggaaatcaggtggaaagtatttttaaaaccaaccgccttctgctgatcaccctgaccatcatcagtgccatcgtcagtgctgtgctggcacggattattgtggtcagtatcacccgtccgctggataaagccgtcacgcttgcccgtgctattgcgcagggggatctgacacagcaggtcaatgtcacgcatcatgatgaaaccggggtactgcttaatgccctggctgaaatgcaggttcatttgcaggatatcgtaactgaggtgaaaaacggcgcagtcagcctgtctgccaccgcagagcagattgttgccggtaaccagaacctggccgcccgcacggaagaacaggccgcgtcagtggaggaaactgccgcctcaatggagcagatcaccgcaacggtgaaaaacactgccgccaatacccttaaggcaaccgcactatcggcggataccgccggggtggtaaaacacaacggcgaaatgatggagcaggtgacggataaaatccgtatgatcaacacgactgccacccggatgtcagacattatcaatctgattgattctattgcgttccagaccaacattctggcgctgaatgccgctgtggaagccgccagagccggtgagcacggacgcggttttgcggtggtggccggtgaagtccgcctgctggcacagcgcagcgccgattccgccggtgagatccgcaccctgattgaaaactcggccggtcagacccgcgagggattacaactggtggaggaagcggctgaatcactgcgcggtatcgtcagtaacgtcagccagatggatgatttactgcatgagataggccacgccagccatgaacagactgacgggatcacccagatcaacagcgctatcgggctgattgattccgccacccagcagaatgccaccctggtggaacagtctgttgccgccgcctcctccctgaatgagcaggccggtacactcaatgagatggtcggtgtctttcagcttgccggaacaccgtcttaataatgcaccggcagataacgggcatcactgcccgttatcactgtgctgtcaggcgaacatattcaggggatggatacaaaccggtaaccgataccggtttcggtgatgaaatgctgtggacgggccggatccgtttccagtttctggcgcagatgtcccatgtaaatacgcaggtagtgtgcgtgttcaacggcgttcggcccccacacttcattgagcagctgccgctgagtcagcactttgccgctgtggccgataagaatggtcagcagacggaattcaatcggcgtgagatgcacttcctccccgcctttcctgacctgacgcccggcaatatccacacagatatctccgaactcataaacaggatcatttttttcactgccgggatagcggcgcatcagcacccgcagccgcgcctgtaactccccgacaccaaaaggtttggtcatatagtcatccgccccggcatccagagcggcaattttgtcatgctcactgtcacgggcggagagtaccagcaccggcacggagctccactgacggaactcctgcacaaaggtgataccgtcaccgtccggcagacccagatcaaggatcaccagatccggtttgcgggtcgccgcttccaccagcccgcgtgccaggtcttccgcttcaaacacacgcacggaatccccttccagcgcagtgcgcagaaggcggcggatccctttttcatcttcaataatcagtacagtggtcacaacgggttatcatcttcatcaatcacgggcggatcttcacagggtagacggatatggaagcttgcgccacccccgtcacggtttccggctaaaatagtgccgccgtgcacttccgcaatggcccggcagatagccagcccgaggccgatccccggaatggcggattctttctgcccgcgcgaaaatttctcgaatatctgcgcttcctgtccggccgggatacccgggccgttatcccacacttcaatatcaatcatattgtccgacaaccgcgagcggatgccaatctgcgcctgtggcccggcgtattttatcgcgttttccagcagattgatcaacacccgttcaaacagcgggccgtccgcgcaaatcagctgcatcgggtcattgaggtcaatctgcaccgaatccgtatcaaaacgcggtttcagcatttgcagggcactgccgatcacttcttccagcggcagccactctttattgagattaaagccgccggactggatccgcgccatatccagcaggttattgaccagccgcgtggtgctgaggatatgctggcggatctcattggcctgcgcggcatacggtgaaccttcgctggtcagatccagcgtcaggatctccgcctgaccaaacagtacggtcagcggcgtgcgcagatcatgggacagcgccgccagcagcgagttgcgcacctgctcgcgttcactgaccagccgtgactgcgcctcgcgctctgtcagggtgcggcgctccagtgcccccgctgccagcaggatcagggtttccagcagccgctgctgttcggggatcagcagctgacggcggttatacggctccacaatcaccacgccgtatactttctctgtcgtgcagaccggcaggatctgatacggcacgccgggcagagtaccggtgccgaacccggcgggctggcctttgtcataactccagcggatgatggcatcgtcacggccgttatccgccactccacccccggccgggatcaggttaccctgttcatccggcagcagcatttcgcagcgggcatgcaggctgtggctgataaagtgacaactgaccgaggcgatatcatcagattcccgcgccaccgccagcgctttcgacatttcatacagatgccaggtgcgctgctcgcggtaacgtgccacccgtgcctgatagcggacaccggcagtcaggctgccgatcaccagcccgacggtcatcatcaccgcgaaggtgagcagatactgcatatccgagacagccagcgtgcctttcgggttgataagaaagatatcaaagctgataacgttaataatggtggcaaacacagaaggccagcgcccgtaaaaccgcgccaccaccaccacacccaggatatagagcattaccaggttagcgttatcaaaggccatcagccagtgatgtgccatcagggtggtgacggcacaaatcagtgccgcgacaacacagccctgcaaatcggttttgtgtttatccaggaacggccggttgtcgctgaatttctcacggttttccggctgccggtcctgcggggcgatcatcaccacatccagatcagcggcactgcggctgagctgttcctgtaatttgtcgcgccgccaccaggatgtccgctcatggcggacaatcataattttgccgaggttattttcccgcgcatagcggatcaccgcgcggctctcctccggctccgccagggttgcggtggtggcccccagttgctgcgccagcgacagggtggtgaggatagtacgccgctgcggtgacggcagcttatgccgtgcgggggtttcgacaaaaatggcatgccagtcactgccgagccgtgccgccagccgggctgcggcacgcaccagtttttcattaccgccgtccggacgcagacagaccagaatcgcatcccgggtgtgccagactttctcctgacctttccgctcccgccaggcgcgcatctgttcatcgacacggtcggtggtccgccgcagcgccagttcacgcagtgccagcaggttacctttgcggaaaaagtgctcaatcgcccgttccgcctgagcagggagatatactttgccctcgcgcagtctgtcgagcaggtcgtccggcgttaaatccaccagcacgatttcatcggcggcatcaaacaccgggtccggcacggtttcgcgcacacgaacaccagtcacgccgccgacaatgtcattcaggctttccagatgctgcacattgatggtggtgaggacatcgatcccggcattgagcagctcttccacatcctgccagcgtttcgggtggcgggcgccggggatgttggtgtgcgccagttcgtccatcaggatcactgccggatggatcgccagcgcacggtcgagatcgaaccccgccacctgccgcccacgatagttgtgctttttcagcggcagaatgcgcagcccttccagcaaggcagcggtttcactgcggccgtgggtttccaccaccccggcgagcacatcaatgccctgttcacgcagccgctgcgcctctttcagcatggcgtaggttttcccgacacccgcacaggcgccgaagaagatcttcagttttccgcgcggacgctctgtgacctgtgccagtaactggtcaggatcgggacgcagtggctcttcatacataatgctgtccttccgttagttcaggctggttttatccgccgcatgtgcatccagcgccagattcagtgccagcacattcacgaccggcacaccggtaaacgcaggcaccggagtggtgatatgttcgcggatcagtttttccacctccgcctgtgtcatatcacgcgctttggccacccgcgcggcctgccagtaagcggcatccggggagatatccggatccagcccgctggcagaggcggtcaccagatcaaccggcaccgggcgggaagcctccgggttttccgcccttaacgtttctgcccgctgcgccacccgctgtaacagttccgggttgccggtgctcaggttgctgccgccggaactcagtgcgttatacggatgctccgccgtttctgacgggcgtccgtgaaaatagccgggctgtgtgaactgctgaccgatcagcgccgaacctttgacttcgttattcacttcaatcagtgaaccgttggcctggcgggcaaaccaccactccccgagcgaggtggtcagcagaggataaaatacccctgttaccagtgccagaaccagaaatattatgattgcaggacgcatctgactcattgtttatccttatactaaccctgtcagggtcagtaacatatctatcaattttataccgataaacggcacaaccaggccacccagtccgtagatccacagattacggcgtaacatctgcgcggcactcagggcatggtacggcacccctttcagcgccagcgggatcagaaagacaataatcagggcgttgaagataaccgcacttaacatggcggaatccggtgagtgcagacgcatgatattgagcgcatccagctgcggataggtcaccgcaaacgccgccgggataatggcaaaatacttggcgatatcattggagatactgaatgtggtcagcgagccgcgtgtcatcagcatctgtttgccgatatgcaccacttcaatcagcttggtcgggttggagtccagatcgaccatattccccgcctctttcgccgcctgggtgcccgagttcatcgccaccgcgacatccgcctgtgccagtgccggcgcatcattggtgccgtcgccggtcattgccaccagccgtccttccttctgatactgacggatcagcgccagtttggcttccggagtggcttccgccaggaaatcatccaccccggcttcggcagcaatcgccgccgcagtcagccggttatcccccgtgatcatcacggttttgatccccatctggcgcagttgtgcaaagcgttcgcggatcccgccttttacgatgtctttcagggcgatcaccccgagcacacgatgctcttccgccactaccagcggggttccgccgctgcgtgcaacctcttccaccagtttgtcgacctgtgccgggaaatgaccgtggttagcctcaatatagcggcggatagcatccaccgagcctttacggataatgggcccgtccacattgatgccgctcatgcgggtctgggcggtaaacgggataaaagtcgcattcaggctttccagatcacgtgcccgcaggctgaaacgctgttttgccagcaccacgatactgcgtccttccggggtttcatccgccagtgatgacaactgagctgcatctgccagcgttctttcatccacaccgggtgcagccaggaaagccgatgcctggcggttgcccagcgtaatggtgccggttttgtccagcagcagcacgtccacatccccggcagcttccactgcgcggccgctggtggcgatgacattggcggccagcatgcggctcatccctgccacaccaatagccgaaagcaggccgctgatggtggtcgggatcagacagaccagcagcgcgatcatcactgtcagagtgaccggatggccggtataggcggtaaacggccagagtgttgccaccgccaacaggaatacaatactcagtgcggccagcaggatggtcagggcaatctcattcggcgttttacttcgtttcgcaccttcgaccatgctgatcatgcggtcaaggaagctgtcgcccgggttggcactgcactcaataatcagccagtcggacagaatccgggtaccgccggtaacagaagcaaagtcgccgccggattcgcggatcaccggcgcggattccccggtaatggcgctctcatccacagatgcaccgccttccagcacagtgccatcacacgggatcagatcccccgcttccaccagtaccaaatcccctttgcgcagggtatcagcggagaccatatcaaaaccgctgtcgcgctgtgctgcatgcagacgccgtgcgcggctggtttttttcatccctttcaggctgtctgcctgcgctttgctgcgcccttccgccagcgcttcggcgaagttggcaaacagcacggtaaaccacagccacagggcgacggtgagggtaaatccgccgttaccgctgataaatccgctgaacatcccggcggccagcagtgtggtcagcaggctgccgcaccagacaataaacatcaccgggttctgccactgcaccaccggcgagagcttgcggaatgcatccggcagtgcgcggcgcaccagtgcaggttcaaataatcgctgtgtctgacgactcatggtgttctcccgtcaatcacttaagtaaatcaagaaattccgccaccggccccagtgccagtgcaggaacaaaggtcagtgcgccgatcagtaatattgcggcgatcaacagcccggtaaacaacggcccggttgtcggcaatgtacctgctccggcggtccggatggttttgctgaccagcgagcctgccagcatcatcaccagcgcaatcaccacgaagcggcccgcgagcatgcagaatgccagcagcaggttccagaacggggtattggtgctcagcccggcaaaggcactgccgttattgtttgaagcggatgagagggcatacagcacttcactgaagccgtgagcgcccggattgagcatcgcgccgcgtccggcctccgtcatcatcgccagtgccgtgccgccgagaaccagcgccggagtgaccagaatcgccagcgcggtcagtttcatctcccgcacctcaatttttttgctgaggtattccggcgtgcggccaatcatcagtccggcgataaaaacggcgaggaaaacaaacagcatcatgccgtagaaaccggcacccacgccgccgaagatcacttcaccgatctgcatcagccacagcggtaccaggccgcccagcggagtcagggagtcatgcatgctgttcaccgcgccgcaggaggctgcggtggtcacggccacaaacagcccggtggcaaggataccgaagcggctctctttcccttccatattgaaggtgctgtcgatccccatccccgtaaatgccggattaccgtgagtttcgctccacatcaccgccacagcggcggcgataaagacaatggtcatcgcggccagaagcgcacggccctggcccgggttaccggcacagcgcccgaatgcaaaacagagtgccgccgggatcaggaaaatcgccagcatctgcacaaagttggtcagtgcggtcgggttttcaaacggatgcgccgagttggcaccgaagaagccgccaccgttggtaccgagcagtttaatcgcttcctgggaggccaccggccccatcggcagcacctgctgcacaccttccggcgtgatgatagtctggtagtcatggaagttctgaatcacgccctgcgaaataaagaacagcgcaataatcacggagagcggcagcagcagccacagcgtgatgcgggtcagatccgcccacgcattgccgagtgtctgcacagagcggcggcacagagcgcggatcagggcaaacgccacagcaataccggtggcggcagacaggaagttctgtactgtcagcccggccatctggctgaagtaactgaccgtggattccccgctgtaagactgccagttggtattagtgacaaaactgaccgctgtattcagtgccagatcccatgacatccccgggaagtgacgcgggttgagcggtaaatccgcctgcagcatcaggatcgccgtcaggaatatcagtcccagcgcattaaacagcaacagtgctgtcagatatccctgccagcgcatctcgtcacggccaatccccgcaaagcgccacagcacaccttccacacggcgcagaaccggcagcggtgtaccgtcaataaagcagaccagcaggttactgagcagttttgccgcaatcagcaaaacaatcagaaacccggcgataagtaaaaaggcattcgcggccatcagaatttctccgcattaatcagggcataaaggaggtatgccagcagcagtaatgtaccggcgatgcctgcaataagagccagactcataacttgtccttacatgtgtgaggtattcatcattgagtctagaaaagcgggtgcaaagatgtcgcaaaattcagcgggaaaggtataaaaaaagtataaaaatgcgggtttccgtaaacccgccctgctattacaaatccagatggaaaaactgattatgttcaccggcctgataatcaccaaacgccgccccggactgaaaaccgcagcgccggtacagtgccagtgccggttcaaaatccggatggcagccggtctccaggctcaggcgggtcatgccgcactgttttgcctgcacaataatatgcagcaacagcagtttacccgctcctttgccgcgaaaatccgggtgagcccgcatcgattttatctcgccctgtgcggcggaaatttgtttcagcgccccgacagctgcgatacggtcaccggcccatacactccagacacggatgttatccgcccgcaggccgctttcactgagagcgtaaacatgctcctgtggcgtattctctgccatcccctgtaaatgcagggcaatcagtgcgccggtttgcggtgaggataaatcatccgtttttattacaaaattatattcagtcatcagtgcctcttgtcgctgcagacgggaaagccccggctgtcggttatcattgctgcaataatcattccgcttttgctgcccgccggatccgccggtttccgttgcaggcaataccgttttgcaccattgcagtgcaccatcagagggcatccgcccataaatacgtagtccccggctgatttacccggacttatccgcctcttacactgatcatgttcagagcgtgatatccgccggaaaatcaataacaggatgtgtaatgaaaaccgtcatcaccgcaggactcctgtttgccgtactgtttgctgccgccccgcttcaggcaaaacaggcagcaatacagcagatcgaagccagagcactgagcggcaatattaccgcgcagataacactggccgataccttccgcgcaaaacaggatattgtgcaggccaaatactggtaccggaaagcagcagagcagaacaatccttatgcccagaatgagctgggaaaactgatcctgctcagcgatcagtccgtgacagcattacaggaagccagagtctggtttgaaaaagcagcggtgcagaaatacgcgccgggacaggtgaatctggccaatgtctatcttcatcttgctgatttaaataatcgtgacagcaaagagatggtgctggcacattactggtttgaacaggcggccagacagaatatggcggctgcccagtatcagctggggatgatgtttttatatgccgaaggtgcagagcaggatatcagcaaagccagaacctggttcgagaaagccgcatcacaggatcagccggatgcgctctatcagctgggggtgatgtattatcgcggaaaaggctgtgaacgcggtgattgcgccattgcccggagtttttatgagagagcggcagcacagtcacacggccccgctcagttttacctcgcgatgatgtatctccagggacacggcgtggcgcaggattacgaaaaaggtgtggcattgatgaaagcctcctgtgacaacggtgagccggaagcctgtccgtgggtcagaaatctgacagaaaatgaggacaaattccgtcagattttttccggaaaaccgccatcggatcagccgcccagataggcactcctgaccgcttcattcaccagcagcgcctgaccggtatcctccagcacgacccgcccgttttcaagcacatagcctctgtctgccagtttcagtgcctggttggcattctgttcgaccaggaagatagtcatacccgcatcgcgcagttcacggatggtatcgaaaatctgcatgatgataatcggtgccagcccgagggacggttcatccagcagtaacagctgagggctgctcatcagcgcgcggccgatagccagcatctgctgctcaccgccggacatggtacccgcccgctgatggcggcgttcctgaagcctcgggaaaagctcatatacctgagcaatccgtgcctgatactgcgttttggatgcaaaaaatccgcccatagccagattttcttccaccgtcatccgcccgaacacccgccgtccttccggtaccagtgcaatatctttgcgcatgatctgcgccgtcggcagtgccgtgatattctccccgaggtagcggatctcgccggtggtcgcccgcggctccccgcacagcgtgctgagcagtgtggttttccccgcaccgttcgcgccgatcagggtgactatttctcctttgcgcaccgacaggctgacttcatgcagcgcctgaattttgccgtactgcgcggagacatttataaattccagcatcagtatgcctcccccaaatacgcgcggatcacgtccggatgattgcggatcgccgccggggtgccgcttgccagcggcgttccctggttcaccacatagatccggtctgaaatccccatcaccagtttcatatcatgttcgatcagcaggacagacacgccgtgctccgtgcgcagttccgcgatcagtgcatccagatcgtccgtttctttcgggttcagtccggccgccggttcatccagcatcagaatatccggccgggtcaccatacagcgggcgatttccagccgccgctgctgaccatacgccaggttccccgcctgccggttcgccagtgccgtcagcccgattctgtccagccacatcaccgcgcgttccgtggcttcacgctgatcacggcggaacgagggcagcgtcagcagcccggcgagtaatccacttttatgatgctgatgctgatgctgcgccaccagcaggttttcaatcaccgtcatttcccggaataaacgcacatgctggaaagtgcggatcatgccgagccgggcgattgcctgtccggacaatccctgcaccggttttccgcgcagcaggatctgcccgtctgccggtttgtagaagccggtcaggcagttgaagatcgtggtttttcccgcgccattggggccgatcagagagactatttcaccccggttcagttccagcgacacattattcaccgccagcaacccgccgaaacgcatggtcaggccggagacctgcaataaggtatcggtcattgcacacctccggttttttccgcatccgttgtgctgactttcaggtgcggacgcgacaccggcagtaatccctgcggccgccagaccatcatcagcaccatcagcgccccgagcaacagcatgctgtaagcattcagatcacgcatcatttcccgggaaaccaccaggataacggcggccagaatcaccgaggtttgtgagcccatccctcccagcaccacaacagccagcacaaaggccgattccgtaaaggtaaaggattccgggctgataaagccctgacgggcggcaaataaagtgcccgccaccccggcaaaggcggcactgatggtaaatgccgtcagtttgatacgtgtcgggctgagccccagcgaacggcaggcgatctcatcctcacgcagcgcttcccaggccctgcccagcggcatcctcagtaaccggctgataataaacaatgttatcagtaccagcagcaacgcgaccagatacaggaagataatgcgatcgcccgggtcatacgccaggccgaagaaattgtggaacgtatcccagccgccctctttggcggtccggctgaactccagcccgaacagggtcggtttcgggatctgactgataccgttcggcccgccggtaaactccgtattattcagcagcagaatacggacaatttccccgaagccgagcgtcacaatcgccaggtaatccccgcgcagccgcagcaccgggaagccaagcagcagcccggacagcgcagcagcaataccggccagcggcagactctgccagaacccccagccgaaatagtggttcatcagcccgtaagtgtaggcaccgatggcgtagaatccggcgtagcccagcaccagcaggccggacagcccgaccaccacattcagcccgaggccgagcatcacatagataagggttaaggtggcaatatccacactgccgcgtgacaccataaacggccagataatggcagcgataataatcagtccggcaataattttctgcgtattggtggagccgtcaaaacccggcagtgagcagctgcttttcggcagacgcgccgtcagttttttcagtgacgggcgcaccagctgaaagataaagacaatcacacaaccggtgccgatccattcccagcggacagcatcggcgttgcggacaatcagacgggtgccgtcgagggacaattgcagccccatcatcacggaggccagcacaaacagcgttgcggtggcgacaatggcgttgatccagtgagattttgtcataccttttcaacctccggacgcccgaggatcccggtcggcatcaccagtaacacaaggataagcaagccgaatgaaaccacatctttatattccgtactgaaataggcggaggtcatggcttctgatccgccggggatccccccgccgatcatcgcccccggaatactgccgatcccgccgagaaccgctgcggtaaaggctttcatcccggccataaagccgatgtacgggttgatcacgccgtaaaactgccccagcagcaccccggccaccgccgccatcgccgcaccgatcacaaaggtcagtgcaatcacgcgatcggtgttgatcccgagtaaaccggccattttcagatcttccgcacaggcccggcaggcgcgtcccatccgtgagtaacggataaagagggtcagcgccagcattgccagcaccgtcaccacccagatggtgatctgcatagcggaaaccgtggcagagaaaccgccgctctccccgaaggtccagcggccgttaatcagcccgggcagcgcgagatcgcgggagccctgggaaagactgacaaagttttgcagaaaaatggacatcccgatcgccgaaatcagggcaatcagccgttttgagtgacggacgggccggtaggcgacccgttcgatactccagccataggcactggcaataattatcgctgtaataaatgcagcggtaattaacagccagccgacatcaatccccagcatcatcagcccggcaatcacaataaacgagacgtaactgccgatcatatacacttcgccgtgggcaaagttaatcataccgataatgccgtataccatggtgtaaccaatggcgatcagggcataggtgcttcccagcgttaatccgttcagcaattgctgcgtaaaatataataattgttctgacatagcgcactcccctgaaacacactgcccgcatcagtcaccgctgcggatcagttcagcggtgatgaggttccgtctttgtgccattcaaatacgccgaactcgaaacctttcagatccccgtttggtgtccagctcagttcgcccattacggtgtcaaccggcttgcctttcaggtcagcggccagatccgccggttccatgctgccgctgcgctgcatcgcggtagtcagggactgtaatgccgcataggttgtccagacaaacggcccggtggaatccagtttcttcgccgccagggcatccaccaccggtttgttggcaggaacctggtcataacgtttcggcagcgtcaccagcatgccttcggatgcatcaccggcaatgttggagagtgaggagttacccacgccttccggtcccataaagcggatattcagccccgcctgttttgcctggcgtaaaatctgccccatttccgggtagtaaccgccgaagtagacaaaatcgacattctctttcttcaggcgcgccaccagcgcggagaaatctttatcacccgccgtcaccccttcaaacagcacttctttcaccccggctttgttcagattgtctttcacggaacgtgccaggccttcaccgtactgctgtttgtcatgcaccacggcaatacgctgcggtttcactttttcgagaatatattttgcggcggtcggaccctggtcagaatccaggccggtggtgcgcatgatcaggttgtaaccgcgcgtggttaaatccgcattggttgccgccggggtgatcatcaggatcccttcgtcctcataaatatctgacgcgggttgtgtggaggaggagcagaggtgtccgatcacatagcgcatgccgtcattgataactttgttggccaccgctaccgcctgtttcgggtcacaggcgtcatcgtattcggtgatcaccagtttattgccgttaatcccgcctttggcgttgatgtcctcaaccgcctggcgggcaccggtaaattccatatcaccgtattgtgcgaccggtccggacatagcgcccaccaccgcaactttaatatcttcagcgtaggccgctgcacttaatgcacaggatacagctccggcaatgattgccattttcattgtttttttcatcagaacatccccatcggttagctttgcagtgaccggacggtcagcatgtgcggtattttcggaattccgttataatgagtcgcattacattaattaatgctttattttcagttcattaaacaggatttttattctgaaaagcaaatcagaaaaggagattattgcatcattaacaggataatatccggttgcaatcgggtgttttttcggcaaaaaacagtgttataaactggttaaggattcgttaaggataacttaatgcggaaattcactgccggaaaaatagttttccccactattctgatagtaattatctctctttattattagattcatccggcgaagtattaacccgttatctgattcagtttactgattgatttatccggatccgggttttttgttcactatgactgatggaatggtccgcgacatgaataaactaacgggcatactcctgctcacttttgcgctgccgctgaccgctgtggccgcaacccccggccgctgtgatgatgcggcacaggatattaaccggcaaaatacatttattattaccggtgcgaaatattacgggccggtaaaatcaatcactatcacgtcttaccgctcgatggggcttatcctgtgggtgaaagaaaaactgcacttcggtccgtgcagcaatctgacacaatatgattatgaataccgggaaatggcgatagaagaaggtcaggtgccgattacgcaaaccacgcaactcgtgccggaaaaaccggatcaggcgtccgtcacggtcagtaacgtgctcccgggtaatacggtgctgagcacacagattgatcagcaatacacccgcaatgcggaaaaccggatcgtcagcctgacagaatcctataaaacaataccggataaccagtcctggcagtcagaaacccgctaccgctatcagaataaccggctggtttcggagaaagagacagagaacggtgaaacacgggtgacggtgtaccattatgcccctgacggcctgctgactgatattgagcagccgaatgtgatgacgcaggaatatacctataacgagcagaagcaggttgtcagcatcacacaaaagctgccgacattctggggaaaaagcgcctacgcctacacctgctataaatgggatccgtacggaaactgcgaattacagaccatgatcaaagccattcagttagaaggctccgccgccattcagagcagcgggatcacgctggaatcccgttacgaatattactgataaaaaaaaccggagcggagctccggctattatttctcagtcgttttctttttttatactattttcatcgccagtaccgcagcgatattgcgggcagccacttcaatattaaccgccgcctgtgccagtgcctcatccagagagcaaatccgcgggatcacggagaacacagcatcaataccgtgctcatgcacgaccgcatagtcctcgctcatcccgcctgccagcgcaatcaccggaattccccgcgcttttgcggctttcgccacacctgcgggggttttcccctgaatcgtctggctgtccatccgtccttccccggtgatcaccaggtcggcatctttcaccaccgagttcagatccagtgtttcgatcaccatctcaattcccggctgcatccgcgcatcaagccacgccatcagaggaacgcccatgccgccggccgccccggctcccgcgacatcactcagtgatttaccggtcagggattcaatcacctccccgtaatgacgcagcgctgcatccagctcactgacaatcgccggtgtcgcgcctttctgcggcccgaaggtggcagatgcccctttcggcccgcacagcggattattcacatcacaggccaccacaaactttgttttcgccagacgcggatccagcccggatagatccgcggaagccagttttgccagcgcactgccgccgaacggcagtgaattcccctgttcatcgcggaataccacacccagcgcctgcatcatcccggcaccaccgtcattggtggcactgccgccgatgccgaggattattttctccgcaccgtcatccagtgccgccaggataagttccccggtgccgaaggtggttgtcactcgcggatcccgctgtgcaggcggcaccagatgtaacccggaagctgcggccatctcaataatggcggttttaccatcgccggacagcccgtaaaacccggtcactttattccccagcggggccgtaacttcggtttctttcagcgttccctgtgtggcctcaataatagagaccactgtgccctcgccgccgtccgccatcggcagtttgatatactgcgcatccgggaaaacggttctgaaacccgcttccaccgcatcggcgacctgaagggcggtcagactctctttaaatgaatccggagcaatcactattttcatacttaattccttttacccgccaaacccgaagacaccgaaaatcagtgtggagacaatcgcgatcaccagacccaccatcgtttcgtaaggcagtaatttcagacgctcatgaacctgcatattgacactgccgccggtcgcatggaagaagctgccgtgcggcatctggtcgagcaccaccgcaccggcgtggatcatcgccgccccggccagcgcactcacgcccagatcaagcagcgttgagctgaataccgcagacgccaccgccgtacctgctgtggtggacgcggttgccattgacatcagtgccccggaaatcggtgccagcagataggatggcagaccggacgccgtcaggccgttaattaacacatctttcaggccggagttggcgataatccccgccagagttccggttcccagcagcataatcgccaccggtgccatccggctcagcccggaggtaataaagtgattggattgacggatacgccccataatcagcgcaccggccaggccgccgaccggcagcgcgatcagcgggtcaatgctgataccggcgatcggacgcaacgacagcagaaaaatcgccaccagcggtgcactcatcgccgcccagaatcccggtaatttaccatcatgatgcgccgcaatcagctcttcctgcgtcacttttgaaccacggtgaaccagacgtttcgccaggaaatacgccacgatcagcccgaaaatgcccgggataatccccgccgccatcagtgatgtcagcggcacgttaaagttatccgctgccgcaatggtgttcgggttcggtgacatcacgttacccgctttaccgccgccgatcattgccagcagaatcgccattttggacagatccgcgcggtgcgcaatcgccagtgcaatcggtgaaaccgtaatannnnnnnnnnnnnnnnnnnnnnnnnnnnnnnnnnnnnnnnnnttctcacccactttgcggacaatggtttccgcaatggtatttgccgcaccggattcaatcagtacccccgccagcacacccgccgccagaatacgcagcaccgcgttagtgatcccctgggcaccggtcaccatcagtgtcaccgtctgcaccagatccgcgccgccgaccaatcctccggccagcgcccccgccatcatcccgtataccggcggtacttttttcagtattaaccctatcgccacgaccagcgcaaccattgcgcccaaagctgaaacagtcaccatgtgcagactcctgctgtagttatgattattcggacagaacaggatgcattatggcggcagccatcagcttaagcttgagaggttccgacaaaaaagaacgggctgaaaccgcgtattttgtacaaatgtacaaatcacagatcagtcaacataccgaaataaagctgaatcattgattccaatttattgatatttaagccagtaatcgattcaacacgctgaaggcggtaacggagggtatttgtgtgaatatgcagcgtttttgtggtttgagacagatcacaattctgatcaaaataggtcttcagggtatgacacaacacacggcggctgtccgccgctttcagtttctgccaggcagaagccagttcagcggcctgccagctctcctgaaatccctgtaacaaggcgggtaatttgacttcatcataaaaaatggttttctggcggctgtacgccggggtctgccccagttgctgcacagcgcaggcactctgccaggagcggtgcaggccattgtgcccgtgaaagaaaccgccgacatacatcagcagatccggcaactgacggcgcagtgcctgtaactgcttctgcaccggagagaccggctgaaaatccgcatcacaggccaccggtttcagtaccaccagggaattgatcccccggatactgaccagcagatccattttcagattatcaatatagtctaccagacggtgaaactgctcatgatccggcgctggcagtgcgaggatcagggcaatgcggggtttatcgggggagatcccgagataggcggcgatcgattttaccgactgcggctgctgctccgggcttatcagctggctgaccagctcatcgcggtaacggcgatcccactgggatttttccagcaaatcagcctgctccagcaccagctccgccgccatgcgcaccagttcggcgtagttgcgcacctcatccggtttgccggaaatgccgaccacacccaccatggtatcgcggaaaatcaccggcagattaatacccggtttcacccctttcagcgtggcggcggtggcttcatcaatttccacaatccggttttctgtcagcgccagcaccgcgccctcgtgacgctgattgacccgctgcgggtcaccggaagcgataatcacgccctgtgcgttcatcacattcacggagtaactgaggatttgcatcgcccgctgaacaatcagccgggcggtgcgctgatcgagctgaaccggtgtcatatcaggacggattctgtgcctggcgtgctgccgcaatggcagactcaatggcttttctggccagcggactgttgcgccagcaggtagagccggtgagtgccgcaccggcactcagcagggattgggcatctgcggcggcaagctgattaaggtcagagaaacccatttgctcaaggcgttcgataactttcgtgcccacgccctttaccgccagtaaaactgccttgtcttcagacgaaaaagccataatatccccgtcagtgattatcagaaaatactatggctaccataacagattgcggcggaaacgggagcattgttatcagccctcaatagcctcgcgcagttttttcatggcatttttttccagctgacggacgcgctctgcagaaacgccgtatttatccgccagttcctggagggtggttttgctgtcatcatccagccagcgggcacggataatgtcacggctgcgctcatccagtgaatcaatcgccagggtgagtttgtctgtggcgtggttatcccagttatcttcctcaatttcatcagcgaaatcagaggatttatcttccaggaacagtgccggtgccacaacagggtgatcgccgtcgtcgtcgtcggacatatcaaatgccatgtcctgcgccgccatacgggattccatttcgagcacatctttgctggttacgcccagctctttcgccaccatttccacttcgtcctggttaaaccagcccagacgttttttggatttgcgcagattaaaaaacagtttgcgctgtgctttggtggtggcgattttaacgatgcgccagttacgcagcacatactcatgaatttcagctttgatccagtgaaccgcaaacgacaccaggcgcacacccatttccgggttaaaacggcgcacggctttcatcagcccgatgttgccttcctggataagatccgcctgaggcaggccataacctgaataactgcgggcgacatggataacaaaccgcagatgggacatgatcagttttttcgcggcctcaaggtcgccgtcataatacagacgctcagccagctctttttcttcttcggctgtcagcatcggatactggttagctgcccggatataggcctcaatgctcccttgcggaactaaaacagggaattgcgtatctttagtcattcagtcctcagtacaaataaaaatgacgtcggcagacggtaatggtgaatagtgtacaacacaggacagagttacgcctatcacttagtgccggcgttgtcatttggttgaatgtaaaccggtgatgcgggatacccggcgggataatgccccgccggatagtgagacaattactgcggcataaaattccgtaaatggcggaccgttgccagccaggcggcaacccagccaatcataccggacaccagcacaatcagcagtgcttcgtcccagtccaggccggtcagtgcaaatgtggtgccgaaaattttggacacatcggtcactacatcacccagtttccagaccagcagagaggataacaccagtgacagtatcgcgccgaacgccccgagcagcatgccgccgttgaggaacggacgcagaataaagccgtctgtcgcgccgatcagtttcatcacattgatggtttcgcggcggctgaaaatattgagccgcacactgttgccgatcaccaggaacagagccacaaccatcagcacgccaatcagcgaggcaatctgccccaccaggccggtcagtgccgccagacgggcaaaccagctgtcatccatccggacctcatcaatcccggacagtgccgtgacacgatcacgcagggtggagagggtgtcgctgctctgcatatccactttcggtgtgacgatagccaccgccggcagcgggttctcttccagcatatccagcgcggtactgaagccggaccaggcgcggaattcggttatcgcctggtcgcgggagagataattaacactctccacgccgtcgagtgctttcagctcatccgccagtttttgtccgccctgttcatccaggcccttatccagataaacagtcagctgcggggtcggataccactgttccgccgcatggctgacgtttttccagacgatataaaagacactcggcagtgtcagggaaatcgcaatcaccatcactgtcagcagtgttgacagcggctggcgcagcatatcgcccagcgtgtttacccacgcatgccgccactgttcccgccagccgcctttcagagctttggctttggacggcattttttttaccggtttacgcggttgtttagccatgatgacctcccgccatgcgtccctgactcagtgtcagcacgcggtaattgcgccgttcaatcagcatgatatcgtgtgttgccatcaggacggtgacacccacgcggttaaactcttcaaacagccgtaaaatgccttcagacagctcactgtccaggttaccggtcggttcatccgccagcagcaccatcggtttattgaccaccgcacgggcaatgcccacacgctgctgttcaccgccggagagctgcaccgggaagttacgggccttatccagcagaccgactttatccagcgcggcactgacgcggcggcggatatcttccgggctggcaccggcaatgatcagcggcatcgccacattgtcatataccgtgcgatccagcagcagatggtgatcctgaaaaatcatgccgatttggcggcgcaggaaaggcacttcacggtttttcagacggctgatgttgtggccgtcaaataaaatggtgccgtcactgggtcgctcaatcccacaaatcagtttcagcagggtactcttccctgcgccggaatggccggtcaggaagaccatctccgccgggcggatatggaaatccaccccctggagcgcctgacggccgcctaaataggctttactgacgtgttcaaagcgaatcatggatgattaatcctcccgggcaaaaagtgcctcaataaaatcaccggctttgaaaggacgcagatcttcaataccttcacccaccccgatataccggataggaataccgaactggtctgcaatggcaaagatcacaccgcctttcgccgttccgtcaagtttggtcagagtcagcccggtcaggccgaccgcttcattaaagagacgcgcctggctgacagcgttctgtccggtactggcatctaatgtcagcataatctcatgcggggcatcttcatcaagtttcttcatcacccgcacgattttcttgagttcttccatcaggtgcgctttattctgcagacgccctgcagtgtccgcaatcagaacatccacccctttggctttggcggactggatggcatcaaaaattaccgaagccggatccgcgccggtgggctgtgccaccaccgggatattgatgcgctcgccccagacctggagctgttccaccgcagccgcacggaaggtatctccggcagccagcatgaccgatttaccctgagcctgatactgacgcgccattttaccgatggtggtggttttaccgacaccgttgacgccgaccatcaggatcacatacggctttttatcttcaatttccagcggcttatcgactgttgccaggatctcgcccatctcttcgcgcagtttgacgaataaggcttccgcatctttcagatcacggcggctggcatgctgagtcagactggtgatgatcttgcgggtggtttccacaccgacatcggccaccagcaactgttcttccagctcttcaaacagatcgtcatcaatctttttaccgcggaagatcccgaagaaaccggagccgatattctcacgggtacgcaccaggctgcgtttcagacgggcaaagaacccttcttttgccggtctttcctgcgtgtccgccggtgccggggattcattttcaaccagtgccgcatcctgtgcttccgcttcagcttccgcgagacggcgggcttcttcctcttgcgcaaggcgctgttcttcggccagacgcgcctgttcggcggcttcggcatcacgctgtttctgctcttgtgctaaacgctgctgttctgcggcttcttcttccgcacggcgtttatcttccgcgatgcgctgctgttttgccgcttccgcatcacgcagtgcctgctcttcagcccggcgctgttcttcttccgcacgnnnnnnnnnnnnnnnnnnnnnnnnnnnnnnnnnnnnnnnnnnnnnnnnnnnnnnnnnnnnnnnnnnnnnnnnnnnnnnnnnnnnnnnnnnnnnggccaaccgtttttcttccgcgatacgctgctgttttgcgagttccgcgtcacgcagtgcctgctcttccgcgcggcgctgttcttcttccgcacggcgctgtgctgcggcctgttcttccgcctgacgtttttcttccgcgatacgctgctgtttcgcgatttccgcgtcacgcagtgcctgttctttcaggcggcgctgttcttcttcggcacgctgctgctctgccgcctgttcttcggccagccgtttttcttccgcgatacgctgttgcttcgcggcttccgcatcgcgcagtgcctgctctttcagctgacgctgttcttcttcctcacgctgctgctctgcagcctgctcttctgccagccgtttttcttccgcgatacgctgttgcttcgcggcttccgcatcgcgcagtgcctgctctttcagctgacgctgttcttcttcctcacgcggctgctctgcagcctgctcttctgccagccgtttttcttctgccagacgctgttgtttagcggcttccgcatcacgctgagcctgctctttcaggcggcgctgttcttcctcagcgcgctgctgttccgcagcctgttcttcggccaggcgtttttcttccgccagacgctgctgttcgctgatttcggcgttacggcgggcctgctcctgtgcaaagcgctgctgttcagcggcttccgcatcacggcgggcc

SEQ ID NO: 8 - DNA, 85604 bp, unknown
  Altogen 322075 strain
  misc_feature (65713)..(65738): n is a, c, g, or t
  misc_feature (67412)..(67412): n is a, c, g, or t
gtcaagcgttgtttttcaacttttttcgcttttctctactgtcggcgcgcttctcagcgtgttgctccgtgtcagtgagggcgcattatagacactcgctgagatcacgcaagtgtttatttgaaaaaaatgtttgttcgcgttttttttagacaaaacatgtatatttgagcttttattcgcctgttttgtcattaatatgcccataatgcttcttatatatcattatcccgctttgttaatgcatcacgccaaggaatcagaatgcagttttcagaacaactcaatgcgtcacaaaagaacctgtcttatcttctggctgaaaaactgggacagcagattttatccggcaagtatccgccggaatctattctgccgggagagattgagttggcggagcagttcggggtaagccggactgctgtccgtgaggcagtaaaaatgctggcggcgaaaggaatggttttaccgcgcccgcgcatcggcacccgggtgatgccggtgataagctggaattttctcgaccatgactttattaagtggtggctgagcagcggagaccaccggcaggtactgacgtatttccgcgagctgcgcgccgcgattgaaccccaggcctgcgcactggccgccatgaatgccggaaaagatcagaaacagtcactttcgtttctgttaaaagagatgaccttattatccgcccattttgagagggataaatggatagccgttgatcaccgcttccaccaccttatttaccaggcgtgcggaaatccgttcttttcctctttcgccaatttatttgattttgtgtatcacaacttttttgaatccatcaccaccaatcaggttattgagattgatctccacaaggagattgtggatgccattatcgacgggaacggagaacgcgcccgtcaggcatgtcaggtgttgttgagtaaagtgtgaatatgtaatagttacactactgactattcagagataatgcattaagggaaaacatgtttaaaacagcccggaatatggcgggcctgccgtggattgccgcaatggcgttctttatgcaggcgctcgatgccaccattctgaacaccgctctgccggatattgccagaagcctgaaccactctccgctggcgatgcagtccgctgttatcagttacacactgacagtggcgctgctgatcccggtcagcggctggctggctgaccgcttcggtacccgcagggtgtttattatcgcggtgattctgttttccctcggctctttattatgtgccttttcccccaacctgccattcctggtggtgtcgcggataattcaggggataggcggggcaatgatgatgccggtggcccggctggcgctgctgcgggcttatccgcgcagcgagctgctgccgattctcaactttgtcaccattccgggattggtcggcccggtgctggggccgctgctcggcgggatcctggtgacttatgccacctggcactggatttttatcattaatatacctatcgggattctggggattatttacgccatccgccatatgcccgatttcaccatgccgaaacgccgctttgatacgttaggttttgccctgctcggtgccgggctggtctctgtttctgtcagtctggatctgttcggggataatgctctggcagcggcaacgccgttcctggtgatgggcagcggttttgcgctgctgactttctatgccctgcacgcccgccgtatttctgcgccgattattccgctgagtctgttccgcacgcggacattcagtgtcgggatagccggtaacgttgccacacgtctgggcaccggctgtattccgtttctgatgccgctgatgttacaggttggttttggttatccggctgtggtggcagggatgatgatggcgccgaccgctatcggctctattctggcaaaatcggcggtcacgcagattctgcgccgctacggttatcgcctgacattatttgccataacactgatgatcggcgcaatcatttcttctttctatttccagtcaccgggaatgtcgatttatctgctggtgctgccgctgtttattctcgggatggcgatgtcgacccagttcaccgcgatgaataccatcaccctcgcagatctgaccgagcacaatgccagttccggtaacagtgtgctggccgtgacccagcagctttccatcagtttcgggattgcggtgagtgcgtctgtattacgctattttgagtctcaggactggggatcaatcgttgataatttccacgcgacctttgtgacggtcggggtgatgacgattctgtcggcgtttgtgttcctgttcctgagccggactgacgggcggaatatgattaagaagaaaacccgcccctcagacagcccggcctcacattaacggcagataacagagccccggtttatcagtgccggggtcagcaccagcaagtcagaaggtgcgtctgcatcatccatgcggcgcagcagcttatccaccgccagtttgcccagctcatctttcggctggtgaatggtggtcagcggcggggtgagaaatgcagccaggtcgatatcatcataaccgacaaccgcaatatcctgcggaatacgcaaccctttctgccagatagcctgataagcaccgaccgccatcgcatcgttaccggcaaataccgcctgcggcggcaccggcagagaaagcagctgattcatggcactgaaaccgccactgaattcaaaatcactttccagtacatactccggcggcacatccagcccggcctgcgccattgcgcggtaaaaaccgtccagacgggatttcgccggtgatttatccagtggcccggcaatacaggcaatccgggtaaaaccgttttcgatcagatgattggtggcgatttcgccgccgagaaaagagttgtcctgaatcacatccccgccgaacgcaaacggcgaccaatccatcatcaccatcggcagacggggatagcggctgaaaacctccgctgacgggccttttatctcggtacacatcaacagcaggccatccacccgcttttgcagcagggtttccagactactgttcatccgtttgtgatccccttcggtattacagaggatcaggctgtagccgcgctcgtagcaactacgctccacgccgcggacgacttccgcataaaacgggttattactggtggtcaccagcattccgatggtgtttgtgcggttcattttcaggctgcgcgcaagtgcagacggcgcgtagttcagttcggcaatggcatcatttactttcttgcgcacgccgtcactgacaaaacggttattgttgatgacatgggagactgtcgaggtggatacccccgccagccgtgccacatctttcatcgtcgccacagtcttaaccacgctccgcaaggaaagcatctatttcacggcgccacggcaccgatggctgtgcgccccggcgggtgacagcaatcgcggcggcggcatgagcaaaacgcactgcttcatctgccggttttccttccagcagtgccgtgacatacgcgccgttaaaggtatcgccggcagcgatagtatccaccgcattaactttaaagcccgggatccggcggccttcaccgttgacgctcagccagacaccgcggctgcccagggtgataagcacctgtccgatacctttatcatgcagtacctgcgccgctctggctgcgccggtttcatcactgacagaaataccggtcagcttttccgcttcggtttcattcggggtgataacatccaccagcttcagcaggctgtccggtaattcccgcgccggggccggattgagtatcactctggtctgatgattttttgcagcctgtgcggcggcaatcaccgtttccagcggggactccagctgcatcagcagggcatcggattgttcaacaagccctttatacggcgcaaaatgtgccggtgtcagcgcggcattggcaccggcactgataccgatgacgttttcaccgtcttcattcacaaaaatcatcgccacgccggtggttgcttccggtaccacgctgactgcggcggtgtgaatacggtcgcgctgcagttgcgccaggatttccgcgccgatggcatcatcccccacacaggcaataaaggtaatatcagcaccgctgcgcccgcaggctaccgcctgattcgcgcctttgccgccgaaggctgtctgatattgcttaccgatcaccgtttcgccgggtgccgggaactgtgcaatattcataatatgatcgacattaatactgccgagaacggtcagacgggatgttgtcattacctttatttccttaattactgacaatactccccggtacggtgtaccggggaggctgatatcgttagtcttttacaatcagttctaactcaaccggaatggttttgtcgattttttcgcctttcagtactttatcggctgtctgaataccgatgataccgatctggtcaggacgctgtgccacggttgcacccagtttgccgccttttacagctttgataccgtcagctgtgccgtcgaagccgaccaccagcacatcatcacggcctgcagtctgcaatgcacgctgcgcacctaatgccatttcatcgttctgggcaaatactgcctgaacagccggatgtgcagtcagcaggttctgcataacgttcagacctttggtacggtcgaaatctgccggctggctggccagcacattcattttatgctcagcaaccgcctgtttgaaaccttcaccgcgctcacgggaagctgaagtcccggtgataccttccagctggataactttggcatccgcgccggttttacgggcaatataatcaccggccagtttgccgccgagaacgttatcagaggcaacgtggctgactacttcacctttattggcaacacggtccagggtgataaccgggatattggctttgttagccaggatcacagcgttaccgaccgcatcagagtctgtcgggttaatcagcatcagtttggtgcctttcacggtcagatcctgcacgttagccagttctttcgccgggttatccatagaatccagaaccaccaggtcgtaaccgagtttatccgcttctttctgcgcactgtctttcatggtgacaaagaacgggttgttcagtgtggaaataaccagggcaatggactcttttgccagtgcattggcgctgatagtggcgctcagtgcaacaacggagaaaagggtcgcaatctttttcagtttcatgtttctgttccttgcaggattcgggtaagtggattatttactgcttttgttatcaacgagtacagccagcaaaatcacaaccgctttaacaatcatctggtagttggaggagatccccagcagattcagcgcgttgttcagaaaacctaaaatcagcgccccgatcagggtgcccataatacggcctttacccccggcgagactggtgccgccgagtaccaccgccgcaatcgcatccagctcataaccgttaccggccatcggctgtgcggacgataaacgcgccacttcaatcacgctggctaatgccgccagcagaccacagagggcgtaaacaatgattttaattttatcgacattaataccggacaggcgggttgcggattcattaccgcccagcgcatagatataacggcccaggcgggtgtgatgcagcagataccaggccgccgcgaaaacgacaatcatcagccagaccggcgccggaataccaaacagacggccgataccaaaccagctgaacacatcggcgttatcactgaatccggtgctgatcgggctgccgtcggtatacacacgggtcacaccacgcagtaacagcatcatcaccagcgtggcgataaaagcctgcactttccctttcgcgacaatcaccccggtcacaccaccgatagccgcccccagagccagcgcacccgcaacagcaacaatggcgttaacatccgcgcccaccatggaggccgccaccgcaccggtcagtgccagcagagaaccgacagacaggtcaatcccggaggtcaggatcaccagtgtcatacccaccgccataatggcgttaacagaggtctgctgaagaatattgaacaggttattcagggtaaaaaagttcgggctgatcatggagacaatcacaatcaggatcagcagcgcgatcagtgatttctgctcaagcagccattctttggaaaaccagcgttttgacgccggggttgaatctgtacgcatatcttactcctgccctgcgccatattgtttgccgactgcggcggccattaatgcttcctgagtgacgttttccgcggcaaactccccgcttatccgtccttcgtgcatgaccagaatccggtcactcatccccattacttccggcatttcagatgaaataaggatgatactcaggccttcctgtttaaatttgttgatcagctgataaatctctttcttcgccccgacatccacaccgcgtgtcggttcgtcgaggatcagaactttcggccgcgtcatcagaccgcgtgcaattgccactttctgctgattaccgccggataagaacccgattatctgatccatgcccggggttttgatattgaacagctgaataaaatcactgacagtcagatgctcttctttatggttaaggcgtccggttttgctgctgaaatacggcagcgccgtcagagacatgttctcttttactgacatccccagcaccagaccatcgcgtttgcggtcttcggagatatacacgatgccgttatccagcccggctttcggtgagtttatctggcaggctttaccgtccatttcaaccgttccgccggtttttgccatcgcaccgtaaatgattttcatcagttcggtacgcccggcgcccatcagcccggaaacaccgagaatttcattctcatgcagcgtgaaactgacatcatgcacatcgcggccgcacaggtttttcaccaccagcttttctttgccgcgcggcagagtcagacgcggatactgatcttccagcttacgcccgaccatcatttcaatcagactatcctctgtcaggtcagacaccggtttttcaccgataaactggccgtcacggaacaccgtcacatcatcacaaatctcaaaaatttctttcagacggtgagagatatagacaatcccgcaaccctgctcacgcagctcacggataacactgaagagcgattcggtttcggtgtctgtcagggcatctgtcggttcatccataatgatgactttcgactcaaaactgagcaccttggcgatttccaccatctgctgatcaccgatggacagttccgccaccagccggtgactgctgtaagtgagattcagacgggccagtaatttatccgcttcggcatacatttttttccagtcaatgttaccgaaacgaccggtaaactcgcggccgaggaaaatgttttctgcaatcgtcagttcagggatcaggttcagttcctgatggataatcccgataccggcttcctgcgacgatttcggccccgtaaactgacgctcctgccccagaaacagaatctgaccggcgtcttttttatagatcccggtcagcactttcatcatggtggattttccggcgccgttctctccgaccagcgccatcactctgccgggataaacccgcagggcggcaccggataaggctttcacacccgggaaagctttatcgatacctttgagttcaagtaacggttccatagacacctcagaatgtcacgccggagaacagcatcacattggcaaacggtgtgcactcaccggtccggatcacggcccggctgttttgtgtctgtaacttgaaagaggcgtgagtcacatactgaatctgaatcacattaccctgctgtaattccagcgctttcagatgtaccacgatagcatcgtgcagctcactgttatgtgtctggatatcttccgccatcagtgcggcttccacctgcatctcctgcgtgatgactttaaacaccgacataaaatcaggcacaccctgtgttaatgccagatcaatacgcggtgtggcgggcggaataggcagcccggcatcagcaacagtaatatggtcggtatgacccagacgcgcgataaccgcggagacatcaccgttcagtaaagcccctttcttcataaaatcctcctgagcgaaacgtttcgcttttaaactatggtaggaaaaatacgggaaaactcaatgttcatccataaaaaatgtgatgatgatcgaaacgtttcgcttaagaatatgttaaatgaaaaagctaactgattgaatgagttatagctgaatggattcaatataaaacagtagttttttttccgttatttacgcaaaaaacagaagaaacgtgatttcacgcagtaaacgcggtagcttttttggtttataaacgcagaaactgcatcagtaaattcacgggagtcccatgcaacgttctgaacgtatcgcccggctgagccgacatctggaatccgggctgtatgaacgacagcacgccatccggctctgcttactggccaccctcagcggggaaagtgtttttctgctcggcccgccgggaattgccaaaagtatgatagcacggcgcatgaaactgattttcagtgacgcccgtgcctttgagtacctgatgacccgtttctccaccccggaggagatcttcggtccgctctccattgcggccctgaaagatgaagggaaataccagcgcatcacgcagggatatctgccggatgcggaaatcgtatttctcgacgaaatctggaaagcgggtcccgcaatcctcaacacccttctgaccgcaattaatgaacgtaaataccgcaacggtgacagcgaaaatgctatccctatgcggctgctggtggccgcctccaacgaactgccggacgatgacagcagcctggaagcactctatgaccggatgctgatccgcttatggctggataagttacaggagaaacagagcttccgcgccatgcttatcagcacaccgggagcatcggatgaacaaatccccgcgcatctgcaggtaaccgatgaggaatatcatcagtggcaggaagaaattgaccgtgttgtgctgaccgatcagatatttgaactgatttatcagctgcgtcagcagattgagcggctggataacgcgccgtatatctcagaccggcgctggaaaaaggcactgcggctgttacaggccagtgcgtttttcaacgaccacagcagtatcacgcctcttgacctgattttgctgaaagattgcctgtggcatgattccgcctcactgaaatccgttccgcaactgctaacacaactgatgtgtgagcaggcctatcagcagcgcagcctgttactgaaactggaaaaatattatcaggaatggatcctggaaacgcagactcagcaacagcgggatgccttcagtgtgatccgcagcagtgcccgtttcggacgcaaagtcagttacgctctgccggatacgctgccgcccggcccggtcaccctctttttacataacccgctgacattacatgatatgactgtcactcatgtgactattgagcgcagtgcctttgataccttctttgataaaggcgtctttgataaaggagggaacattgcggcaaaactcaacggcatcggctttacccagtctgtttccgccgccgtgaatgataacggccttctggaactgcgtgatgtcagtctgcgcagtagcaccctgttcccggcgggtaccgaaagccggatgacagaggcgcagaagcaaatctggctggataagctttcagcgatacgccagacactggtacagcagcgccagctgtttgcgcagcatcagcccgccctgtttgtcagtgatgactggattgcacagatagaggaaagctttctgccggtgacagagcgcctcgataaactgactcagcaaatgagcagcaccccgtgttaagtctttcagcactggatctggcgctggcagttaatgaaggggaactcattgaggagatcctgctgacactgctggccgctccgcaactggcctggtttttcgaaaagcacccgcggttacgccgtgcggtgctgactgatatgccgtcatggcggaaatcactggaagaacgggtgaaagaggcgctggttccggccgccctggcagatgagttccgtctttaccagaaaagcaccgctgcagaccggacagaattttaccgcctgctgccggaaatcctcaaagcgctggaggacatacactcgccattctcgccggaagcacaccgcctgcacagagatgagcaggaaaccacctcccatcagattttattcaatcagcgctggcgtctcagcctgattttacaggtcaccacctatcataaagaaatcctggagcaggaaaaagaacagctcctcgccgaacttcagcaacacctggcgctgagcggcaatcttgatccgctgatcagtgaaaatgagcaggcttccggtaagttatgggatctggcgaaaggatcactgaaatcccccggcccggcggacgatctcctgctgcgttacagcgaatttttaaaatcccagccggaactggaaaaactggcctcactgctggggcgcagccagacggcaaaatccgttcctcaggacagtgcggtgacagagccggtcaccattaccgaactggtaccggatcagaccccggaagaggtcagcggggtcgggctgagtgatgatgtgctgcgtcttctgcccgccgagctggcgttactcggtatcagcggcctggagctggaattttaccggaagctggctgagaaacagttatacacctaccggttacagggcgatcactggcaggagcggcaggtgatgcggccgatcgttcatcataaagatgaaaaacagccgcgcggtcccttcattatctgtatcgatacttccggctcgatgggcggttttaatgagcgctgcgccaaagcattttgtctcgcgctggtcaaaatcgctatggccgataaccggcagtgccatgtcatgctcttttccaccgaacaggtgcattatgattttctcggcccggacggcatcgaacagatgacccgctttctgcttcagagttttaaaggcggaacagacctggcgtcctgtctgacagaagcggcaaaacgactggaaacgccgcagtggcgtgatgcggatgtggtggtaatgtctgactttattgcccagcggctgccggatgaggtggtgaagctggttaaacgttcgcagcagcagggaaaacaccgcttccatgcggtagccctgtcccattacggaaagcccggtatcatgcggatttttgatcacatctggcgttttgataccggcttaaaaaatcgtctgctgcgccgtttcaggcggtgagcctccgggctcaccgtacagcagtgtattacagcatatcagtgatggtttcgcgcacttccggtgcccacacactgcattgtacctggccgatatggctgcgctggagcagtaacatcaccagacgtgactggccgatcccgccaccgatagtctgcggcatttcaccggctgccagcgatttgtgccagtccagctccatccgcacctgctgaccggtcagatccagctgacgcgccagggtgaccgggtcgacacggatccccattgaggataactcgaacgcatcctgcagtaccgggttccacacgaggatgtccccgttcagccctttgtagccgtcactgttctcggtggtccagtcatcataatccggtgcacggacatcatgggactcactatgagataatttaccgccgatgccgattaagaagacggcacccagttctttcgcgatggcgcgctcacggcctttggcatccaggtccgggtagcgtgcaagcagttcttcagagtgaataaaatgaatttggtccggcaggaacggtgtcagaccaaattccttacttactgcaagttctgtttcttttattgtctgatatattttactcactgtctgcttcagataaggcagcgtgcgctcctcatctgccatcactttttcccagtcccactgatcaacatagacagaatggattggggttaagcgatcctcatcaggacgcaacgctttcatgtcggtgtacagaccctggcccggctgaaaatcaaaacgccctaaggttttgcgtttccatttagccagtgaatgcacgacttcaaaggttgagcccggcaatgatttaactttcacctgaaccgctttctcgctgccggataaattatcctgagtaccatcacccacgcggcttaagattggcccctggacttcaataaggcccagttgtttttccagcagacgtgagaagtaagacttcacgaagctgatttgctgctgctgtcggatgaatgatttttccatgataataatccttgatatgcggaacatgtattgcctgtgaaatagattaagcaacagaatggggtataaattcaatatcctttatcaaaaataccctttgctatttataaaattcatttttatgatgctaaaaatgaattttcgttaatttaagggacataaaatggccgaaatttatcagatcgacaatctggaccgtgacatacttcacgctttaatggcgaatgcccgcacaccttacgcggaattagcgaaaaaatttgccgtcagtcccggtacgatccatgtccgggtcgagaaaatgaagcaggcgggtatcatcaccggcacccgggtggatatcagtgaaaaacagctggggtttgatgtgacctgctttatcggcatcatcctgaaaagtgccaaagattacccggccgccctcaagaaactcgataagctggatgaagtggtggaagtctattacaccaccgggcagtacagcatctttataaaggtgatgtgcaaaacgatagaatctctgcaggacgtacttatcaacaagatccagagtattgatgagatacagtccactgaaaccctgatctccttacagaacccgatcatacggacgatccgcccgtaagaaaaaattcttataaccacattatccacaggtagatcccagctgtttcacagcgtacaatagcggctctttacagcaggggatcaccatgaccacagttactctcattaccggcagtaccatgggcagcgcagaatatgttgccgagcatgttgccgaaatcctggaaaacgccggttttaccacagatgtgcagcacgggccggaagcggacgacgtaccgcagcaggacagtacctggttaattgtcacctccactcacggtgccggtgatctccccgaaaatatacagccgtttgctgataccctgcgtgagcagcagcctgatctcagttctgtccgttacggtgccatcgggatcggcagcagtgaatatgacaccttctgtggtgcagtccgtacactggatgctctgctcacctctctgggtgcgaaaaaaatcggtcagtcactcgaaatagatattcagaaacacgagattcctgaagatccggctgagatctggatcgaagaatggaaaaatttactctgatttgctgataaaaacagcaatcaactgtggataactcagggatcaacttgcgatcaacccgtagttattcactgtataagatcactctccgtcaggccctgtgaataagtacccgttttgatcccagcttatactgaacaggatcaacggtacttcacaggaaatgatcctttacagttttatgatctttatggggatttaacacttatccacagaggatcgcgatcctaataaaagatctaataaagagatctttaaataaaaagatctttatataattacctgcgtctttaccgctcatggtcagacggcaagagttgagttatattctctcccccgatgcgctactgcattttgtaatgaaggtttaacatgttttatccggatcattttgacgtcattgttatcggcggtggccacgccggtactgaagctgcaatggcagcggcacgtatgggccgtcaaacacttttactgactcacaatatcgacactctgggtcagatgtcctgcaaccctgctatcggtgggatcggtaagggacatctggttaaagagatcgatgcactcggcggactgatggcacatgccactgaccgtgccggtattcagttcagaaccctgaacgccagcaaaggaccggcagttcatgccacccgtgctcaggctgaccgcgtgctttaccgtctggcagtgcgcaccgcactggaaaaccagcctaacctgatgattttccagcagccggttgaagatcttatcgttgaaaacgataccgttaccggtgcagtgacccggatgggactgaaattcagagccaaatcggttgtactgactgtcgggacattcctggacggcaaaattcatatcggactggaaaactacagcggcggccgtgccggtgatccgccgtcagtctcactgtcacaccgtctgcgggaactgccgctgcgtgtcggccgtctgaaaacagggacaccgccgcgtattgacgcccggaccatcgattttgctcagctgacaccacaattcggtgacaacccgatgccggtattctccttcatgggcagtgcggatgagcatcctgaacagatgccgtgccatatcacgtacaccaatgaaaaaacccatgaagtgatccgcaataacctcgatcgcagcccgatgtatgccggtgtgatcgaagggatcggcccgcgttactgcccgtccattgaagacaaagtgatgcgctttgcggatcgcaaccagcatcagatcttcctggagccggaaggcctgaccagcaatgaaatttacccgaacggtatctccaccagcttaccgtttgatgtgcagatgcagattgttcactcgatgaaaggcatggaaaacgcgcgtattgtgcgtcccggttatgctatcgagtatgatttctttgacccgcgcgacctgaaacagaccctggaaagcaaatacctgcacggcctgttctttgccggacaaatcaacggcaccaccggttatgaagaagcggctgcccaggggctgctggccggtctgaacgccgcccgctattctgccgatcaggaaggctggttcccgcgccgtgatcaggcgtatatcggtgtgctggtggacgacctgtgcacactcggcaccaaagaaccgtaccggatgtttacctcacgggcggaataccgtctgatgctgcgtgaagataacgcagatgcccgtctgacagaaaccggccgtgaactggggctggtggatgacgcacgctgggcacacttcagtgaaaaaatggagctgatcgagaaagagcgtcagcgcctgagagatatccgcgtccacccgcagtccgaaagcgtaaaagagatcaacgcgatcctgaatacgcctctctccaaagaagcgaccggggaagatcttctgcgccgtccggaaatggactataaccgtctgatgaccctgagtgatttcgcaccgggggttgattcaccggcagcggcacagcaggtggaaattcaggtgaaatacgaagggtatatctcccgccagcaggacgaaattcagcgccagctgcgtaatgagaacgccacactgcctgttgatctcgattacaaacaggtgagcgggctttccaacgaagtggtggcaaaactcaacgaccacaaaccgacctcgatcggccaggcatcgcggatctccggtatcacaccggctgctatctctatcctgctggtctggctgaaaaagcagggccttctgcggcggagtgcgtaacggatgagtgatttacagcaacaactttccgcgctgctgcgcagtgcggatatccggctgaccgatcagcagaaacagcagctgaccggttatgtggagatgctccacaagtggaacaaagcctataacctgccgtctgtccgccagccggaacagatgctggtgcgtcatatcatggacagtatcgtggtcgaaccgcatctgaccggcagccggtttattgatgtcggcaccggccccgggcttcccggtgtgccgctggcgattgtccgcccggactctcactttgtcctgctcgacagcctgggtaagcgtgtacgcttcctgaaacaggtacagcatgaactggggctgggcaacatcgaaccggttcagagccgcgtggaagaatatcagggcgaaccatttgacggggtcatcagtcgtgcatttgcatcactggatgatatgctcagttggtgtcatcacctgccggtaccggaaaccgggcgcttttttgcactgaaaggcagtgtgccggaagaggaattaacccggttaccggaggggatttctctcgtcagtgtcgaaaaactggtcgtgccgcaacttgacgagcagcgccatctggtgattcttaaagcaaattgagtttgctgtacgtcaaaaaacagaaatatttttaaggggacggagtcagcgcattttctgcaccgtccctttgttttgccggagacgaaaataaaatgcgtaacggggccgttacaaagtgacaacggcagattggttactttccggtaagtttatctgcgaaaaatttcatgccggatcgtttttactgataacgcattatttcaaaattatttattttatttaaaattaatctgtaaatatcagttaaatgtttatttttttgattaactggttgatagatattgctattttcacaaccgttgatcgctataaaatgttaattcaactaatgtattttatgttatgtgatttttgtcacgtttcagaaatgagttgcacgtcgtattccgaggtagggtagactctattttttgtacgatttgtggcggcggcaaagaaattaaatttttattcactttttcgctacttattgattgaaaacaatctggctgcccgtataatttgcacgtttttgtctcttgacactctcgctcaaaggcagttttatacatcattcagtaagcctgaccccggaaggtgcacacggagaaactaaatgtcatgtctgtctcccttttcaacggaaaattgaccaaaaaactgttgtttttgcagtttatgacgtttgttgttcttagtgcgcttttttgcataaaaagtatcgagtggggtgcttccgcgctggccgggggagttgccgcatggataccgaatgcgatttttttgctgatcagtaaccggcagaaagcgcatgaggaaccgcagtcgtaccggattgcatggttttttgtggtaggggaagggtttaaagttatcttcgcgatagcgatactgatgattgctttaggagtgtttaaagcggcagttgcaccactggtcttgacctatttagcggtgcttttcgtgcagattatcgcaccggccgtgctaagcggttagcggttttaacaacaaagggtaagaggcatcatgtctgcatcaggagaaagtttaaccacaaaagagtatatcggtggccacctgaataaccttcagctggacctgaatactttcgagttggtcaatccccatgcgaacgcgactccatctttttggacgctgaacattgactcccttttcttctcagtcgtattaggtattttctttttatggcttttcagaagggtggcaaagaaagcgacaagtggcgttcccgggaaatttcagactgcggtagaaatgcttatcggcttcgttgacagcaacgtccgtgatatgtatcacggcaagagcaaggttattgcacctctcgcattaactgtgttcgtgtgggtgctgctgatgaacgcactggacttattaccaatcgacttcattccgtatatcggtgaacacatcctcggtttacctgcgctgcgtatcgttccgaccgcagacgtaagtatcacactgtcgatggcgattggtgtattcgttcttatcctcttttacagcttcaagatgaaaggcgtgaaaggatttgcaaaagagctgacattacagccttttaatcatccgttattcattcctgtcaacctgattctggaaggggtaagcctgctgtcaaaacctgtttccctcggtctgcgactgtttgggaacatgtatgcaggtgagctgatcttcattcttattgcaggtctgctaccgtggtggtcacaatggttactgagccttccgtgggcgattttccacatactgattattacgttacaagcctttattttcatggttctgacgatcgtctatctgtcgatggcgtctgaagagcattaattttattaccaataactgtgatttaactgaaacaaactggagactgtcatggaaaacctgaatatggatctgctgtacatggctgccgctgtaatgatgggcctggcggctatcggtgctgcgatcggtatcggcatcctcggtgggaaatttttagaaggcgctgcacgccagccggatttaatccctctgctgcgtactcagttcttcatcgtaatgggtctggttgacgccatcccgatgattgctgtgggtctgggcttgtatgtaatgtttgcggttgcgtagtgatacggccactcccggatatttacatcaactcaattagataaagaggtattgtgctgtgaatcttaacgcaacaatcctcggccaggccatcgcgtttgtcctgtttgttttgttctgtatgaagtatgtatggccaccgatcatggcggccattgaaaaacgtcagaaagaaattgctgacggtttatcttccgcagaacgtgctaaaaaggacctggacttagcgcaagccaatgcgaccgaccaaatgaaaaaagcgaaagcggaagcatctgccctgatcgatcaagcgaataaacaacgcgctcagatcatcgatgaggcaaaagcagaagcggaagttgagcgtagcaaaatcgtagcacaggcgcaggcggaaattgacgccgaacgcaaacgtgctcgtgaagagttacgtaaacaggtcgccattttagctgtcgcgggtgccgagaaaattattgaacgttccgtggatgaagctgctaacagcgacatcgttgataaacttgtcgctgaactgtaaggagggtggggcatgtcagaaatcgttactgtagctcgcccctacgccaaagcagcttttgactttgctgtggaaaaccgggccgttgaaaaatggcaggatatgctggcatttgccgctgaagtgacacgcaatgagcagatcgacgatctgatttccggttcttttgctccggaaaccctggctcaggcgtttatcactgtttgcggtgagcagattgacgagcatgttcagaacctggttcgtatcatggctgagaatggtcgcttagtgaccctgccggaagttagccgtcagttcgcaacactgcgggctgcgctggagtcaactgttgaggttgaagtcacttcagccggcgaactcaatgaacagcagctggcgaaaatttctgcagcgatggaaaaacgtctgtcacgcaaagttaagctgaattgcaaaattgataagtcagttatcgcggggtttgtattgcgcgccggtgaccttgtcatcgacaacagcattcgcaatcgactcgagcgtttaaccgacgtcttgcagtcttaaggggactggagcatatgcaactgaattccaccgaaatcagcgaactgatcaagcagcgcattgctcagttcaatgtcgtgagtgaagctcacaacgaaggtacgattgtctccgtcaacgacggtatcattcgtatccacggtttagccgaagttatgcagggtgagatgatctctctgccgggcaaccgttatgctatcgcactgaacctggagcgcgactctgttggtgcggttgtgatgggtccttatgccgacctggcagaaggcatgaaagtcaaatgtaccggtcgtattctggaagtgccggttggccgtggcctgttaggccgtgtggtcaacaccctgggtgagcctatcgatggtaaaggccaggttgagcacgatggtttctcacctgtcgaagttatcgcaccgggtgttatcgaccgtcagtccgttgatcagcctgtacagaccggttataagtctgtcgatgcgatgattccaatcggccgtggtcagcgtgagctgattatcggtgaccgtcagaccggtaaaaccgcactggcaatcgatgcaatcatcaaccagcgtgattccggcatcaaatgtatttacgtcgcaattggtcagaaagcgtccactattgctaacgttgtccgtaaattagaagagcacaatgcgctggccaacacaatcgttgtggtcgcgagtgcgtctgaatctgcggcactgcaatacctggctccgtattccggttgtgcaatgggtgaatacttccgtgaccgcggtgaagacgcgttaatcatttatgatgacctgtcaaaacaagcggttgcttaccgtcagatctccctgctgctccgtcgtccgcctggacgtgaagcatatcccggtgacgttttctatctgcactcccgtctgctggaacgtgctgcgcgtgttaacgcggaatatgtggaagcgtttaccaagggtgaagtgaaaggcaaaaccggttctctgaccgcgctgccaatcatcgaaactcaggcaggggacgtatcagcgttcgttccgactaacgttatctccatcactgatggtcagatcttcctggaatccgcgctgttcaacgccggtatccgtcctgcggttaacccggggatctccgtatcccgcgtgggtggtgcagcacagaccaagatcatgaaaaaactgtccggtggtatccgtaccgctctggcacagtatcgtgagctggcggcgttctcacagttcgcatctgaccttgatgatgcaacccgtaaacagcttgaccacggtcagaaagttaccgagttgctgaaacagaaacagtatgcaccaatgtcagtggcacaacagtctctgtcactgtatgcagctgagcgtggttacctggaagatatcgaaatttcgaaagtcgtgccgtttgaagctgctctgattggctacgccactcgtgaacatgctgatcttctgaaagaaatcgaccagacgggtagctataacgatgatatcgaagcgaagttgaaaaacgtgctcgataccttcaaggcgactcagtcctggtaatactaaacggcctgtgtgaacagtacaggccgtctggttcatgaggagagcaaatggccggcgcaaaagagatacgttctaagatcgccagcgtacaaaatacgcagaagatcactaaagcgatggaaatggtcgcggcgtccaaaatgcgtaaaacgcaggaccgcatggcggccagccgtccttatgcagagaccatccgcagtgtgattggtcacattgcattaggtaatctggaatataaacatccatacctcgaagaacgcgaggttaagcgtgtcgggtacctggttgtttctaccgaccgtggtttgtgtggtggcttgaacattaacctgttcaagaagctgattgtcgaaatgaaagactggtctgacaaaggtgttcagactgatctggctctgatcgggtccaaagcaacatcattcttctcctctgtgggcgggaatgtggttgctcaggtaaccggcatgggggatgacccgtcgctggctgaccttatcggttcggtaaaagtcatgcttcaggcctacgacgaaggtcgtcttgacaagctgtacattgtaactaaccggtttgtgaataccatgtctcaggttccgaccattgttcaggttctgccgttaccgccaagcgatgacgaaaacctgaagaagaaaacctgggattatttatacgaacctgatcctaaagcgttactggattcccttttacggcgctacatcgaagcgctggtataccagggcgttgtggaaaacctggccagtgagcaggccgcccgtatggttgcaatgaaagctgcaactgataacggcggtaacatgatcaaagagctgaatttagtttacaacaaagcgcgtcaggcaagcattacacaagaactcaccgagattgtgtccggtgctgccgcggtttaacacccgggttttacgaattacgtagaggattcaagatggctactggaaaaatcatccaggttatcggcgccgttgtggacgtcgaatttcctcaggatgcagtaccgaaagtgtacgatgcgcttgaggtaacaaatggtaaagaaaaactggtgctggaagttcagcagcagttaggcggcggggttgtccgttgtatcgctatgggtacatctgatggtctgagccgtaatctggaagtaaccgatttaggccacccgatcgaagtccctgtcggcgtgaaaaccttaggacgtatcatgaacgttctgggtgatccgatcgatatgaaaggtgacatcggcgcagaagaaaaatggtctattcaccgtgctgcaccaacatacgaagaactgtctaactcccaggaactgctggaaacaggtatcaaagtaatggacctgatctgcccgttcgcgaagggtggtaaagtcggtctgttcggtggtgcgggtgtgggtaaaaccgtaaacatgatggaactgatccgtaacatcgcgatcgagcactccggttactctgtattcgcaggggtcggtgagcgtacccgtgaaggtaacgacttctatcatgaaatgacagactccaacgttctggacaaagtatcactcgtgtacggccagatgaacgagccaccgggaaaccgtctgcgcgttgctctgaccggtctgaccatggcggaaaaattccgtgatgaaggccgcgacgtactgctgttcgttgataacatctaccgttataccctggccggtactgaagtatccgcgctgttaggccgtatgccttcagcggtaggttaccagccgactctggcggaagaaatgggtgtgcttcaggaacgtatcacatcgaccaaaacaggctctatcacgtctgtacaggccgtttacgtccctgcggatgacttaactgacccgtctcctgcaaccacgttcgcccaccttgatgcgaccgtcgttctgagccgtcagattgcgtctctgggtatctaccctgcggttgacccgctggattccaccagccgtcagcttgacccgctcgttgttggtcaggagcactacgatgttgcccgtggcgtacagtcaatcctccagcgttatcaggaactgaaagatatcatcgcaatcctcgggatggatgagctgtcagaagaagataaactggttgttgcacgtgcccgtaaaatccagcgcttcctgtctcagccgttcttcgtggcagaagtcttcaccggttcaccgggtaagttcgtttccctgaaagacacaatccgtggctttaaaggtatcctggaaggtgattacgatcatctgccggagcaggcgttctacatggtgggtaccatcgaagaagctgtggaaaaagcgaagaagatttaatccggttgacaggaggctgatatgtctgcaatgacgtttcacctgacggtagtaagtgccgaaaaacaactgtttaagggcttagtccagaagattcaggtgacaggcagtgaaggtgagctgggtatttacccgatgcataccccgctgctgactgccataaaaccgggcatggtacggattgttaagcaatttggtgaagaagagcttatctacctttcaggcggaatgctcgaagtacagccaaacggcgttatcgtacttgcggacacggctatccgtgcaaacgatctggatgctgcgctggcgatggaatcaaaacgccgcgcagaagaaaacatccggaaagcacatggtgacgtggattatgctcaggcatcagccgaactggcaaaagcaattgcaaaattacgtgtaattgacgaattagccaagaagatgatgtaaccgaggcagttaaaatataaaagccagtcagtatccgctgactggcttttttgcgttgcgaaatatgtggtatttttttgtgtaaaaaggtttacttggcactctaaaagaggagcgatcagatttcttatgtctacgaatgctaaaagtgtggtaattctcgctgcgggtaaaggtacccggatgtactccgcgctgccgaaggtattacatcacctggcgggcaaaccgatggttcagcatgtgattgatacagccctttcactgggcgcacagaatgtgcatctggtttacggacacggcggtgatttattacagaatacgctgtcggatcagaatctgaactgggttttacaggcagaacaactgggaaccgggcatgcgatgcagcaggctgcacctcactttgccgatgacgaagatattctgatgctgtacggcgatgttccgctgattgcggctgaaacgctggaacgcctgatggcggtcaaaccggaaggcggcattggcctgctgacagtgattctggataacccggcgggttacggccgcatcatccgcgaaaacggactggtgaccgggattatcgaacagaaagatgcttctgaagagcagcggaaaatcaaagaaatcaataccggtattttggttgccaatggtggtgatctcaaacgctggttagcaaaactgaataacaataatgcgcagggtgaattttatatcaccgatattattgccattgcgcatcaggaagggcgtcgtattgagacggctcatccggaaaaactgagtgaaatggaaggggtgaataaccgccttcagctcgcggcgctggagcgtatttatcagcgtgaacaggccgatcgcctgttactcgaaggtgtgatgattctggatccggcgcgttttgacctgcgcggcactctgacacacggcaaagacgtcatcattgacgtgaatgttattatcgaaggcaatgtgactctcggtaataatgtggtgattggcgccggttgtgtgctgaaagactgcgttatcggtgacggctctgtgctcagcccgtataccgtggtggaatcatctgaaatggcccgtgattgtactgtcggtccgtttgcccgtctgcgtcccggctctgtgctggcagacaaagcccatgtcggcaactttgttgaaatgaagaaagcgacactcggcgtcggctccaaagccggacacctcagctatcttggggatgcggaaatcggtaacgatgtgaatatcggtgccggaaccatcacctgtaactatgatggcgcaaacaaatttaaaaccgtgatcggcgatgatgtttttgtcggctctgatacccaactggtggcaccggtcactatcgggaaaggcgcaaccgtcggtgccggtacaaccgtaacaaaagatgtgggtgataatgaactggtgataagccgggtcagacaaacccagattgccggctggaaacgtccggtaaaaatgaaaaagtaaatacaataataaccccatatctacacagcccggggacacggcaacgccgtaaaaataatcaggcaggacatcgttaaatcaggaatttacaactatgtgtggaattgttggtgcagtagcacaacgtgatatcgctgaaattctgttagaagggcttcgtcgtctggaataccgcgggtatgactctgccggtatggcggttgtggacagcgaagggcacctgacccgtctgcgtgaagtcggcaaagtgaaaatgctggcggaagaggcagaaaaaacgccggttaccggcggcaccggtatcgcgcacacacgctgggcaacgcatggcgagcctctggaacgcaacgcacacccgcatgtttccggaaatatcgccgttgttcataacggtattattgaaaactacagtgaattacgggaattactgaaaggccgcggctatcagttcacttccgacactgacactgaagttatcgcacacctggtgaactgggaacattcacagggcggtacgctgcgtgaagccgtacagcgcgctatcccgcagctgcgcggtgcatacggtactgtgattatggattcccgcacaccggaactgctggttgctgcccgttcaggcagcccgctggtggtcggtctgggtgtcggtgaaaacttcctcgcctctgatcagctggcgctgctgccggttacccgccgctttatctacctggaagaaggggatatcgtcgaaatcacccgccgtcatgttcatatttttgaccgcaatggtgatgaagcagaacgcgatgtgattgaatccaacgttcagtatgatgccggtgataaaggtatttaccgtcattatatgcagaaagagatctatgagcagccgctggccatcaaaaacacgatggaagggcgcctgcgcaatgaaacggtcgaattcagcgagctgggggaaaaagcccgtgatgtgctgtccggtattgagcatatccagattgttgcctgcggcacctcattcaacgccgggatggtctcccgctactggtttgaagctctggcaggtattccgtgtgatgtggaaatcgcctctgaattccgttaccgcaaaccggcctgccgtaagaacagcctgctgatcaccatttcacaatccggtgaaaccgctgataccctggcggcactgcgtctgggtaaagagctgggctatctgacctcgctggctatctgtaacgttgccggttcatcactggtgcgtgaatctgattttgctgtgatgaccaaagccgggactgaaatcggtgtggcctccaccaaggcattcactactcagctgactgttctgctgatgctggtggcttacctcggccgcctgaaaggcaaaggtgaagcactggagcacagtattgtgactgcgctgcatgcgctgccgagccgtatcgagagcatgctgtctcaggataaagtcattgagcagctggcggaagatttctctgataagagccacgcactgttcctgggccgcggggatcagttcccgatcgcggtggaaggcgcgctgaaactcaaagagatctcctatatccacgcagaagcgtatgctgccggtgaattgaaacacggtccgctggcacttattgatgctgacatgccggtcattatcgtggcaccaaacaacgaactgctggaaaaactgaaatccaacattgaagaagtccgtgcccgtggtggtctgctgtatgtcttcgcagataaagacgccggtttcagcgacagtgaaaatatgaaaattattccgctgccgtatgtggaagagcttattgctccaatcttctacaccatcccgttacagttgctctcttatcacgttgccttaattaaaggtactgatgtcgatcagccgcgtaacctggcgaaatcagtgacggttgaataagctgatactcatttaacaaaatagttgttaatcccaaaaatccggttatccttaaaaaaggaaaccggatttttttatggaataatatatggtttcataattaaatttatttttatagtaagcattatttatatagggatgtatataattatggcggatttaatttatcttactataaaaggaaataaacaagggcttatctctgcggggtgttcatcatatgactcaatcggaaacagatatcaacaaggccatacagatgaaatcttagtttatgctactgattatgaaatttcacgcagacaaaatgtatctcatgcaaattttatttttataaaaggtgatgataaatcatctcctttgttactttccagtatatcatctaatgaactactggaatgtgaatttaagtattatcgaataaatcatagcggtggtcttttacactataaaaccataaaactgactaaagcatctattgttaaaataggaaatatatatcccgattcattgactgaaaatgaagcgtatccgaaagaaacgatagcgttaagatatgaaagtatcacatcaaataatcatgctgccagtacatcaggttacagcatcagtaataatgtttaaatggtgtattgcgtatgagaaatgatgtatttaataacagacgttatgtacctgttatcaggtacaatgatcccgcgctccaggcagccatgctgaataatcagggtgattatgcaaggatttttgttatgatcaataacgtgtttattggtcattcaggactggttcttgatgaaggtgaatattcatttctgtatgatccggctggtagttatacagggtgtaaaaataataaatgtgagggttcggtaaaaagtttcagagggtctggtgactattttgaatatcttgattttaattgggatgattaccttcagtaccagctggatgatggtgaggatataattgtatttgaatttattgttcctgacgatcaaatgaaaaatatgaaagataatatccttaattattctgatttcgccactgacttcacctgtgcaacaaatgttgcccgcgtattacgtgagagtggcggcatattctctgacattgatgatggattttttactccataggggttaaaaggtgcattgtttgaaattcaggtaaaaaaaggaattatgccttatgcccatgttcccgtaccgcaataataatcaatgctcggcattgatatcatatatatcactttgtttaggtggcgttttttattatcttgaagtggtgcatcagttattctttgtaatatataaggatggtgcaaaccatattccaattacattggtttaccataaagcacttagtttttctttgctggtttatttagttatattagcacctgtatattatttttatcttaaaaaacatattaatataatatatcgtttcttattatacttcattatacctgccacgatttctctgattctttggtatttttatattttccggagctatccgattggttcgtttattatgtcaaaaagtacatatgaaacatttaagtacatcatgatagtcagttatctgagcggactgacagctattatgacattagtgactgtggtggcagattgcgtcattaatctgagcagaaaaatcatcattttttttgataactgatacccgatttttcctgcatatgagaaatataaacttaagttaaatttcacatctgagcagaacaagggcggtaaccaggcttctgttctgcccggataaagtgtgttcaattagcgggttttttctatcccgccattctcatccttaagaaaaacaacatcattatttgactaacaatcatatttataaactaaatgtgattaggttcacttacttatcagtaatagaatttgaatttatttctttaataaccaattatatagaaagccaaaagaaaaaataaattaagattcaggcactaaaaatatcgcaaaataccaatactggagtaagttatgcttaaacatatcagtataagaaccgtcattgtcgtctttctcatctgtaatttcactacaattaatattatctttctcttacccctgtccgcactaattaaattagtaatgcttaatattgttagtgtttttacgtttgcctgctcatggttttacattacgaagtatctggtgatgccgatcaatgccgtgaaaaacagtattgatgaggttaacgccggtaacttatcggtgcggatcccggtatttggtaataactgtgccggacgcctgatccccggggtgaatcagctggcggaaagcctttctctgctggtcagtgagatccgcagctcatcagattccgcatctgtgttatctgagcagctggcaatgcgcagttttgagctgtctgccaagacagagcagcaatcggccatgctggtggaaacagcggccaatatggaggaaattgccgccgggactaaaaacaatgcggagaatacggtactggtcagtgaacatgcacaggaagcaaccgtgtttgccggacatggcggtaagctgatggaggaagtggccaccaatatgcattctattaatgattgcaccaataagatgactgaaatcatcaccctgatagattccattgccttccagaccaatattctggcgctgaatgctgccgtagaggctgcccgtgccggtgagcacggcagaggctttactgtggtggccggtgaggtcagaaatctggctcaccgcagttcagaatcagccaaaaatattaaatccctgattgcggtgacaaccgacaatgttaagcagggggaggatattgttcaccgcgccgaagtgaatatgaataagattgttgagggtgcggagcgggtaaacggcctgatggcgcagatttctgtttccacacaacagcagcagcaggggattgagcagatagcaacggccctttccgagctggaacaggcaactcagggcagtgtgatgattgccgatgagcttgccggttcttctgatgcgcttaaggctcaggttgcggatttacagtcacggacacgggatttccgcctgacggatcatgccgctgctcagtcacacagcaaaccggcattaaacaccggtaaacgggttgcgcggtttgccgcatcagctcaggaatgattgccgaaaacctgaattgcctgctgtaatcgcgaggagcgccgtgtcagttcagaggtggcaccggtgacattattgaccatttcagtattgttgccggtcatggtgccgatacgggcgacagattcattgataagctccagtgcctgggtctgttctttggtggcaagaccgatttcattgatcatggatgacatcttcagcacatcggtgaccatttccccgagctgggtttcagtctgctctgccattgtcacgccggtgcggacattggctgcgtttttctcaatcagggtttttatctctttggcggcagaggcggaatgcagtgccaggttgcgcacctctgcggccacaacagaaaagccccgtccggcatcccctgcacgggctgcttccaccgacgcattcagcgccagaatgttagtctgaaaagcaatacggtcaatcacaccgatgatatcaacaatctgattattatccgcagaaatggtatgcatcatatcgatggttttctgcatggtttcgttgctttgtgttgcactgttactcgcattaccggcgatattcatcgtcagataaacactctcggcagtctgctgcaccgcactgctgatttcctcaatggcgactgcggtttgctgtaagtgggcggatgcctcttcagagcgggtatgcagcgcggtggtttcctgtgaaacccgctggttgatagcgcggatcccggcaacctgtgtgctgacatcatccaccagcgagttcagattaagcccggattgattcaccaggcgcatcagcagtccgatttcatcgactctgtccatgtgtaccggatccggtttccgcccggaaacgacttttttcatctgtgacagcagtaatttaaccggctgagagacttgtgactgaagataaaccgacagcagaataaataaagctgccacaccacccgcctgaataaacggatttaacggtgaaaataccagagccagagttaataacattacagttaataaggaataattaatccgctgcccgaccggcagccatttcagtaatgataaaaatgccagtttacctttgcggataataatacctttaaaaagacgatatccgtttaatttattactctttaacctgctgtaaagtgaggcgcttttttttatttcatcacgggttggtactgtccggacagaaatatagcctgtcagttttttatcgtgccagaccggggtgacatttgcccgcacccagtaatggtcgccgttacggcagcggttcttgataatacctgtccagctgtcgccctgctgcagggtataccacatatcggcaaaggcggccgggggcatatccgggtggcggataatattatgaggctgtccggttaattgcccttcctcaaacccgcttgcggtaataaatgcagagtttgcataggttatatggctctgaatgtcagtggttgacattaatattgcattatcgttaagcgagtattcatgctgtgtgacaggcatgttgtttttcatgataaccccgggtgatataaaataattaacaaatagccctccgcactgtaaaaaacagtacagaatggttgttttattttttggctaatatattagcaattgaccgggaaatatagatttttttatttttaaaaattatttttgtcatgaaaatgaaacaatttaagcgatctttaattattaaattaatattatgtttattcttttttattgatgtggcaacggttttcatgttattcgttttttatatcggataggggatttaaatttaaataaatctcagtttcggaatttttaaatcattacttaaccgtaattttcagtgaagacaatagctgtgtttttaaggtaaatgtgtaccggttatctggcaggatgatccggaatgtggcgcagcgtcatttcggcgatattcagtgattccggcagggcgatacggtaagtgcagaacacttttctcaggttcatgtccaccacgacagtgtcgagctgtaaatttttcgggatggaaaacccgagaccggagccgataaacacaaacaggttctccaccggaacataaaacagcacatgctggcgttcaatttcagtggcggagaccagaccaaacagtttcagcggcagtttattaccggctttaagatgcgggatttgcagtgtcgggtgggcaccacaccggtaattgaggttatccggtgtctgcggcgggggggatgataccggggcattatcaccggcgtactctgcccgcccctgccaggtccggccgaaaaaaccgaaaccgtccgggcggagtatctgactgatatgctctgccgggatatccggagattctatctgatgcgccggtaactgtgttttatcacactgagccagaaattctgccggataccaacccacgccaaccgggtttgccggagaggtaaaaaccgtatcaccggtgctgtatgtaccgccggaggcatgttcataacggatatcaagataactgatcggttcagattctgtgagaaaccactcgtcatcctcttttacccagtaacggggaccgaatatgcgcaggactttctgatattttccgatctgaataccgacatcaaaaaccgggaccggattattttccggtacaaatgccgtggcgttaatgacaatatcggttttcggtttataaggggctaaatcactttcgtattcaatactggtatcaaccatttcattgtagctgacatccgtataattcagcagggattgttccggggaaataacaagctgactctgtccgtcacggttatttatccggatatcataggtaatacgtgatgcaacgatatgaaatgtatcatgttgctgattatcgctgtcataattcagcgccggaaaaatagtgtgattgataaaattcatgacattagcctttataacagataaaaaatcacaaaaatacgcaatttccctcaggctgatgtaatacagggaagatataataatatcctatgtataaacacgatatttttacgggttcagccggtttttaatatcgctaatgtagtctttttccggcaaaagaatataagagttagccgatattctttttattatttaccgcccgcaccgcaggcggtaaataaaggtttatcagccggaaaaattgagacaggctgcgccccgggcgccgccggaatccccgtagcgggctttatgaatggcgggcagtgaggcaacgccgtagaggtactgcggcaggtattccggcagcaggcggtaaatctcctcaaactgtgataatccgccgccgatcaccagcaaatcaggatcaaagacactcagcacatttcccagatagtgcgcgagcagcgacatataccgctcaacgtgcagctttgcattatgttcaccgtcgtaatagcgggcgataatatcaaccgcactgagcttttcgccgtaaaatgccgtgaaaatccgctcaaatccggggccggaaagataggtttcaaaacagccggtttttccgcagccgcagagggtctccggaacctgatgcccgagaagcttatccccttccagcgtcatattgatgtggccgatttcaccggcgataccatttttccccggtaacacggtgccgttaatcacaaagccgccgccgacaccggtaccgaggatcagccccagtactgtcggatagtggcggaatgccggatcccaggcttcggagagtgcaaagcagttggcgtcattttcaatttttaccgggcgctgcaatatggtttccagatcatgacgcagcggctgatactgagcggcaggcacattggtggtaaacaccgttcctttttcatgattcacaatgccgggaacgccgatgccgatttttcctttgcatccgagttcgctatccgcctgttctgtcagctgtctgaatgattcaagcagcgcggcgtagctctctttcggtgtcgcgatacgcttttgccagaccggttccagtgcttcattaaaaacggcaagctcaattttcgtcccgcccatatcaaaaccgtaatacatgatgattccgccctgttctgatcactgttgtgttatccccagcataaagcaccgacggccggatgagaacccgtcgtctgatataagtcccgcttctgaacagcgggggatcatcaataaattcacttgcaccgttattcatattttgtcaggttaagagtattgcaaacgcagttcagatgagaataaaaggaaacatcacgatgaaaaatgtgggatttgtcggctggcgcgggatggtggggtctgtgctgatgcagcgcatgacagaagagcgggattttgacgggatccgtccggtatttttctcaacctcgcagagcggcggggaagcgccgtcattcggcgggcaccgcagcacgttacaggatgcatttgatattgatgcactgcgcgcgctcgacattattatcagctgccagggcggcgattacacccatgatgtctatccgaagttgcgtcagagcggctgggacggctactggattgatgcggcatcagcactgcggatgaatgatgacgccattattattctcgacccggtgaacggtaagcatatagaagaagggctgaaccacggcattaaaacatttgtcggcggtaactgtacggtcagcctgatgctgatgtccctgggcggcctgtttgaggctgatttggtggagtgggcctctgtggcgacctaccaggcggcatccggtgccggtgcgcgtcatatgcgtgaattgctggtgcagatgggggcactgaatgcccatgtggtgaaagagttacaggacccggcgtccacaattctggatattgaacgcaaagttactgaatttacccgcagtggtgcattaccggcggaacagttcggtgtgcctctggccgggagcctgatcccgtggattgataagcagctggataacggccagagccgcgaagagtggaaagggcaggcggaaaccaacaagattctgtcacgcggtcagaacattattccggtggatggcctgtgtgtccgtatcggcgctctgcgctgccacagccaggcatttaccctgaaactgaagaaagatctgccggttgcggagattgagtctctgctggcagctcataatgagtgggttcgcgtggttccgaatgatcgcgatattaccgtgcgcgagctgacccctgcggcggtcaccggcacactgaaaacaccggtcgggcgcatccgtaaactgaatatggggccggattatatatctgcgtttactgtgggtgaccagcttctgtggggcgccgcagagccgttacgcagaatgctgaatattttgctgaaataacgataataatctgaagatgaattcttatgcagacccatgtgttgattttttcacatgggtcattttttttgtttgcgtttttctttttttgcagtatctgcatcttcccgcccactgaaccggttaaacaaccggatgtgtgagttttctgcggctgaaaaatacctgtcaggtctatattaccgggattgttggcacatcccgtttattgtttgttatttgcgcaaaatgcgccggtaacatttcattcctgtcccgtttttattttattgttaaaactgtacatataatgtgttgtatattcccggggctgttttatagcagctatttaatttttctgagaattaaaatccgcgtcagtagccggagagactgacttaatgtttatatttagttgtatgttttaaatcacccgctgtatctgtccctttcctgtttttttgtctgctgttcccggcgctgtaaaaatggcttgattcgggtaataaaaaaaggcgctgatttctgatcctccgtaccgcctgctttttcctgtcgttcattcttctttcgttaattttagtctgtgagtttcttatataaacacatccggatttcacaaaaccgtaacgaaataaataaatgtttcttttgtgttaatccggttttttattaacggaatttatttattatcgcagtgattaaatcagatcacataagaaaacgtaattgttaacctgtctgacgggtttgaatattgcgcatttcataagctaatatacttaggttgcttcactgaatgcacggttttcagcaggggatgtcctgttttcccgtaattttccgtggtcaggatgacaacagtgttaattaattttaactatcaataagtgatctgagaaggaggttttatgtctcttcatgcagtgaaaggtaaaaatagttcagaatttattgatatttacgcatcaacggactcggatgcaaaactcccgaaatacaaaatgccggacgacagcagtgacccgcgaattatttacagtgtggtccgtgacgaattactgctggatggtaactcccgtcagaacctggcgacattttgtacaacctgggttgaggatgaagtcaaacagctgatgaccgacagtgtcgataaaaacatgatcgacaaagacgaatatccgcaaaccgcagaaattgaaagccgctgtgtgcatattattgccgacctgtggaattccccgcaggcacaggaaactatcggctgttctaccaccggctccagtgaggcggcaatgctcggcgggctggcaatgaaatggcgctggcgtaaaaaccgtgaaaaacaggggaaagagaccggtaagccgaacctggtaaccggcccggtacaggtgtgctgggaaaaatttgcccgctattttgatgtggaactccggcagatcccgctggaaggtgatgccctcggtatgcagccgtctgatctgcgcaaatattgcgatgaaaacaccatcggcgtggtggcgacactgggggtcacgtttaccggaatttatgaaccggtggcggaactggcaaaagaactggatgcaatacaacgggataccggttttgatattccgctgcatgttgatggtgccagcggcgggtttatcgcgccgtttatccagccggaactggtgtgggacttccggattgagcgggtgaaatccattaacagctccggacacaaatacggcctgtcaccactgggtgtcggctgggtggtctggcgcagcaaagaagacctgccggaagagctggttttcaatgtcgattatctcggcggcaatatgccgacatttgcactgaacttttcccgtcccggcgggcaaatcattgcacagtattataatttcctgcgtctgggacgcgccggttataccaaaattcagcaggcgtgtgcagatactgcgcaatggcttgcggatgaactgaacaagctggggattttcgacctggtgtatgacggccgcggagcactgccggcggtggcttacaagctgaaaccgggcgtgacacagttcaatctgtacgatctttccgaccgtatccgcacacgcggctggctgatagcctcttatccgctcccggcggacagagagaaaaccgttgttcagcgcattatgatccgccacggcgtcagccgcgacctggccgcgttgttgctggatgatattaagcgggctatcgatcacttcagacaaaatccggtagtgaactcgactgccaaagccaccttccatcacggttaatttttatacaatgacctccggccggtatcagcggccggaggatctcactcattatcctccggggtgcgtttatgactgatacttcaaccaaaaaaccgtcttccggtgcagcaaaactgactgtcggcacacttatcgtcatgaatattgtggcggtggtgagcctgcgcggtttgcctgccgaagcggaatacggtctcagtgcgattttctattatctgtttgctgcggtgtttttcctgatcccggtatcactggttgctgctgaactggccaccggctggtcagagaaaggcggggggttccgctggggcggcgaggcgttcgggccgcgtctggcgtttctggcgatggcgatgctgtggattgaggtgacggtctggttcccgaccgggctgacattcggggcggtatctctcgcctttatcgatccgcatcagacatttgacgaagcgctggcggcaaataaattctttgtgctaggtattgtcctgtttatctactggctggcgacctttattgcctttaaaggcgtgggcgcgtttgcccgggtatcaaaatggggcgggattatcgggacgattgttccggcgatcattctgattgtacttggtttctcctacctgttcagcggtcagacgccgcagattgacctggcgtgggatcaggttctgccggatttctcaaacttcgataacattgtgctggcggccagtattttcctgttttatgcaggtatggaaatgaacgctatccacgtgaaagatattgataacccgaccaaaaactacccgaaagccatcattctggcggcggcgggtacggtggctatctttgtgctgggtacgctggcgatcgcctttatcattcctcagtctgatatcagcctgacccagagcctgctggtggcttacgatgacatgttcaaatgggcacacattccgtggatggggccgattgtcgccgttatgctggctatcggtgtgctggcgagtgtggtgacctgggttgccgggccgtcttccggtcttctggaagtggcgaaagcgggctatctgccgcactggttccagcataccaacaagaacgggatggcaacacatatcctgctgatacaggctgtgctggtctctctgctggcggtgctgtttgtggtgctgccgtccgtgcaggcggcttatcagatcctcagtcagctgacggttattctctatctgatcatgtatatgctgatgttcagtgccgcaatttacctgcgcttcagtcagccgcagcgcgcccgtccgtaccgtattccgggtggtaatgcggggatgattatcctcggcggtatggggctgctcggctcattaaccgcgtttctgttcagctttatcccgccggctcagattgcggtcggcagcccggaagtgtatgtgggggcgctgatcggactgaccgttctgttcgttcttcttccgtttgttgtttatcagatccgtaaacccggctggcgtgatccggacagtgatttcgcaccgtttacatgggaaaacaaaggaaaagcatcatgacagatttaacagcaatcaaacaggctgtgaccaatgcctggcagcagtttcatcaggctcccggcggtgcgaatgcggattatattccgttcctggctaatatcccgtccgacctggcggcagtcgcggtagtcactgctcagggcgatattatcagcagcggtgatgctgattaccggtttgccatcgagtcaatttccaaagtctgcacgctggcactggcgctggaggatatcggcccgcaggcggttcaggatcagattggtgcggatccgaccgggctgccgtttaactccgtgatggcgctggagttgcataacgacaagccgttgtcgccgctggtgaatgccggtgcgatcgcaaccgtcagtgcggttaccgcaaaatccgctgatgaacgctggcagcgcatcctgaccatgcagcgccgtctcgggtcggagaatatcgcactgtcggatgaactgaatcagtcagagcagaccaccaatttccataaccggggcatatcctggctgctttatgcggctcagaatctctattgtgacccgatggaggcctgtgatgtgtatacccgccagtgctccacattgctgaccaccaaagagctggccacaatgggcgcgacactggccggacacggcaaaaacccggtaaccggtgagcaggtactgaacccggcacataccccgtttatcctggcagaaatgaccatggaagggctgtacggccgttccggtgactgggcatacacggtcgggttaccgggcaaaagcggggtcggcggggggatcctcgcggtggtaccgggtgtgatgggtatcgccgcgttttcaccgccgctggatgatgacggaaacagtgtcagaggccagaaaatggtggcttcggttgccgccgcactgggatataacctttaccggtgatcccgctgataacgataacgcccgggcttccgggcgttatcagatataaataaacaccagcggcaacacatgttttatttcaggagcgggttatgaagccagtgtcatcagaaaagccgttaacgttgttacaggttattgcgctggggatcggcgcgatggtcggtgccgggatttttgccctgctggggcagaccgcgctgattatgcagtctgcaacatggattgcctttgcctgcggcggtctggttgcgttatttgccggttatgcctatgcccggttatccgcctgctatccctcgccgggcggtattattgattttttccggctgtcattgcctgccgtgctgacgatcgccttatcctttttgtatcttgtcacgctgatcctgacggttgcgatggtggcaagggcgttcggggcttacgccgttcagctttttcatcagggaaatgaatcggccttattaccggaagtgtataccgcgtttattattatcgcggtcggtctgatgaatatcaccggcagccacgctgtcggtaaagtggaagtccttctggtgggcaccaaactggtgattattattgccctggtggcgacgggcgtatttaccgtggatacaacactgctgaatatcagcacgttttccggagatacccttttttccgccgtcgggctgacgtttttcgcctatgccgggttcggtatgatggcaaatgcctcagacaaagtggcagaccccggccgggtgatgccgagggcatttatgatcgccattttattcacgattgtgctgtatatcagcctcgcgctggtattactcggcaatctctcgccgtctgaactggtccgttatgcggataccgccgtggctcaggtggcttatcccgtatggggaaaaactggttttgtgattgtggccgccgccgcgctgctggcgacaacatccgccattaatgccaccctgttttccgccttcaatatcaccgacagaatgtgcagcactggtattctgccggattcctggggcaaaacggtattccggcagggaacaacagtgaatattctgctcattctgctgacactgctgctggcgctgttcctgaatctcagtgatctggccaatgtcgccagttttacgtttcttctgtgctatctgatggtactggttgtggcgtggcgtcagagcgcggttatccgggcatcaaaactcattaccgggaccgggattgtccttgtcaccgctgtattggccggttttgtggtgacgttgctgagcggaggggttatttctgtcagtgtgattgcaggggcccttattctctgtctggttgccggttatctgcggaaacggagccggaaagatgaatgaatggctcgataatattcttcttaattatgtgacttttgtgtcactgttcagtcccccggcaactatcaccgccgccacaattatccttggccggattgaccggaacatactgtggcaaattgcctggaaaattgcggcgggatacacgctggtcatgctggtggttatctggctggggaactggctgctgacggctctcgggctgagtgcggatgccctgaccgtcaccggcggtattgcgttactggcacagggatggccgatgcttatccgtggtgtcaaagaggagcacagtgatattccggtcagtgtgacgccgccgaaagatatcatgcggctggcaatggtaccgctgctttttccgctgtcgatgggcggcggcacgatagcggtcggaatttcgctggccggacacagtgattccctgtccggactgatacagctttctgttgtgatcctgctgatgctgcccaccattgcgctgacctttctcgcaaccgggccgctgcacggacgtttatcccccggggtgatggacaccctggcgcggatctccggcattattctggtcacgctggcgattcagttactggtctcgggaatggtcggtcttatcaccacgaatctgaagcatcttacggggtgataaaaaaaataaagcccggaaaaccgggctttatggggtctcagagagaggaaaaaattatacgtcgatgtttgccgctttcagggcattctcttcgataaaggcacggcgcggttcaacatcatcacccatcagtgtggtgaataactgatccgttgcaatcgcatcttttaccgtgacctgcaacatacggcgggtttccgggttcatggtggtttcccacagctgttccgggttcatttcacccagccctttatagcgctgtacagccagaccacggcgtgattctttcatcagccagtccagtgcctgctcaaagttgctgacgttctgacggcgctcaccacggacaacataagcaccttcttcaatcagaccacggataagctcacccagtttggagatacgggcatattcgctgccgtgaacaaaatcgaaatccagattgtagtcagtatccacaccgtgggtacggatagtcagtaccggctcaaacagctggcgctctttgttttccgcaatgcggtagctgtaggtgctgccgtgctcttcgtgacgggtcaggcgctctgtcaggctctgtgcccaggcttccacctcggttttgttcagcagcgcggattcttccagtttcggctggtagaccaggctgtttaacagtgccagcggatagagacgctctaaacggcggataattttgtgtgcgccgttgtattcgtgcagcagtttttccagatgttcgccctgaatcggtgctgcattttcgtttacatacagtgccgcgccatccagtgcgatagagacctgatactgctccatcgcttcgtcatctttaatatactgttcctgcttgccttttttcactttatacagcggcggctgtgcgatatacacataaccgcgctcaatgatttccggcatctgacggtagaagaaggtcagtaacagggtacggatgtgtgaaccatcgacgtcggcatcggtcatgatgatgatgctgtgatagcgcagtttatccgggttgtattcatcgcggccgataccgcagccgagtgcggtgatcagggtggcaacttcctgagaagccagcattttatcaaaacgcgccttctcaacgttcaggattttgcctttcagcggtaagattgcctggttcttacggttacgcccctgttttgcagagccgcccgcagagtccccttccactaagtacagttcggagaatgcagggtcgcgttcctggcagtccgccagtttacccggcagaccggctaaatccagcgcgcctttacggcgggtcatttcacgggcgcggcgtgctgcttcacgggcgcgtgcggcatcaataattttgccgacaatgattttggtgtcgttcgggttctcatccagatattcagacagcttttcgttcatcagggtttcaaccgccgttttcacttcggaagagaccagcttgtctttagtctgggaggagaatttcggatccggcactttgacggaaatgaccgccaccagcccttcacgggcatcatccccggtggtgctgactttggattttttattcagcccttctttctcaatatagctgttgagagtacgggtcatggcggcgcggaaaccggcgaggtgagcaccaccgtcgcgctgcggaatattgttggtgaagcagtatacgttttcctggaaggagtcattccactgcatggagacttccacgccgatatcatctttctcggtggagaaatagaaaacgttgttatgaatcgaggttttggcgcggcttaaatattccacgaatgctttgataccgccttcgtagtggaaatgatcttctttgccgtcgcgtttatcgatcagacggatcgatacaccggagttcaggaaggagagttcgcgcaggcgttttgccagaatgtcgtactggaattcagtctcgcctttgaaggtatccatgctcggccagaaacgcacgcgcgtcccggttttgtcggtttcgccgacaacagtcaggcgatcctgcggttcaccgtggcggtagatctgctcgtgaactttgccgtcacggcggataaccagttccagtttttcagacagggcgttaacaacagagaccccgacgccgtgcaggccgcctgagactttataggagttatcatcgaacttcccgccggcgtgcagaacagtcatgataacttctgcggcggagacgccttcttcttcatggatcccggtcgggataccgcggccgtcatcctgtacggagactgaattatcattgtgaatggtcacaatgatgtctttacagtaaccggcgagggcttcgtcgatagcgttgtcaacaacctcgaagaccatgtggtgtaaaccggttccgtcatcggtatcaccaatgtacattcccgggcgtttacgcaccgcgtccagcccttttaatactttgatacttgaggagtcataggtattcgacatcaacgtttcccgctcatctaatcctgattattgaacctgtattttacctttttccacgacaaagaggcgactgttttcatccgccatatcactgacctgttcaggggtgatggcactgacaaaaacctgtgcctgtgtggctttcagccggtgagccagtaaaagacggcgcccggcatccagttcggaggcaaaatcatcaagcagatacaggcattgctgcccgctctgacgggtgaaatattcaccctgtgctaaccgcagcgcgcacatcagcagttttaactgaccacgtgaaagtaaatcttccaccggcaccccgtccgccctgatccgtaaatccgctttatgcgggccggaggcggtgtaggtcagtgcgcggtcccgttcaaactggcgctgcagaagctctgaataatcggtctctttatcccatccgcgctggaaagagacactcagcgaaaattcaggtaaaaactgctgacaggtctgctcaatatcctgagcaatcgctgtcacataattctcccgccactgactgacctgctcagcaaccggaatcagctgctgatcccagtggcggatctgaccgtaattcgatacctggcggagggcggcattgcgctgtctcaccagacgttttaaatcactccacagcgcaaaaaattgcggttcattgtggaaacagccccagtcaatataagcccggcggaatttcggcccgccgttgagcagggtaaagccttccggggtgataagctgcatcggcagtaattttgccagctcggcaattttatggccgtcggtaccgtcaatgcggaccttgctgtcaccctggcggtttttactcaggccgacgctggtggcccggtctgtctgttcctgcccgagtttgccgtgcaggataaattcttcgttatcatggcggataacacgccccgcctgtactgagcggaatgcccggccgtggccgagtgtgtaaatggcttccagaacactggttttaccgctgccgttcgggccgaccagaaagttaaacccggtggccagcggtaaatccgcattttcgatattgcgaaaatcacgaataagtaaacgcgagaggatcatcgtgttacaggcgcatcggcatcacaacgtaagcggctgcatcactggcgtcatcttcaatctgcacgctggaggtggcatcggtcagtttcaccgagacatcttcgcatttcagtgtgttaagaacatcaaggacatagctgacgttgaacccgatttccatgtccgttccgtcataggtgacatccacgatttcttcggcttcttcctgctccgggttattggcggtaattctgagctgattgttgctcaggtaaatccgcacgccgcggaatttctcgttcgataaaatcgctgcacgggaaaaagcctgcttcagcatatcacaatttgccgtcagcgttttgtccgggttcttcggcaggacacggcggtagtccgggaagcggccatccaccagtttggaggtgaaaataaacccgccgacatgggcgcggatgttgttgctgccgatttcgagtttcagcagggcatcgccgccgtcgagcaggcgcatcagttcgataacccctttacgcggcacgatcaccgaatggtccggcagttcctgtccgatatccagcgagcagaccgccaggcggtgcccgtctgtggcgacagtacgcagcacggagccgctggtttcaaacagcatgccgtttaagtagtagcggacatcctgatgtgccatggagaactgggtggattcaatcaggcgtttcaatgttgcctgcggcagagaaaaagtgacatcactctgccagtcatccagattcgggaaatccgaggccggtaaagtggacagcgagaagcggctgcgcccggagcggaccagaagacggtcaccgtcaagctcaacactgatttgtgcgccgtccggcaggccccgccagatatccaggaacttccgggccggtaccgtggtttcgccgttttcatgcggctgatccagcggaacggcggccatcatttccatctcaaggtctgtccctgtgagatgcagtacgccatcagagactttcagcagtaagttacccagaatcggtagggtcgggcgaccgcccaacggactgctgacctgttgtaagggttttaacaattgctcacgttcaatgataaatttcatagcgctatgatgataatgtccggattaagttagaaaaatcttctttgatgtcgtggctttcctcacgcagctgctcgatcttacggcaggcgtgcagaacggtcgtgtggtcacggccgccaaaagcatccccgatttctggcaaactgtggtttgtcagctcttttgccagtgccatcgccatctggcgcggccgggcgacagagcgcgaacggcgtttggagagcagatcagccactttaattttataatactcagcaacagttttctgaatattatcgatggtgaccagtttctcctgcagtgctaacagatcccgcagtgcttcacgcacaaaatcgatggtaatcgcccgcccggtaaagttggcgttggcaatcacccggttcagtgcaccttccagttcacggacattggagcgcagacgtttcgcaataaagaaagccacttcatccggcaggcggatgttgttttcatcggcttttttcatcaggatggcgacccgcgtttccagttccggcggttcaatggcaacggttaatccccagccgaaccgcgatttcaggcgatcttccaccccgttaatttctttcgggtagcggtcggaggtcaggattatctgctgattaccttcgagtaaggcattgaaggtatgaaaaaattcttcctgagaacgctctttgttagcaaagaactgaatatcatctatcagtaaggcatcgacagaacggtaatagcgtttgaactcttcaatcgcgttgttctgtaaggctttgaccatatcctgcacaaaacgttctgagtgcatatagaccactttggcgttggctttgctttccataatgctgttgccgacggcatgtaataagtgggtcttacccagaccggttccgccgtataagaacagcgggttgtatgcgccacccgggttatccgccacctgacgggcggctgcgcgcgccagctggttcgatttaccttccacaaagctgtcaaaggtgtgtttcgggttaacgttggaacggtaagccacatccggctccgcgctgttatcatgccagctcgggcgcagtgcgggggctttttcccgcgaaggcggctgtttcatcgtccgtgacgggggaatacttctttccggtgtgctgaccgcgccggccggcttattaccgacctcaaagcgcagttgcggaatttcattgccgcagaaatcggacaggagcgcattaatgttattaatgtacttctcccgtacccagtcgagcacaaaccggtttggggcatagagagccagagtgtcatcactcagctcagcctgaagggggcgtatccacatactgaattctgtggcaggtaattcatcctgcaaacgggcaagacattgctgccaaagcgaaagagacacggtgaactcccctaaacaagaccagtcaaagaaacagaataagatttttcacgcagacacagcacatacagacgaattgtcctctgcatgtttcaacggacacttcagtgtacaaaagtggggctgtgttatggacgatcattccctgcaccggcgatcaccgcacgggtgaaaatgatcgtgacgacggatcatatcgcaaaagcgggacaagatcctcatccttttacacagttttccgggtttttatccacaggggctgtcagcccgtccggagcgggattcaggccggagtataacgaatccgggcaggagaatacagcgggaaaatcccgtttggggataagttttggtgaattatcctcaggctgaaaaacggcactcaggatccggcgcgtgatcgaatattcacggatcgcggatcgatccttgcgctttgccggggagtccgtataatcttgcaccctgtgcgcgttatctgtgtcttgatacggtgatgtgtgcaggcaggttatgggtaaatgcaattatgtgcagaaatctgtgttatcgcgccatctttgattgacggacaggcccggattttattacaatctcgcatctttccatattgatgttgcgataaggcacagaggtcagccactttccgtgatggccctttcagcagaaagatgagaatccgccgctgaatttactgtttgccgatgcgtttactgaatcagtaataatttaaagtttaggtagaaaccgctatgaaacgcacttttcaaccgtccgtactgaagcgtaaccgttcccatggtttccgcgctcgtatggccactaaaaatggtcgtcaggttctggctcgccgtcgtgctaaaggccgcgctcgtctgaccgtttctaagtaataaagctaaccatacgtggttaagctcgcttttccgagggagttacgtttgttaactcccgagcatttcaactttgtcttccggcaaccacaacgggcaagtactcctgaaataacacttctgggacgccgtaatgagctggaacatccccgcattggtcttaccgtcgctaaaaaaaacgttaaacgggctcatgagcgcaatcgcatcaaacggttagcgcgtgaatactttcgtctgcaccaacatgagttgcccgatatggatttcgtgcttctggtaagaaaaggggtatcggagttgagtaatcgcgagattacggaagcattgggtaagttatggcgtcgtcacagtcgcttggcgcacgcttcctgatcctgttaatcagaggttaccagctggtgataagtccgctgctgggaccacgttgccgcttcacaccaacatgctcgcaatacggaattgaggcattgcgcaggtttggtatgataaaaggcggttggttaacggtgaaacgcgtattaaaatgccaccctttacacgaaggtggtgatgatcctgtcccacctaaaaatgatgataacagagaacattaacgatggattcgcaacgtaatcttctattcatcgctttgctactcgtatccttctttgcatggcagacgtgggaaagtgataagacacaagcacttaacgcggctactcaggcaacgcagcagacgacaacgccaagtggtgaaagcagcgggcagaacaaatatattacggtcaaaacagatgtgctgtcactgaacatcaatctgcgcggcggtgatattgatgaagctgaccttttggcttacccggcaaccttaaaatccgcagatccgttccgcttactggaaacaactcctgaatttgcctatcaggcaatcagtggtttaaccggtgtgaatggtccggataacccgaataattacaaagatcgcccgctgtataccactgaaagcgatacatttgtgctggcggaaggccaggatgaactgcgtgttcctctgactttcgttctggatggtgtcacgtatgtgaaaacctataccctgaagcgcaaagattatgccatcagtgttgattacaccatcaaaaacgacacctcagctccgctggaaatggcgtttttcggtcagttaaaacaatctgtgaatttaccggaacgtcttaacaacggcagcagcaactttgcgctgcatacctaccgtggtgcggcgtactcgtctgaagacactaactacaaaaaatacagcttcagtgatatcgaagataaaccacttaacatcaacagcaatgttggctgggtggcgatgttacagcagtattttgcgacagcgtgggttcctgagaaaggcaccaccaacaacttctatacgctgtacagtgccaaaaccggcgatgcattcatcggttataagagtgatgcaatccgtatcggggcaaacagcgaagcgaaatataacgcaactctgtgggtcggaccggaactgcagaacgaaatggaagctgtggcaccgcatctggacttaaccgttgattacggctggttatggttcatttttcagccgctgttcaagttactgaagtttatccacagcttcatcggtaactggggcttctccatcatcgttatcacctttatcgtccgcggtatcatgtatccgctgacccgtgcgcaatacacctcaatggcgaaaatgcgtatgcttcagccgaagctgaaagcaatgcgtgagcgcatcggtgatgacaaacagcgcatgagtcaggaaatgatggcgctgtataaagaagagaaagtgaacccgctgggtggctgcttaccgctgattatccagatgcctatcttcctggcactgtattacatgctgatgggctcggtggaactgcgtcacgcgccgtttatcggctggatccatgacttatccgcacaggacccgtactacatcctgccgattctgatgggtgcaacgatgttcgtgatccagaaactgtctccgacagcggtcaccgacccgttacagcagaagattttcacctttatgccggtgatcttcacagtcttcttcctgtggttcccgtcaggtctggtgctgtactatatcgtcagtaacctggtgactatcctccagcagcagattatctatcgcggcctggaaaaacgcggtcttcacagccgcgacaaaaaataagcccgtgaccggcggggaatctctgccggtcttatagtattatttaaaggcggtcatattgaccgcctttattgtttatcacacggtgagaaagagagacatggtcatgaataacgctgaaattcagagcaccgataccattgtggcacaggcaaccccgccgggacgcggcggagtcggtattttgcgtgtgtccggcccgcaggcggcacaggtggctcagattgtactggggaaactcccgaaagcgcgttatgccgattatctgcctttccgtgatgaaaccggcaaagtactggatcaggggattgcaattttcttccccggcccgaactcttttaccggtgaggatgtgctggaactccagggacatggcgggccggttatcctcgatttattgttaaaacgtattcttcttatcgataatatccgtatcgccaatcccggtgagttctctgagcgtgcattcctcaatgacaaactggatctggcgcaggcggaagctattgctgacctgattgatgccagttcggaacaggcggcccgttctgcgatgaattcattacagggcgctttctccggggaagtgcatcagatggtggaagcgctcactaacctgcggatttatgtcgaagcagcaatcgacttcccggatgaggaaattgattttctctcggatggtgtgattgaagccaaactagataccgtgattgcagacctggaacgggttcgttctcaggcgcgtcagggaagcctgctgcgtgaagggatgaaagtggtgattgccggtcgtccgaatgccggaaaatccagcctgctgaatgcgctggccggacgcgaggctgcgattgtcactgatattgccgggactacccgtgatgtgctgcgtgaacatattcatatcgacggtatgccgctgcatatcattgataccgccgggctgcgcgaagccggggatgaagtcgagcggatcggtattgaacgcgcctggcaggaaattgcacaggcagatcgcgtcctgtttatggtggatggcaccacggtggatgaacagaccccggaacaaatctggccggaatttatgtcccgcttaccggccggtattccggtcacgatcatccgcaataaaaccgatatcaccggggaaaccaccggtatcacagagcggaacggcgatacactgattaaactatcagcccgcgaaggccacggtattgatttgctgcgcgatcacctgaaaaccaccatgggatttgaaggcaacaccgaaggcggatttctcgcccgccgccgtcatttacaggcactgaacactgcggcagagcatctgatctccggtcacgagcagttagtagttgcccgctccggcgaattactggcagaagaactgcgcctcgcccagcaggctctgagcgaaatcaccggtgaattcacctccgacgacctgctggggcgaattttctcgagtttttgtatcgggaagtgagggcttctggtttttgtccggactaatggattattttagatggatcttttctctcgtttatataaataccaatccacagataaacgcagccagctggaaaatttttgtacggaaggtttctgtgacattcttaaccggatgacaaaagaacagcagcaaaattttttaataaaaatgggtgtttgcgctgattcagatacaaaaattaaatggcaaacgcaatatacgatcacggattcagaagggaaatcccgttatccggatttagtgggattgattgataattttgtcaggtatttgattgaagtaaaaattaatgcatgttttacacaaggcgtggatattaacggaaagtcattatcccagcttcaaatttatgatcgctggttatctgcacattcaccggatgcctctgccggcacgttaattttactgactgataaaacgatgccggagcaaagttttaacgatattttatcttctgacttcggtataaaaaacagaaaattatggtattggcagtctgtttttgatcaacttacaatggtttcagatattcctcatgctgaagactataaacaatttttatcaaagcagggattagcaatggatttacctacacggcaggattttgctgttatggagcttctgtacagcggagccggaaaacggctggacggtttaacaaagagcgtatttgaaagaataaaacaaaagtattcagcggaaactctgtttaactggggctctgaagataaatacagacatggtggcagcagtgcaaactggcagggagccatacgctggagttgggtcatattacagcgggaaccttatcagtatttctattgggggattcagttccctgaatataatgaatgggataacggagaatgccatccccggagtaaacagagttcatctccttgcctggtttttggccatatgtcgaaagatatagaatactgcaaacaggctatcgatctgttttcccgtgagcctggaggcgattattgtcccggaaagcttcctcctgataataatacagaagctattgtttttaatcagacgttacccctgagctacttactggacaataattataatctggacatgattgttgattggctttgcgacaaaattgataatgcactgaatatcattaaaaaattgaaataatattcagcgcaatgtgtcattccggttgtgggttgtgaccgctatttaccgcacttaatatcgctgccttacgccgcgacggcagtgtaatacagaccagacaggtgaaaatcagtgcgactccggcccagccggcggtggtgagttgttcaccgacaataatagcggcgagtgcggcggcgacaaccggttccagcagtgtaattgtggtggcggtgctggcgggaatacgtgccagtgcataaccgaaacagacatagcccagaaacatcggtacacaagccatgtaaatgccgactgcggcgttttgccacgaatccaggaatggcgcgccgtaaagtgctaataccggcatcagcagtaatcccccgatcccgaaaataccgcccatagctgcccgtgacggaatgttgcgctgcatcaggcggcgtgcggcccaggaataaagcgcataagtaaaggcggcgagtaatcccagtatgacaccggtcagtgtggaggatgcatccgctgcggtaatctgttctgtgccgccggaaagggaaagaagcgcaatacctgtcaggccgagcactgcaccgctcagccagcgcagtgtcatgcgggctccgtccatgataatttcaataattgccgataaaaccggggccgtaccgatagataccacggtgccgatagtcaccccggccagtcgcattgagccgtaaaaggcgagcggatatacggcaacagcaacggcacccaataacagcaagtgccattgctgccggaaagcgccgaggctgcggcggataggtgtgatggcaatcgcggcctggagtaacccgccgaaacccatggcggcagcaccgatagcaacaggactgacatccggcgcgaaggtggcagaaaccccggtggttccccataagaaggaggccaggataatgacggcaattccggcaaaatggcctttgggtgtctggatcacagcgcctccagcatggtttttgccatggcggcagcctgtaatacccgtgccccgtgctcttccagcccggcgagtacaatcgcaccttccagtaagaacgccaggtgtgcggtcagctgctctgctttcgcggtgtcttccggcagcagctgataaagattcttgcggataatatcagccacttcagatttgtgagcacacacttcgcgacgttcctcactgccggccggaaactcagcggctgcgttcagcaggccgcatccccggaatccccgttcataggcaaactcagcatggtcgtgataagcatcaaataccgccaggatccgctgtaccggggttgttgcctgtcgcagacggacatcatataacgccagccattcttcatgcctcagccggatgtaagtggtcaccaactcagctttcgagctgaaattgttatacagactttttttggcaacaccggcctttttggtgatcgtatcaataccggttgccgcaatgccctcgttgtaaaacaagatgcctgcggcttccagtaaacggtctttggcactgagccgggtctgtgttgagtcggtgtccttcatccggaaaatctcttgtgactaataagtaggtagaccagtatacctattaactctgtgtgcacaagaaataatcactgtcgtgaatacactcagccgttaaaaccccttgttcagctgaaaacgtaatgagaatgtcaccctccgttttgcacccggtggcggcgtaccgacagcagcaaccctgatgacagcatccattgcggcgttatccagtaattcataaccggaagagcgggtaacgaccggtgcaaacggtttgccgttatcgtcgagtgaaaatgagatggtgctgatcccccgttgcccggcgctgcgggcccggcgggggtaatgtttttgctcctcaattctctgccgcagcaggttaaagtaatcctcctgtgctttccggttatcggctcctgcggtggcagagtttgtcggggatactgcctgtccgccggactgctgctgtgtggttttatcctctccggtatccgcggtggtttttgtggtgatcggttctgatttctccgtttttttgttcacagcgtttactgccggttttgctgataacggtttggttgttttctccggtgttttccggcgggcggttgccagttctgcctgagacggtgattcttgtggtggtggtaattgttcctcctccggctctgtctcctgatatgccggtgctgcactcatctgaatggcaacggagaccgccggggtttgtccccggttatcaatctgatgctgttgcggggcggtcaccggggggctgcctgtgatgagcagcccggcgacggagaaacacacaccgatcgcagcagcagaaaccatctgctgccacgttccggttctttcccgggaaaacaggaaaggcggatgcggtaatgctattgcgccgtacataaatcagaacctcgcggaaacattgaattttacggcccggcccggtgcaggcatcatcgaacgggtgagcgggtcgaggtaatattcattggtcaggttggtggccgtcagttcgagggcaacatccggtgtaattttatatttggcgtaagcatccacagtcagtaccgaattccagcgcatcgggtagttattaaaattgctgtattggtcagggacaatcgtcatcaggcgtttctcctggctgttttccaccgcactgtggtagagccagcgactgccgatttctaatgactcctgcaataaacgcccgccgaggttaaaggtcacagaatagtgcggctggatttgggtgcgcaggaacccgcccggataaccaccgtcaatgcatgacgggatatctttcagcccggtcgaatccataaaggcatgggatgtttcatcacagactttattggtgaggttataggtcacacccagatcactgaagatccagccatgatcataacgggcctggatttcaatccctttcaggatctgcttatccatctgtgtaaaacggaaataattatcacgatcaaagacattgtggatatccgtatggaagtagttcagccggatatctgcatggcggtcagcatgaagcagtgatttcccgttaaaaacaacaccgtattcatgagttaccgcacgttccggtttgtaacggtaaccgatatgcgggtacgacatcccggaaaagccgacagtatcttcaaacaggctcggcatgcgcacagtttccgcatagcggccatacagacgaagatcatcggtcagatgcaccgaggcagacagcatcggtgtccaggcactggcctggcggcggggtttttctttccaggtgtgagtgacagcctgaagttctctgtcgcccgctgaaatagggaggctgccatactcatagagatacgtttcctgcccggtatagggatcaataccccgcaatgcggtatcgatatccggccggtctttctgtttcaggcgtccgtcgctggtatccaccggccagaattttttttggtgtaccatcatgcgccctgctttattatccgggttatctctgtaaattaccggctgaaaaattttacccgatattgtttctttttcttcctgagtccattcattccatttgccacttagttgttttttataagcctgtgattctgtttcagtcatattccggaaataattcaggtaataaccggtaacctcatagtcttgtttacagtaggggtctttacgggcggcgcactcgttggagagatcatcgacactccagtatacggtttgtctgccgccggcactgagtgacagccaggagaccggctgccagtccagactgacggattgctgatattcaaagcggcggcctttacgggcagggactgcaaacataaagagtttgtagttttccagactggtattactgtccagatgctcaaactgcatattggcggccagagtcaccgacagttccggggtaaaagcaaacttattgctgaaatccagcccgtagcgctgattctgtacattcagggcagcggtgttaatcagtgttccatcgattgccgggttgatggtgctgatatccccctgtttatagccgtagtccatattcttcgggtaacgcggccagccgccgccggagttggtattgctggtggtcagggtggtccacaggcggatatctgcatcaatataggcaagatgtgccggttgggatttcaggtgaagataaccggcctgtgcatgcaggtcagccagcggccactgcggaataatattatcctcagcgcggatccagcccagccgggaaggcataatatcaccgaaatccgagcgggtatcgcgccagctgagttgcagcgcgtggtcatcattcagataccaggtattttttatcagccaggattccgtttttgctgatgtattgggaacttcattacccttgcggtaaatacgggacacaaacggcatatacgggtcataggttttgttggatgtatgcaaaatgccgatatcgtctttggatattttgccattgtaattttcactgtggcgtttaccggcaaaataatttccccggtcacggtaggcataagccagtaacagatccatattttcctgacgggtacctaccgccagtcgccaggcataatcactgttattcagtgcgggggcattatcgcggttttccggggttaagtgggtgccggggtcgtcaatgataaaccaattgaactgcatattatccacaagacggtaatcttccccgagtcccagattgggtatccgggctttggtggtgttactgctgttttccagtatcagtgcggcaccaaactgctcaccgtttttcaccacgtcattgatggtgagtgttttcatggcaacaccgccgcctaccgaggttttcaggagcgggttaagggatgggcctttttcaatttcaatttcactgatcagcatcgggtcaaggtagttacggttattggcaccgttataaccccggtacaccgtcacggcctgttcggtgccgtcgatggtgaccggtacacggcccggcccctgtattccgcggatattgacatccagcgcgttaccattgcgggcatcaccgctgaataccccgttggcgccttttagaatatcggcggcagaggcccctttatagcgctctatttcttctttggtgaggatcagggtagagacatttttggtatagattttatctttggcgctgtcagcagcggcctgttcattatggagcgtaatgtcgcccaggtgctgatttttttcttctgctgccagccccggcagcggaataaataacacgggcagaagcaatgtgattgttttaggtgggtgaccagataatggtgaatacgaagacataacgattcccggatgataaaaaataaataatcagaaagggttaaaacagccgttcaaaacgcagcatgatttcagtctgccggtaggcataaagccacgggacagaactgcggttacgggtgtggatcagcgaaagctgaggtgaaatctgcgcgaatgacggcgggtagagcgcgagtgttgtgctgtactgtcgggtgtgatcctccctggcctgacggtgtaacggatgtgtatggtgataacgtttacgggtgtaaacggcatgaacagactgggacacagacgggtgccacaggtaggtcaggccggtatgcagggcagctgtccggtaatgtttatagggatcattttttttgtgaacggtggtttctgcctgtaaatacagcgtggctgccggatgcggacgccaggttatctgcggcatcaactggtattcagtgccgttatgtgaatgcagataaggctgataacggtgctgtcgcagtgcagccagtccgcccagtgaccactccgggctgagttgctgattcagatacgtttgtaagccgtaagctgaggaaaaacggcgcccggcggaaaaatgctgctccagcagcggagtcagttgccataaagtatggcgatcctgatagtgataacccgttttagccgtcagtgttacggtattggctgcctgattcgcggcatcataccgggtggatacccggtagtgctgcgtcagaaaatgcgagccggacagcggcgtcagcctgcgcagatcccagtcgctgcgccattgcaataccgcctgagatctctgcgggataaggctggcataacaggaaccatcggggctgtagtgcaggcagtgtgtttttggcagcggggtctgataataattatccgtgtaatggctgccggcgctgagtagtaatgaccagctgagtgcccgggtgagttcggtaatggcgcgggtaatttccggatagtggggagaggtcaccggcaggcgctggctcagttcccggaacaaaagcaaggcgttcccgagctgacgatcagcccggtaactgcgggccagttccagttgtgcggcaaagaaatggggtttctgttgcagaatggtattatataacccgatagcaaccccggggcgctggtttaaataggccagttttgcctggctgaagataatcagtaacgggtcagcctgatgttcctgctgataaacagataagtaatgataaattgcttttaggttatttttctttagtgaaagatataaattctgagcagtattattattttctgaatgattggtttttggtatggttgcagatacaggtaatgaaaaaataagtaataatagaaaaagaataaatccgtaaattaactttatctgcgttgacatatttatatccgctaaacaccaggaacagataatctgttcctgatgaaatgtttcaataataaattaagacttggttccgccgaacgcgatattcttcgctttatcactgctgaactcagcataaccggcaacctgctgtgcattatcaccaaagaaatgtcctttggttatcccgctgacggctgtggtatcagtaccggtggtgctgacagtagcggacccgttaaaggctgaaccactgacagcgccactcaggctgtaactgagatcggttgagctgagagagccggtaaaggtattggcatcaaaatccgtgctgaatgtgccgctgatctgttcaccgctgctgtacccgctgagccctttaatgctgtactgtgccgtcccttcggatggcatggcggcggtgatatctttcccggcgtaatacacggtatgggaatcatcgctgaaatcagtaccggaaacccattcaccgtaataaatatcggcatcggctattttggcaaaattaaaagagcccatattggtatgagtattctcagaggaaacgaccacagaaacgccattatcgtttggtgctgcacggtttggcccctgcagtccggcaaagctgactttggttccgttgtataatgctgaataaccgattcccggttctccgcccggtgacgggtggccccggccgctggatgcttctgttacgccaacgatgatatgagcgccatctggtgcagcggaactgccatagcccgcatcagcctgagcctgtaccgcggagaatgcggcacacagggtaaccagtgtcgccagcggggttttcatattgaatgtcttcataaactaaactccttgtaatttaatgaatgaccgggtgagtgaaatgtttttccggtgtgattaccggaagacaaataaacgataaaggagaatgaattttctgtaaatgagaattattatcatttatttgcaatgagaataatttgattagaatgctaattaaataacgaattaaaaaatcaccattttttattttttgtgacggatttatttcaaatataagaatgaaaatatgtgatgcacattcagagtttttttgtgcggcaaaccgggttattaattcataagtatcattaaaagtgatggattgttttttcttttattaataaggtgattttaaacgcaataataatgcgttcaattaacggctgttatcgcatttgatttggtatttgtgtttcatactatccggtgttttgagctgaacggataatctgataatgaaacaaacgctgatgtttttgctgttaacggtgctgacctgcggatccgcatcggctacatggccgcaaaccgggagaagtgatttttctgagcgttatgaggtgattaccctgacaccggatatgccggtgcccggtgcggttaataatgacccggcaacaaaaggtctgcggctgatcggtctgcggcgtgacggtaacgggcagtacaccgaggttacccgccagttttcccccggagcgacaaaacatatccgctataaaggacggcagtaccgggtggccggggatgtttaccgcgcggataatctgtcagataccggacgctgggataaagggcagtccgtggtgacggaagagtattacgagattctggataaagacggaaaacggacaggaaagggattttatttttcgtcgcgtgatcactgatgcaagtataaataaggtatcagcaataaaggttgtattaagttttctgcccggaaaaccggtaacataccggaatcaccctgattagcggagaagtacatgtcatcagtccggatcctcagtgttgcacagtgtcatgaatcgctgctggacagcgcggaagcactgattgcggaacaatggccgttgtttatgttatccagtccggtttctgaccagtactgggatacactttatcgtgaggataatttgccttttcagcaggttgcggttgcaaccattgccggagaggagcagatcgtcgggcttctgagtgcgattccgttttattttccggaagatgcaccgctgactgatctgccggatgagggctgggatgcggtgctgacgcagggggcaaccgatacccggaaaccgacatttgtatccgcactgtcagtgaccgttgacccggattttcgcggacgcggtatccctgcacagcttatcaccgcgctgaaagcggccgttgcacaagccgggctgaagggcgtggtggtaccggtacgtcctacgcttaaggcccagtatccgttacaggatttcgcggaatattgtcagtggcagaccccgcagggtgagccgtttgatccgtggatccgtacacatgtccggctgggcgggcagattatcaaaccggctatgcgctcgatggatattacatcctccgctgataactggtctgaatggaccggcatggcctttccgcacgccggtcagtacattgtgccgggtgctctggtgccggttcaggccgatcctgaaacggaccgggtcatttaccatgagccgaacctgtggatatatcatccgctggctgaatagtcaggggatcagccgttcagggtgggtatagatggtggcccgcccttttttacagaacccggccagtgtcaggcggcagcgtttggcggtttcaattgccagcgtggtcggggcggaaaccgcaaacagaatttccgcgccgcactgcgcgcttttctgcaccatctcatagctggcgcggctggagaccagcaccgcgccatcagtccactgtgcttttgcccgcacacccagcagtttatccagcgccacatgacggcccacatcttcacaaccacccagtaattcaccctgcggggaaatccagcctgcggcatgggtgcagccggtcagctttccgatttcctgcacctgcggcagcaggctgagtgcctcatcgaggtggctgagagaaaaggtctgtgtgaaatccagcggtgtgatcgggcggaaaatctcgctgatctgctcggtgccgcagatgccgcagccggtgcgcccggccatattgcggcggcgctctttcagtccggcaaaacggcgtgcggataattcaacgtggacttcaaatccgccgtggcaggcatccgtaatatcaatcccgcggatttcatcagcggattcaataatgccttcggaaagggaaaaaccgactgcaaaatcgtccaggttttttggactggccatcatcaccacatgggagataccgttgtacaccagggcaaccggcgtctcttccgcgacccagtcattttcattatgcccgggtttacctttttgttgcacatttgtgagatgcgcaccgcgaattaggcaattatgtaacgattctatggaataaatgtcatccatcagatgaattcctgcgcttaataatacataataatagtatgggtaaaagtttacaccattccaccaggcaatgaacctgatcgcacgcaccactgtgcggataaaaagaaagttcgctgtggcttattttgcagcggcataagagcaatgtaataaggagatctccatgcaagtcagcagaaggcagttctttaagatctgcgctggcggtatggcgggtacaacggcagcggctctgggctttgccccggcggtcgctattgccggttcacgtcagtacaagcttttacgcgcacgtgaaacccgtaatacctgcacgtactgttccgtcggctgcgggctgttaatgtacagtctgggtgacggggcaaaaaacgccaaagaatccatttttcacattgaaggggacccggatcatccggtgaaccgcggcgcactgtgcccgaaaggcgcaggtctgatcgattttatccacagcgaaagtcgtcttaagtatcctgaagtccgtgaaccgggcaccaacgagtggaaacgtatctcgtggaatgaggcgtttgatcgtatcgcccgcctgatcaaagatgaccgcgatactaactttattgaaaagaacagcgatggcgtcaccgtcaaccgctggttaaccaccgggatgttatgcgcgtcagccgccagtaacgaaaccggatttgtcacccagaaattctcccgcgccctcggcatgcttgccgtggataaccaggcgcgtgtctgacannnnnnnnnnnnnnnnnnnnnnnnnntaaaaatgccaaccttgttgttgtgatgggcggaaacgctgcggaagctcaccctgtcgggttccgctgggcgatggaagccaaaattcataacaatgccaaactgatcgttattgacccgcgctttacccgtactgcggctgtggcggatttctacacgcctatccgttccggtactgatattgcgttcctgtcaggtgtgattaagtacctgatggaaaatgaaaaaattaaccgtgaatatgttgaggcgtacaccaacgccagcctgatcgtccgtgaagattacgattttaaaaacgggctgttcaccggttatgatcctgaaacacgccagtacgataaaactacctggaattacgaactggatgaaaacggctttgcgaaacgcgataccacactgcagcatccccgttgtgtgtggaacaagctgaaagagcacgtcagccgttataccccggatgtggtgaccaatatctgcgggacgccgaaagaagatttcctgaaagtctgtgaatatatcggcgaaaccagcgcgaaagataaaaccgcctcattcctgtatgcactgggctggacacagcacactgtcggtgcgcagaacatccgtaccatggccatgatccagctgctgctgggcaacatggggatgctgggtggcggcgtgaacgcactgcgcggtcactccaatatccagggcttaaccgacctgggtctgctgtctcagagcctgccgggctacctgacgctgccgtctgacaaacagacgtcactggaaagttatctggctgccaacacgccgaaaccaacagtgcagggccaggttaactactggggcaactatccgaagttctttgtcagcctgatgaaaaccttctacggtgacaaagcgcagaaagagaataactggggctttgactggctgccgaagtgggataaaggctacgacgtgctgcgttatttcgacatgatggataaaggggaagtgaatggctatatctgccagggctttaacccgttagcctcattcccgaacaaaaacaaagtggttaaggcgctttcaaaactgaagttcctgatcaccgttgacccgctgaataccgaaacatcgaacttctggcagaaccacggcgagatgaacgatgtggatccggctcagattaagaccacggtgttccgtctgccgtcctgctgtttcgcggaagagaacggttctatcgttaactctgcccgctggttacagtggcactggaaaggcgcggatgccccgggcgaagctatcagcgacggcgaaatcctctccgggattttccaccgtgtccgcaagctgtatgaagcggaaggcggtaaagtgcctgagcaggtgctgaacatgacctggaactacttcgatcgcgataatccgaccccggaagaagtcgcgcaggagagtaatggtctggcgctggtcgatctgaaagatgctgacggcaatgtgattgtgaagaaaggcgagcagctcacctccttcgcacagctgcgtgacgacggtaccacagcaagcggatgctggattttcgccggcagctggacaccgcagggtaaccagatggcacgccgtgataacgctgacccgaccgggctgggtaacaccctcggctgggcgtggggatggccgctgaaccgccgcgtcangccgcgtcatttataaccgcgcatctgcggacccggcgggtaaaccgtgggatccgaaacgtcagattctggaatggaacggaagcaagtggatcggtatggatgtgccggactacagcaacgccgcgccggattcggatgtcgggccgtttatcatgcagccggaagggatgggccgcctgtttgctatcgacaagatggcggaagggccgttccctgagcactacgagccgattgaaaccccgctcggcactaacccgctgcatccggatgtggtctccaacccggcagcccgtgtcttcaaagatgactgggcgcagatgggtaaagcagcggaattcccgtatgtcggtacaacttaccgcctgacggagcacttccactactggaccaaacattcacggttaaatgctatcactcagccgcagcagtttatcgaaatcggtgagcgtctcgcgaatgagaaaggtatttcccacggcgatacggtaagagtcagctccaaacgcggttatatcaaggcgaaagcagtggtcaccaaacgcatccgtaccctggatgtgaatggtcagaaagtggataccatcggtattccgattcactggggctttgagggtgtggcggtgaaaggctttattaccaacacactgacaccatttgtcggggatgcgaatacccagacgcctgaatttaaagccttcctggttaatgtggaaaaggtgtaaggagataaattatgtcaatgcaatcacaggacattattcgtcgctctgccaccaattccctgacccccgcacctcaggtgcgggattttaaggaagaagtggcgaagcttatcgacgtgaccacctgtatcggctgtaaagcctgtcaggtggcctgttcggagtggaacgacatccgtgacaaaatcggcaccaacgtgggggtgtatgacaacccgcaggatctgtccgccaagtcatggactgtcatgcgtttctccgaagtggaagagaacggcaaatttgagtggctgatccgcaaagacggttgtatgcactgtgcggacccgggctgtctgaaagcctgtccggctgaaggcgctatcattcagtatgccaacgggattgtcgacttccagtcagagcactgtatcggctgcggttactgtatcgcgggctgtccgtttaatgtgccgcgtatcaacgaagaagataaccgcgcttataaatgcacactgtgtgttgaccgcgtggatgtaggtcaggaaccggcgtgtgtgaaaacctgtccgacaggcgcgattcatttcggctcgaaagaggatatgaaagcgctggccggcgatcgtgtgactgagctgcaaagccgtggttacgccaaagccggtctgtatgacccgcagggtgtcggcggtacgcatgtgatgtatgtgctgcaccacgctgataagccgcagttatatcacggcctgccggagaacccggaaatcagtgctgcggtgaaattctggaaaggtgcgtggaaaccactggcagcagtcggttttgcggcaacctttgcggcggcaatcttccattatgtgggtatcggcccgaaccgggtatcaaaacgcgaggaagaagaggccctgaaagatattcaggatgttccggcaaagactgagcaatcagcaggtcaggaggagcagaaataatgcaacaggatgatcgcgaaaaaattatccgccacaaaccaattgagcgtgtgaatcactgggctgtggtcatttgttttctgttcacggccatcagcgggctcgggtttttcttcccgtcgcttaactggtttatgaacattctgggtaccccgcagttatcacgtctgctgcatccgtttaccggtgtggtgatgttcttactgtttgtgtttatgttttttcgttattttaaacacaactttatcaaccgtgatgatatcgagtgggcgaagcagatcggcaaaatcatgaagaatgaggaagccggtgatgtcggtcagtataacctcggtcagaaaggggtgtactgggcggccagtatctgcctgttcctgctgttgctgagcggtatcgttatctggcgtccttactttgcggaatatttctctattccggtgatccgcatcgcgctgctggtacactccatttccgctatcgggctgattatcactattattgttcacgcgtatgcggcaatctgggtgaaagggtcagtgcgtgcgatgacggaaggctgggtaacgcgcggctgggcgaagaaacatcacccgcgctggtaccgtcagattgtggcaaaagagcgcgaagaggataaaaaaggtcagtgaccgtttttaagcttctcgtgtgaccattcagaaggcagggatttccctgccttttcgacattttaaggcagccggttcataatagggttttacttgccggaccggcttatcctctccatatcagaagaagagcaatatcatgagtatccgaattgtatccaaagaagagctgggacaggctcagaaaaatgaaaaagggattggctttatcccggctgtactgtttcctaatctgaagaatctgtatcagcgccgtgccgaacgttttgatgagctggccaaagataacccgtttgcggattacctggaatttgcggctgaaatcacccgcgcccagcagaaagccctgtatgacaatccgcttgaaatggatatggatgccctgatggccgccaatatgccgggcaaagccctgctcgactgccgcacctttcagcgcactgaacactggcgcaaactgctgaaaagcattattgccgagctgctgccggttgcaccggatcatgcccgtccgactctggaaaatctggacaaagcctctgaaaatgagctggaagacatggcaacggccttgtttaatcaggagttttccgctgtatcaccggataagtccgtgtttatctgggcagcattatccctgtactgggcgcagatggcgtcgatgatcccgggcaaaggccgcgaagagcacggcgaacaccgtcagttctgcccggtctgtgcggcaatgccggtatccggcgtgatccagatcggcaccacgcaggggctgcgttatctgcactgcggattatgtgaaaccgaatggcatgtggtccgtattaagtgcaccaactgcgagcagacccgtgatctgaattactggtcactggaaagtgagcaggcggcggtgaaagcagaaagctgtggtgattgcggcagttacctgaaaattctgtcacaggaaaaagacgcgaaagtggataccgtggctgatgacctggcaaccctgatcctggatgcccggatggaagaagaaggttttgcccgcagcagtatcaacccgttcctgttcccgaacgaataagtcagtgaagtgagtccgctatgaacgaacgtgcattatacagtcagatacctgccattgacgggttattacatgaaacaccggttgccgcgctgacagaacagtacggacagacctgtatcgtcagtgtgctgcgggagatgcaggatgatgcacgtgacgcgatccgtgagcggcagcagctgccggactggcacggttgctgggcggatgaactgtcccgccgtctggacagcgagcgggaagcactgcggccggtcattaacctgaccggtaccgtgctgcacaccaatctcggccgggcattacaggcggaagcggctattgaggcggtgaccaatgccatgcgctggccggtcacactcgaatattcccttgatgatgccgggcgcggtcaccgcgacagcattgtcgcggagcgtctgtgtcagctgaccggcgcggaagcagcctgtatcgtcaataataatgcggcggcggtattgctggtgctggcaacgatggccgccgggcgggaggtgattgtttcccgcggtgagctggtggaaatcggcggagccttccgcgtgccggaagtgatgagccaggcgggctgtcgtctggttgaggtcggtaccacaaaccggacccatctgcatgattataaaaatgccgtcagtgagcagactgcgctgctgatgaaagtccacaccagtaattatcatattgaaggttttacggcagaggtctccgggcaggaactggcggaactcggccgggaatatactatcccgtcggtgattgatctcggcagcggtgctctgattgatatgacacagtggggattgccggaagagccgatgccgcagcgctatctggcgcagggcattgatattgtgaccttctccggtgataaactgctcggcgggccgcaggcggggattatcctcggcaaaaaagcgtggattgaggcgatacagcgccatccgctcaaacgcgccctgcgggcagataaaatgactctggcggcgctggatgccacgctgcgtctgtaccgccgtccggaaaaactggcgcagacactgccgtcactgcgtctgctgacccggtctgctgacgatatttatgatatggcacaacggcttgtgccaaaaattcaggcatattacggtgatgaatgggtgatccgcgcagagccctgctcctcgcagattggcagcggatccctgccggtggaacgcctgcccggctgggcagtgacgtttaccccgcaaaacggaaaaggcagcgccttagccaccctgacgcagtctcaccgtcagctgaccattccggtgatcgggcgggtgagtgacgggcgtctgtggtgggatctgcgttgccttgaagatgaaaaccgacttttacaggcactgttaccatgatttttgctacagccggccatgttgaccacggaaaaacggctcttattcaggcggtaaccggcgtggataccacccatctgccggaagagaaaaaacgcggaatgactatcgacctcggctatgcctactggccgcaggatgacgatacggttatcggctttgtggatgtgccgggccatgaaaagtttctcggcaatatgctggcgggtatcggcgggatccgccatatcctgctgattattgcctgtgacgacggagtgatggcacagacccgcgagcatctggcgattctgcgcctggcaggccgtccgcagatctcggtggtgctgaccaaagcggatcgcgttccggcggagcgggttgaggaagtccggcagcaaatcacagagctgctgttatctgacggctggccggaaagcccggtctttgtcacctcatcccataccggcgaagggctggatgcactgcgggcacacctgcgtctgcaccatcagcagcaatcttccgacagccggacggaaaaacgtttccggatggcggttgaccgtgttttcagtgtcaaaggggcggggctggtggtgaccggtaccgcgctggccgggcgtgtcagcaccggtgacacattatgggtgaccggcagtgataaatctgtccgtgtgcgcggtattcatgcccagaaccgtcagcaggaacaggctcaggccggtgaccgcgtggcgatcaacctgagcggggatgtcagcaaagagacggtttcccgcggcgattggctgctgagggaaaaaccggtgcagtccgcacaccgcattctggcggaaattgaaacagatgaaggtctgaaaagctggcagccggtgcatattcaccacggtgccagtcatattaccgggcgggtctccctcctgagtgacgacaacacccgtccgctgctggcggaaatcacccttgataccccgctctggctggcggaggaagaccggctgatcctgcgcgatatcagtgcgcagcgcacactggcgggtgcccgggtgctgaatttgtcttccccgcgacgcggaaaacgccggccggaatttctggcgtggttatcagagcgggcagcggcacaggatgatcgtgatgtcctgatgtgcgaactgccgcgcggggaggtttctctgccggtatttgcctgggcgcggcagctgacagcggaaaaactggcggaatgtactgccgggctgaatctgctgatcaacgacggttatgccctttcggcacagcgggttgaaacggcaaaagccattctgctggccaccctggcggattatcatcagtcacacagcgaccagatgggcgtcggccgtgacaggctgaaacggatggcattaccggtgctttctgattccatcgtgtttccggttattgcacaattactggatgaaaaacagattgtcagaacccggggctggctccatctgcccggattcggtctggctttcgatccggctcagggcgcactttggcacagtgcggaaccgctgtttcagcaggagccgtggtgggtgcgtgatctggccgttaaactcggcattgatgaaaccgctgcccgtcagtttctgaaaaaagccgcacagttgggtcatatcatggcgattgtgcctgaccgctattatcaccggtcacaaatcacggaattcgcgcaggttatccgtgaatataatcagacacatgaagaaggtatcggcgcggcacaattcagggataaatacggcatggggcgtaagctggccgtacagattctggagttttttgacaggaccggttttacccgccgcagaggggacaaacatattttgcgggatgagggactgttttaattttcttcaaaaaggatttaaggcatgaagatcgatttggaaaattttgtcagtgaattcaataaagagaaattcccgagctattatgtcagaaatgcaaaaatgtatggctgggaattagcttatattgaaattgaaaccggtgcctttaaagttgcactcgatattgatttcagaggaaatgtctggctggtattcagggattatgaatctctggatctttttcagaagagcctcagacgtgattttgattttaagacactgatttatgacggccggaataagaaatatgaattcagccggatcccgctggatgaaacagataccgtctcgatagcccgcggaattaccaatgagattatcggtttttataatgatatcgctgccgatttttatgcccgcaaacaggcggagctgacctgtgcgattgaatctcatcagtaccgtgatctgctgaataaaacgctggatgacatgtatcatttctttaaaggaaagcgtttatctgcgctggaaacagtacagcggataaaagagcagcagtgcgggttcacccgctatgataatgacgaaatcgtgctgatgcaggaaaaaggcgtttattatcagaaagaaaataaaatgctgatgcatgaattacggaatatcagcaccggtaattacaatacactggtgtgttttccgggtatgcagactgagaacgactcatggcttaaattctggtctcagtactggtttatgacaaaatgttattttgatcaaccggtttacggtgatacccgtgccacgactcaggacggtttttatcagtttggcaaaaaactggcggatgcctggatggatatctgggcaggtaaaaacatttgcattgtagcggtggaaaatgtggtaccggatcctgatcatttcctgttttcaaatacagggaataaagaggtaatccgggtaaaagacaccgatgcttataacgatattgatcagctgaccgaacagtgtctgatgaaaaaagatattgatctctttctgattgcagcgggcccggcaggtacggtgttatccgcaaggctggcagataacggcagaacagcgctggatatcggtaatctggtcagcagttataatacggtgttccctgaacagcttcaggcggagtaatgaccggcagaggttgtaaaaataaaccgggaaaatcaaacaggccgcaaatgcggcctgttttgcactgtatgccggaatcaggctttagtggctaaaatgacgctggaggcttttatcagtgcgacaatttcattaccttcatgtaattccatttcgtcgcggctttcattggtaataaccgccgtcagcggcagccctttttcggttctcagatgaatcgtgctgttgaccgcgccgttcaccattttgctgattttaccgcggaactggttgcgggcggaaaaacgcaggccgcaatccggatttgccagtaccacccacggcgctttaataattgcgaccgcttcttttccttcgcggatccctaatacgtcacagctctctttggtgatgacggttgtcagaatttcaccatgctcaagtgttaattccacttcattattaacagcgccggcaacaacgcgggatactttaccggtgagctggttacgtgcggaaattttcattgtgtgacctcttcccttttagtgattaactgaaatggttaatcttcctgttgtatcacacgatatacgcagcggcgagagtctgtgagtaaatattcgacccgttccacatttgcatttaaaactgtctgaaagagttccagctcggcgcggcagaatccctgacacatgcgggcggcggagcagataggacagtgattttcaataatcagccagcttccttccggttctttttcccattgcgccatatagccttcctctgtgcggatggcaacgaggcggataatgcgttcttccagagtttctgcgccctgaagtttatcaaaatagtcgcggcgggcttcattttcgcgggcggtaataattttgccgatagcatcctcgccgagttcgcggcggatggtagtcaggattttgactgtcagctccgcgtgacaatccggaaagcgtttattgcccagtgcggtcaggtgccagcgctgcaccggacggccgacaccccggcattcggaatgtgcctcaaccatgccgtcccgggccagtttggtaaactgctgacgggcagcttccccggtggtgcccaggtgctccccggcctcggatgcctgcatcgggccatgctttttcaggagaataagcaatttttctccgacagattgtgcggaactgaggttgctttccaggttagttcttgacatattctcgtgcccagtatttatttatccaagttaattcttgtttaatttatcgtattcagcaaagtatcacaagactaaaggatggtttctatgttgcccgatgacagccgctggcgtgatctcttctcagggaaaaacgctgcgatttcaatcgctctctcgttcggtgttgttattcacgccgttaatatcttaatggcgaccaccattttgccatccgttgttgctgatatcggcggcctgaatctgtatgcctggaataccacactgtttgtggctgcatccattatcggttctgttctttccgcccggctgcttgccgtatacggtgcccgtatcgcttaccttatctcggtggtagccttttttgccggcagcctggcctgtgcactggcaccccggatggaaattatgctgctggggcgcaccattcagggcttcggcggcggtgttatgttcgcactgtcttatgccatgatcaatttagtttatgttccggcgctgtggccgagagccatggcactgatttccgggatgtggggtgttgccacattagtcggtccggcagtcgggggtatttttgcccagttaaatgcctggcgttttgcttttggtgtgatgttgccgctgatggttatctatgggctctttttgcttacgattatgccgaaaaagcagaaagatgacggcatccggccgcgccttcccctgatccagctgacattactgactgccgctgtgctggtggtctccgccgggagcctcagcccggatgtgttcctgaatgtgggcggtgtggtggtctcgctgctgttactgattgtgcttgcattgattgagcagcgcagccgcatccggttactgccggaaaacaccttccggcgcggcagccatcatgcggcgctgtatatcactatctctctgctggctatcgggatgacctgtgaagtgttcgtgccgtacttcctgcagcgcctgcacggtcagtcgccgctggcatccggttatatgagcgcgctgatggcgctgggctggactgtcagtgagatcatcagtgccggatggaaaggggcgaaaatgcgtgccagtattctgctcgggccggtttttgtgctggcggggctggttctgctggcactgacgctctctgtgccgtctgccggtacatggggcatcatgtcgccgatcctgctggggttatcgctggtcgggttcgggatcgggttcggctggccgcatctgctgacccggattttacaggttgccgcacctgcggataaagagatagccgctgcctccatcaccacagtgcagctttttgccacagcgctgggtgcggcgctggcgggaatgattgttaacgtcaatggtttcaatgacggtacattgacgggcgtgatgtcttcagcctactggctgatgatgttgctggcgattgccccgctgattgcgattttcaccgcccgcccccgcgcggctatttcttactgctgattatcccgtttctgataacagtgtatgccggaatgaggactgtatcctgttccggcgtttttttacactgaccggatgttttctgtcagggtaatgtccgttatgtctcagtatcatctcgaatttgaaaaaccaatcattgagctggaagaaaaaatcgccgcattgcagtcgtttaaagagcgcagcagcgatttgggatttgatccggatgatgaaattgcctgcctgcggaaaaaatgcgaaaaactgacccaatcgatttatgcggatctcggtgcatgggagattgtccggctggcccgtcacccgctgcggccctataccctggattatatcagtcttatttttacggattttcaggcgcttgccggtgatcgcgcctttgcggatgataaggcgattgtcggcgggctggcacgccttgaaggccgtccggtgatggttatcggtcatcagaaagggcgggataccaaagaaaagttactgcgcaatttcggcatgccgtcaccggaaggttaccgtaaggcgctgcgtctgatgaaaatggccgaacgttttcatatgccggtgctgatgtttatcgattccgccggtgcctatcccggcgtgggtgcggaagagcgcggacaggcagaggcgattgcccgtaacctgctggagctgtcgcggctgaaaaccccggttatctgctccatcatcggtgaaggctgctccggcggggcgctggggattggggtcggcgatcgcatcaatatgctgcaatacagtacctatgcggcgatttcgccggaagggtgcgcctctattctgtggaaaagtgcggataaagcaccgcaggctgctgaaaccatggggatgaccgccccgcgcctgaaggcgctcggtattatcgatacgattattcccgaaccggcgggcggtgctcaccgcaactatcagcaggcggcggataacctgcgtgagcagctgttgcaggatctggcggcgttatccgccttaccggaagacgaattactggcgcagcgctatcagaaattaatgtctttcggctattgctgaggacagattaacctgtttgtgataacaatagggatgaatatctctcataacggggacgctgtcatggcggtcgatctgaatttactgccggtttttctggcggtggcggagcagggcagttttaccggtgcggccacccggcttggtatgccgtcatccaatgtcagccgggccatcagacagctggaaacccagaccggctgccgcctgattgaacggacaacccggcgtatgcgcctgacggcacaggggcagcagctgtatcagtgcgccggaaagacggactccatgctgcgggaaactttttcacagatccgcaatgatgatgtgctgaccggctgtttccggctgacggtgcccggtgaaggctgcggggaaatgctggcgccggtgctggcccgttttgccgcactgcatccggatttgcagatccggtgtgatacaaagctgaccccggcggatattatcagtgatgatatcgatctgctgctgacttatcagcgcggggagatggcagacagcagttatcacagccgtctgattcagtcatggtcatgtgtggtggtggcagcgccgtcattactggcgcggaccggtatcccggtttctgccgctgagctgccccggctgccctgtatttccagcctgagtgctctgaatggtcagccgtggattttccgtaaaccggacggcgaatggctgactgtgcgcattaacagccgctatcaggttaacggtgcggcactggcagcggcggcagctgttgaaggactgggttttgcgattctgaccagacatttgtgtcagcaggcttttcgtgacggcacattacaggccgtccggctgaatgaagaaccggctcccatcgaactgagagccgtctatgccagccgccgtgagatgtccccggttgtcgacaaattcctgcattttcttgaaagttcgctgcgggatcaggataaaaatcagtagctgcggaataccgtctgctttccgtccgcatcataggcgatcacatcatacggctctttcatatccttgtattccatgccgaggctgccgaccggcattcccggaaccgaaattcctttggcactttccggcagcgtatcaatggcatccaggctgtccgccgggacgtggccaatcacatatttgccgttcagcgtggcgaggtgacagctcatcaggttcggggtggcaccggaatcaagcatcattttctccagctgtgcctgcggaataatattggtttccacatcataaccggctttttccaccccttccgcccactggccgcagcagccgcaggtcggggatttatacacggtgacggttcctttcgctgccatggcaccggcagaaagtgtggttaataataaagataacgcccagacggattttttcatcggtattccctgtaatgagtcggataataatgatgagattaatggtttaccttaggggaaggtcaatacaggggaacgtatagttatgcggagaagtgtaaaggttccggggcagtaaaccaccggaaccggagaatactattttacacggataactattttaccgaacgggccgcgctgaaggtgcgcaaaagcagccggaacatcaccgaaaggatagacggtatcgataaccggtttgatctgatactgctcagtggcggcacaaagccgctcgagtgcccggcggtgaccgacggtgatcccctgaagggttgcctgtttcagcatcagcggaacagccggcatcaccagttcttcgctctgcataaaaccaatctgtgcaatgtgcccgcccggtgccagtgcggccacggactgacgcaggttttccccgccgataacttccaggatatggtctgcaccgtgaccgccggtcagtgacatcaccgcgtccgcccatgccggagtcgcccgggtatcaataatacgggtgacacccagtgcattcagacgggcaattttttctgcggaacgggtcagtacaacgggttccgcacccattgccagtgctatctgtaatccggccagtgatacaccaccggtaccctggagtaatacggtctgtccgggctgcagatccccgctttctttcagggcaaaccaggctgtcagtccggtgaccggcagtgtggatgcttcttcgtcagtcagtgacggcggaaccgcaaccagcgtttcctcattcagcacaatatactcagccagtacgccgggcagcgggccgccgagtgacaacccgtgatttgccatttctgccggcggggcgttatctgtccactgtgtccagaaattgccggtcacccggtcaccggtatgaaaccgggtgactttttctccggccgcgacaatctctccggccatatccgaggctggtgtaaacggcatttccggcagctccggtaacaattttccgtcaataaccagcagatcgcggtaattcagggagactgcggatacgcggatcagtacctcatgttctcccgggacaggcaccggcacatcggcaagggtcaggttattcagcccggtggcggtcagttgccagcgtttcatcattttttgcataagaagctccttttattctgttctgttattttattggcaacttttttgcgtgtatgctgatgttttggtgtaacagtgactccttaaagttgacaatcatggcgaacctgaatctgtattcacaactgcaaaatatggcggcattcgtgcacaccgtggagaccggcagctttacggcggcagcggtacggatgggggtatccaaatccgcaaccggcaaaagtgtggcgaaactggaggaacgtctgggagtacgattgctgcaccggacaacgcggagtgtcagcctgacggaagaagggcagatttattatcagagctgtttatcggtgctggatgagctgcatcaggcggaatcattgctgtcagcccgccgtcaggccgtttccggaacattgcggatcagtctgccggtttcttacggacggctgtatgtgatgccggtactgacgcaactggcaaaattacatccggaattaaaactgatggtcagctttactgaccgcagggtggatctgatagaggaaaataccgatctcgcggtccgcctcgggtatccggaagacagtaccacactgattgcccgccgcctgggaacgcagcatgcggtgatttgcgcatcgccggattatcttgcccgccggggcacaccgcagacagcggaagccctggcagagcatgattgtctgggatttatatcccggggacagattctgccgtggccggtaatgaacaaagacggcacagttaaccggctgattatccgcccgaaacatattatcagtaacggcgaagccctgcgtgacgccgcggcggacgggctggggatagcgtatctgaccacctggctggcagcacgggatattgaacaggggcggctgcgggtattgccggttgccaccccggaagatgatgcgccggcgcctatctttgcagtatggccgcgttcgcgtgatctctccccgcgcatccgcgtggtggtggatgctctgctggcagcatacaatcctgacccggaggtaacagaatgactcacctgacattacagataacagccacagaaacccggattttttctgcggaggctgatgtgcggcttccgctcggcgacagtgtgactgacgggtttgtttttcagcactcgccggtgacagcttatgaagcggaagtggcaattgagcatattgaaaaccggattatcccggcgcgggcggcattaccggcgggagacctgattttgcattgcccggatctgcggctaaactatttactgaccggtgatgacgcgggcttcttatccacggaggaaatagaacgcgcgtttaatgagattgtgaatgttatcagcggcagcccggtatcatcaacatcactcccgtcagacaaacaattcacggcatttttactgattatccgtgagatcacccatcactggggactgacagggctggtgccggggaccgccggaaaaaatgatgtgatttaacatgtatacagaatgactcttatcaaaataaattataaaatttgtattattatttagtctccggggctgccgctccggcgattgtatgatgacagagcagaacagatatgagcattacactgataaataagattaaatccgtttcttcccggttttcggccgggtatttcggcatggtcctggggctgatcggcaccgggatggcatggcgctatgcagcggctgagcaggggtatccggcaatcatcggtgaggtgattattggtgccggttgtgcggtctggctggtgctgataactctgtttattatccgcagtctctgttttccggaaaaaatgaccgacgagttccgtcatccggtcgccagcgggttctccagcctgttaccggcaactactgttctggtggcgatggggctgacgccatacttcccgctgttttccaccgggctgtttgccgtcggtgcagtggcacaactgtcttacgccgcgtggctggtcggctctcagtggaaaggggagtatccgaaagcggcaaccaccccggtgctctatctgccgactgtcgccaataattttatctgcgccatggcgtgcggcgcactcggttttaccgaccttggtattctctttttcggtgcgggggttttctcctggctgagtttggaaccggcgattctgaaacggatccgcagtgacgggctgatggatgaaaaatcgcgcctctctttcggtattcagctggctccggcactggtggcatgcagcgcctatctggcagtgaatcagaatcacattgatttctttgccaaaatgctgctcggctacgggttactgcaactggtgtttatgatccggctcatcccctggtttacacagcaggcatttaccctgtcattctggagcttttcatttggtgtgtcggcactggcaaaatcctctctgaatatcagtatgtcttcagataatgaatttattcacctgctggcattcaccctgtttatcttttccaacgcctttattctgttgctggtggtgaattcgctgcgtcttctggtcagaaagcaaatcacccgcgcccgtatccgcgaagagaattaatattcagccgccggttcccggcggttatcaatttgattatttattaaccaccattctcataatgatatctgcgctgaaaaaccccgctgtcgtgagatgttcagtacgaatagtgaacaatttcacaaagtgatcaaaaactccgttattaatcacattttataaccctttttcctgctaatccgccctcctggtgtggttattgctttatctgttgatacagattgcatgacagccgtctgttctccacaagagtcctaaataaaacagatagttattaacagagtcagatagtcaaattcacgtacaggagagaagagatgtctgatcaacaaaacacagcatctgatcttatttaccagctcgaagataaacccccgtttttacaggcgattattggtgccattacccatctgctggccatttttgttccgatggtcacaccggcgctgattgtcggtacagccttacagttatcgcctgagaccaatgcgtatcttgtttccatggccatgatcgcctccggcgtcggtacctggctgcaggtaaaccgctacggcatggtcggctcggggttattatcgattcagtccgttaacttttcatttgtgacagtgatgattgccatcggaaccagcatgcgggctgatggcgttgatgaagagctgttactgtccactatcttcggtatctcgtttgccggtgcattcttagttgtgggatcgtcttttatcctgccctatctgcgccgtgtcatcaccccgacagtcagcggtattgtggttctgatgatcgggctgagcctgataaaagtcgggattatcgatttcggcggcggcttctctgccaagtcctccggcaccttcggtgattaccagaacatcggtgtcgggttactggttctgctggtagtcatcgggtttaactgctgtaaaagcccgctgctgcgcatgggcgggatcgcgattgggctgattgtcggttatatctgcgccctgttcctggggatggtggatttcagtcagatgagcaaagccgcgtttatcacgatcccggtaccgttcaaatatggtttctcgtttaacttcgctcacttcctggtggtcgctattatttatctgctcagtgtgctggaggcagtcggtgacctgacggcaaccgcgctggtatccgggcaaaaaattcagggaccggaattccagtcccgtctgaaaggcggggtaatggcggatggtctggtgtctgtggcggcttccgcaatgagttccctgccactgaccacctttgcccagaacaacggggttattcagatgaccggggtggcttcccgccatatcgggaaaatcatagcggttatcctggtgatcctggggctgtttccggggatcggctggttctttacgacgattccggcaccggtgctgggtggtgcgatgacactgatgttctccatgat

SEQ ID NO: 9 - DNA, 147754 bp, unknown
  Altogen 322075 strain
  misc_feature (1)..(1): n is a, c, g, or t
  misc_feature (10203)..(10238): n is a, c, g, or t
  misc_feature (61108)..(61233): n is a, c, g, or t
  misc_feature (64533)..(64533): n is a, c, g, or t
  misc_feature (86306)..(86326): n is a, c, g, or t
  misc_feature (106482)..(106543): n is a, c, g, or t
  misc_feature (125638)..(125661): n is a, c, g, or t
natccgtattattctgtccaacggcctgcgccgccgcgaaaccctgattgtggcgacctcactggggctggggctgggtgtctcttatgacccggcggttttccacgtcctgccgacatccctttacgcgctggcagaaaacccgatctgtatgggcggtgtgaccgctattattctgaatttaattattccgatcagtaaggaaaaagaaccggatgatattgaagaatctgtgagggaagaggaagtttaatcagcacagcctgacagcccgcttatctcagcgggctgtcagtatacggacttaccggtgactgagtgccagattgacggcaaaaaacataaaaagtccgccggtcaggcgatccatccaccggataaagcgccgggatttcagcaggcgcgaggcgtaaccggtcatcataatcagagtcaatgaccagagcgtaccgataaccacatgaatagtgacgagcagaaatgtccgggctatcagcggttgtccggctggaataaactgcggcaggaaagagacataaaatatccccattttcgggttcagcacattacccagcattccccggataaaccagttactttgcggggcagaaacatccccttgtgttgtgctgaatgattgacgggggtgcagaattaactgaatacccagccagagcagataaagtgccccgcaccatttaacgatatcgtaagccgtggcagacgcggcgagcagtgcgccgagacccagcgccacgaaaagcccccagataaaacaacccgcatcaataccgagagccgcctgaaaggctttttttccgccctcggcagccgcagtgcgtaatatcagtgcggtatcaagacccggagtcagggttaacagtaaagcagcgagagagtaagcaaggagggcatcagttgcggacattttttcagctccgaaagcacactacactagggaaaaaacggggccggatcaagtggcgggttagtggatttctccggcagccctgtttcccggaaaaagctaaaaaagtggtttaacgatattttcccaataggtatcaactattacgataagagaaacggcaaagaaaaaatacgctatcatgattttccacacctttttgaagacagtaactgatttaccaaataataaaaaaaccggcggatacagagcatcagccggcttatggatatgtactgagttactgtgaaacgttactcaatattctgaatctgctcacgcatctgctcaatcagcactttcagttcaatcgcggaactggtgatatcggcattgatggactttgaggcgagagtgttcgattcgcggttgaattcctgcatcataaagtccagacggcggccgacggcctctttcttcttcaggatattatgggtttctttcacatgggcatcgaggcgatctaactcttccgccacgtcaatgcgctgtgccagcaggatcagttcctgctccagacggttcggatcgacctgaatttgcgcatcgtccagtttgctctgcagacgctcacgctgccataacaggatatccggcatctgcgcacggactttgcggacttcttcggttacaccgtcgaggcgctgttcgattaacgtcttcagtgccgcaccttcacgttcgcgggcatcgataaaggcggtgatggtgtcatcgagagcggccagcagctcttcactgatggtgtccagatcctgctcctgtgcggacatcacacccggccagcgcagaatttccagcggattgatttccccttcgtgactgtagtttttaacccagtttgcggcagcaaccagctgtttcgccaggtcttcattcatattcagcccgctctgcgcgttgctgctcaggtcaaagcggaggttacactcaactttaccacgggtcagacgctgacgcagacgctcgcggatcaccggctccaggctgcggagctgttccggcaggcggatgtaggtttcaaggtagcgctggttaacagagcggagttcccatgcggcagtgccccacgggcgtttgacttcctgacgggcaaacgcggtcatactacggatcatgatatctgtcctgtgatggatttattgctctgattatagcgctgttatggtgttaaggcataggcattcaccggtttaagccgtataatgcgcccccaacagttaactgaaccggagaatcactatgagtcagtcatcacgtcccgctggccggggaacagaccaggtgcgtcctattactatcacccgtcattataccaaacatgccgaaggctctgtgctggtcgagttcggtgacactaaagtgttatgtaatgcctccgttgaagaaggtgtgccgcgtttcctgaaaggtcagggacagggctggatcacagccgaatacggcatgctgccgcgcgcaaccaattcccgtaatgcccgtgaagccgcccgtggcaaacagaccggccgcacaatggaaatccagcgcctgatcgcgcgttcactgcgtgctgcggttgatctgaccaaactgggcgagttcaccatcaccctcgactgtgatgttatccaggctgacggcggtacccgtaccgctgcgatcagtggtgcctgtgtggcactggctgatgccctgaatcagatggtcgcgaaaggtcagctgaaagccagtccgctgaaatctatggttgccgctgtttctgtcggtatcgtggacggtgagccgcgttgtgatctggaatatgtcgaggattctgcggcagaaaccgatatgaatgtggtcatgattgatgacggacggatgattgaagttcagggcacggcagaaggtgcgccgttcagtcatgatgagttgttgtcgttactggccctcgcaagaggcgggctggaaaccattttctccgctcagaaggcggcattagaaaattaatcagaaggcgacgtgatagtcgccttttttatgcctgtgattcaggcacgttatccgtcaatcagaatcaggagatcccgatgaaagcttatcagcgcgaatttattgaacttgcgatgaaaaaacaggtactgaaatttggtgagtttacgctgaagtccggccggaaaagcccgtatttcttcaatgccgggttattcaataccgggcgggatttggcgctgctcggacgcttttatgcggcagcattatgcgacagcggcgtacagtacgatgtcttgttcgggcctgcctacaagggtattccgattgcaacgacgacagccgtcgcactggcggagcatcatgatcttgatatgccgtactgttttaaccgtaaggaagccaaagatcacggggaaggcggaacattggtcggcagcccgctgagcggacggattgtggtggtggatgatgtgataaccgccggaacggcaatccgtgagtcgatggaaatcatcagacaaaacaatgcttcgcttgccggtgtgatgctgagtcttgatcgtcaggaaaaaggcaaaggcgagttatccgccgtccaggaagtggagcgcgattacggttgtcaggtattttccattatcacactgaatgatttaatcagctatctggcggaagatccgcagatggacagccatttacaggctgtacgggcttaccgtgagcagtacgggattgagatctgagccggacagcaggcaaaaaaaagccctcgcccaataaaacgggcggggtgagtagtttaactaaaaacggtattactgaagttgtgcaaggatcagcggccagcgggcttcaaattcctgtgtcggccggtacttaaattctgagcgtacaaaacgggacagcatgccttcgcaaaaggcgagcaactgagatgctaacaggctttcgtcataagtaaaaccgctgccgtcacggatccgcttttcttttaagacctgacgcaactgagcttcgattcgttcatacaactgattgatcctgctctgtaatttatcctgctcaaacatcagtgcgtgaccggtcatgatacgggtcaggccggggttcttttccgagaatcccagaatcagcatcagaatcagttttatccgcgagatagtctctttttcatcctggaggataaggtttatccgcgaaatcagtgagtcctcaataaatacgatcaggctgtcgaacatttttgttttgctggaaaaatgacgatagagcgctgcttctgaaacacccacactggcggcaagtttggcggttgttatacgctgactgccgtcactggactcaagcatcagcgcaagcgcctgcaggatctcctcgcgcctgttcttcttttttgtactttctgccatgtcagataaaacccctgcgttaacgcaaaaacaaatctgccgactgacagcggtacaccagtactgctgtcagaaaagcgacggaaataacggcgttattagtattattgacggcctgaatggccaaatccgccggctccgcgctcactttcggtaaattcttcaacaatattgaattcagcctgaacaacaggaacgataatcatctgtgcgatacgctcacccggttcaattgtgaaggtggtatcgccacggttccagacggataccatcagctgtccctggtagtcagagtcgattaagcccaccaggttgccgagaaccacaccatgtttgtggccgagcccggaacgcggcagtaccattgccgccagggacgggtctgcaatatggactgcaaggccggtcggcagtaacagtgtctggcccggtttcagttcagcggcttcatccaggcaggcacgtaaatccagacccgcagagcccggcgtggcgtaggccggtaacggaaattccccgccgatgcgcggatcaagaatcttaatgtcgatttttttggtcatagtgtttcagtatttcgtccagtaaatggtggctgagctcggatttgctcatgttcggtaagctgatatcgccggtatgccagtacagatgcagggcattgttgtcactgttaaagccttggttttcaacagaaacgtcattggcgcaaatcatatcgagctgctttttcaccaacttgccgcgcgcgtattcttccacattttgggtttcagctgcaaatccaatcacaaatggccggtttttttccagtgcgccgacaccggctatcacatccggatttttcaccatcgtaaaggtgatttcgtcgccctgctttttaattttctcaggcgcaaccgctttggcgcggtaatccgcgacggcagcacagccgataaaaatatcctgctgcggggctgttttctgtgcggcatcattcatttcacaggcactgctgacatcaatacgtttaacacccgctggtgtcggtaatgtgacaggcccggcaatcagcgtgacatccgcgccgcgtgctgcggcagccgctgcaatggcaaaacccattttgccggagctgtgattgctgataaaacgcaccgggtcgagtgcttcgcgtgtcggcccggcggtaatggccagacggatgccggacatatcctgttttttgcggaagtgctgttctgcccgagaaactatctctgacggatccagcatgcgtcccggaccaacatctccgcaggcctggctgccgctgtccggcccccagacagcaaaaccgagctgttccaggtgcgcgagattctcctgagtggtctgtgcgcggtacatctgctggttcatagccggtgaaacggcaatagtggcatcagatgccaggcagatagtggtgaccaggtcattggccatgccggcgctcaggcgggcaatcaggtcagccgtggcgggcgcgagaataatgagatccgcccatttccccagctcaatatggcccattgcggcttctggggccgggtcaagaacgctttcggccaccgggaagccggaaacggcctggagtgtcagcggggtgataaatgcggttgccgcaggtgtcatggctacacggacaatcgcaccccggtcacgcagacggcggacaatctcaggggctttataggctgcgataccaccactgatacccagaactatctgttttcctgtcagttcggacattgtgttttatccagttatttttcggagatacgcgattttaccacaacaccgccgtataggtagggtgctgtgtatttatccagctaaataatgttttttcttcggcgcgtctcgcaaaaatggcgtgttttatgcgaaaaaaccgccggtactgacatactttttccggtaaagcagggaaaacggcgggggaaaaatggataacataaccggaaatacggcactgatgccgagagaaaaactgattgcttacggggcatctgttctgagtgattcagaactgctggctatttttttgcgtaccggtacccgtgagcggccggtgcggcagtttgcggagtatctgctggacgtcttcgggtcactgcaccggttgctgacagccggatatgaggagtttaaacctctgcccgggataggggacagtaagttttgccagatgcaggcgattgtcgagttgtccaggcgctatttcagcagtcagtttcaggaaacacaatttctcagcagtgcctgtactgtaaaggcgtatcttaaccagcggatggccgggcaggagcgggaagtctttgcagtgctttttctcaataatcagaaccagcttatccgttatgaggagatgttttcagggacggtaaactgtgtggaagtacatcccagagagattttgcgcctggcgctcaaagtgaatgcagtttctgtgattctggcgcataatcacccctccggtaacgaaaaccccagcagggctgaccgtctgctgacaaaaaaaattgttcaggcatgtgagctggtggggattaacgtgttggatcacctgattatcgggaaattcaatatgttttcgtttgcagaacacgacctgatctgagcagtttttttcgcagaaacacacgatctttactgttcgggtcttgagcgtttgcgccggaaagcgtatactacgccacctttgaggatcttgggtttggcgagaagagcctatctcagcatatttttgctggttgacagagcaatttcccggcgagtcaaaagtaagctgagatgggctcctaagcctgacgaggcagcctcacccaatacaaagctcgagctgattagatttttggagaatagacatgtcccgagtctgccaagttactggcaagcgtccgatgagcggtaacaaccgttctcacgcattaaatgcgaccaaacgtcgttttctgccgaacctgcactctcaccgtttctgggttgagtctgaaaaacgtttcgtgactctgcgtgtatctgctaaaggtatgcgtatcattgataaaaagggtatcgaagctgttttagctgatttacgtacccgcggtgagaagtactaaggagctgaaaaatggctaaaggtattcgcgaaaagatcaaactggtttcttctgaaggtacaggtcacttctataccactacgaagaacaaacgtactatgcctgaaaaactggaaatgaaaaaattcgatccggttgttcgtaagcatgtaatgtacaaagaagcaaaaattaagtaatttctgcttcctgattgaaaaaacccggcttcggccgggttttttattgcctgtttacaggaaaacggctgatcgacagagggtaatattgtcatctgtcttcactctctgagttggttgatataatatattgctcttttataaattattggtgtttttatataaaacgatatcttttcaaacgttaattggagataaaatggcagataaatcggatacttatcttaaatactgattgtaagagtattaaaatattcagattgttgtatcatttacgggtactattgttttatcagaacatacaactataacggctgatttatttattatttttatatagtttttatatgattactgagttggcgtgccagtgacagccagaacctgaatcagtttacttcgcagataaaaacgaatgttggaatatgatatgagtaacccggttatttcggtcatgattgcagtacataatgcggagtcatcaatcctggccgcgttagagagcctggataatgccctgaatgagaatagttctccggagcaggttgaagcgatcattattaatgatggctccaccgataaatcgctggatcttatcaaccattatcagccacgaaactttattaaagtcgttgaaacagttaatttttccaatgtcggaaaagtccgccattatgcatattcattatcccgcggcgaatatatcacagcgttagacagtgatgatatgctgaaaaacggcgcactgagccgggttatgaacattatgcgggagcatccgtttgatctgctgataacccgtctggatgaacataatgatcgtaatccggtattagaaattgaggataaacctgtagtatcaattactcaggacaggttaaaagaactctatctggaacataagacggtaaaaggtcatctactcggccggtttatccgcagggatatcctgacagatgatatgttccctgaaatttattgctatgaagatgtggttattacagcaaatgttatttgcgcagctcagaatatcctgatcacagatactcaaatttattgctactataaacatcgcggcagcttatccacagagaaaagtatgaataaaaccgttcttttcctgcaaattgttttatcaatggaaagcttctttgtaaaaaataaaaatgaaaaagtgatgtttgaaggattgttcgttaaagtatgttctgattatttatcaagaaataataaacgtaagcttccccgttttgttatggatcggtttaatgatatcaaaatattccgtttcctgttcagctctaaagtaagattaagcagaaaaattatgtttttaaaaataaaatcagcaggagttttctaaatgttcacaagcagaacattaccaattctcattggtatgctgatgactttctcaatggttattgcttccttcgtggataccttgtcacgggactcttattttatactgagttatttatctgttatcgtgacactctggctggtttttttcaaaaaaatgtcacttttccgtgaccgtgctgtgttgcttgttgcagtatcgttcctgttgtttggtatttcccgggttgcctggtcatttctgatgaatgatgacgggttgagtatttataaaaactactctcccacagcatcgaggattatactcggagcatttgttttctgtgtttgtattttattaaagaatgagttgaagtgttttttcagtaataaatatatttcatctgtcattaaggtattacccctctatattttattgtatgcgctttatgatatctttgttttgcataaagacagagttgagctggatacaaaccgggcaacaataactgcatactttatcagtgcgatattttttgtcagccttcatttttgtattcaggtgaaaaataaactgaatgtctcattgttttttactaacctgattgtttcaaatgcgattattcttctgacacaaacccgtgccgcaatagctatttatcttttactttctgttttttataccaccattgttttccggaagagcctgaatataaaaaaggtaagcatggttgtggtacttctgctgatttttgccggtacatcatatgagtttttatataaatcccgtattaatgaggcaatcactgaaactcagagttatgatgtgacaaagccggggggatcgctgggtgaccgttataccatgtggtatgcagggttatctgcgtttaagcatgcccctatgggggaatcttttcaggcccgtaatgattttatttcagaaaaaatagctgccggtgcaatcagtgattcaatcactgtctacctgacgatacatctgcacagtgaactgattgaggtgttgtcattgcagggggttgtcggtggtgtgctgctggtgctgatttatctctctctgttgtatgccggtattcgtaataagaacgtattactgataatgattaccttgtgcctggccggttatggtctgacagatgtcttgttcttcagtcgtgagagtattactgtttatctcctgtgtattgcagtggctctggtgaccggcggtaaagaagatnnnnnnnnnnnnnnnnnnnnnnnnnnnnnnnnnnnncggcattgagccgcatctggtcggtaatacagtgcgttatgttgaagtccggaaccggcgcctgcgctggccggtgtcagagcagattgagcgcctgagtgaccggccggtgctcagtgtgcagcgccgtgcaaaatatttgctgattgagttgccggaagggtggattatcattcatctgggaatgtccggcagtttgcgtattcttttggaagaaacgccggaagagaaacacgaccatgtggatatggtgctcggtgacggtaaaattctgcgctataccgacccgcgccgttttggtgcctggttgtgggcagatgatctggcaacttgtccggtactggcgaatctggggccggagccgctgagtgatgattttgacgctgcatatctgttcgccaaatcccgcaaacggaacacaccggtcaaaagctggctgatggacaataaaattgtggtgggtgtggggaatatttatgccaatgaatccctctttttatcccgcatccatccgttgcgccccgccaaagatctgactgaagatgaggttgcccgcctggttgccaccataaagcaggtactgacggaatccatcagacagggtggcaccacgctgaaagattttttacagtcggacggaaaacccggttattttgctcaggaactgtttgtgtacggaaaacagggagagtgttgtgcgaactgcggacagaagattgaagtggtgaaagtcggtcagcggagcacgtttttctgccccgcctgtcagcactgattacgccttaccgagtttttgcatcatcgcctgtgcgacggactccggcagaaatgcagagacatcgccgtcgtgcagggctacgtctttgatcagggatgaagaaacaaaagagagattctgcgacggcaggaggaaaacactctcgagatcctgcgcaaaatggcggttcatattcgccagctgccattcatattcaaagtcagcaacagaccggacaccccggatcagcacattggcattttgctttttggcaaaatttgccatcagctcagaaaaccccagcacttccacattcgggatgtgagaacacacgtctttggccagcgcaacccgctcatcgagggtaaacatcggatttttacggctgctgttggcgatcgcgagcagaatgtgatcaaacatttttgaggcgcgctcaagaatatcgatatgtccgcaggtaatcgggtcaaaagtgccgggatagattgcgcgtgttttcatgatgctgactcatcgttgttactgacggaccacaaagtggcgtatttattaaaggtatattgtgcgttcacaaatgcaaggataagcccctgtttaccatccaggaatccggctctcagcagccaggttttacagaacgcaccggcggtgtgagtcagaacagagaggaaagagcagcgtttgccggccagatgacgggcttttgcccagtcagcagcatagcgcagctgcttttgctgaaactccggtaaatcgcggcaggtcaggtgtaagacatcccctttcagggtgatgacattggcaccctgtgtctccagagattcatgaactgcattactgttgtactgatattgctcacgcggatataaccgcaggacatgatccggataccagccgctgtgtttcataaaacgcccgagaaacagattgcggcgggcaaaacgatatactgtatttttctgcggcgcggtaagtacctgttcaatggattgtttcagctccggcgtaacccgctcatcagtatcgagcatcaggatataatccccggtggcatactgctgggcaatctgccgctgacgaccgaagcccggccactcccggttttcatacacctgagccccggcattacgggcgatggtcagtgtatcgtcctgactgccggaatcgagcacaatgatttcatccgccagtcccagaacggagttcaggcaatcaccgataacatcggcattgtttttactgatcatcacaacggagagacgttttttatctgtcatcagtggctccgtggtggcagatacggtccgagcagctgcatcagacggtgcagtgcgccctgattttcatgaagtacctcagcggcatgccgtccgcagtacagccggtaatcctcatcattgagcagattactgacagcgtcactcagactctgttcatcggtgactgtcagcagggcatcagcctgctgtaatttgccgcagatatttttgaagttgaaggtgtgcggtcccatcagcaccggcagggcgtgcgcagcggcctccagcgggttatgtccgccgcgttcaaccaggctgccgccgacaaacgcgatatctgccagtccgtacagcagcatcagttcacccatagtgtccccgaccaccacctgtgtttccggtgacggaatggtgttgctgctgcgcatgacataggtcagaccggctttttcggtcagttcccgtgctttggcaaaccgctccggatggcgcggcaccaggatcagcagcaggttcggaaagtggttcagcagagctttatgagcattgaggataatttcctcttcgccttcatgagtgctggttgcgatccagaccgggcggcgggcggcccactgacggcgcaatgtgacggctttggcggccagttccggtgtgacagagatatcgaatttcaggctgccggtcacatgcagttgctggcggcgcaggccgagctcaataaagcgttccccgtcttcctgattctgcgcggccaccagggtgatccggttcaggatggttttcacgaaactgcctgctttcttataaccggcggccgagcgcgctgacaggcgggcattggcgatcaccagcggaattttccggcggtgcagttcggttatcatgttcggccacagttcagtttccatcactatcaccagtttcggctgaacagtattgaaaaaccgtttcattgaccccggtaagtcgtaaggcagatagacgtgataaacatcatcacctaatgctgataaaacccgctctgagccggtcggtgtcatggtggtgacagtgatgggtaacgtcggataatggtggcgcaatgcacggaccagcggcactgcggcgagtgtttcgccgacagaaaccgagtgcaggatgataccgccggtgccggtttttcctttacagaaaccataacgttcgccccagcgtctgcggtaggccggggagcggcggctgcgccataacagacgtaaccagataagaggttggatcaggtaaagcagaacctggtatacacgcagtaacattttatcagtttcgcagataagattgcggcaatagtagcataaaactaacacgaatagcgcattaaaaagcataaacccggcgtcactgacggcgggatccccgctgtccggcacaacacactgcgctatctgttaatactgccgggagcgatttgtggtaatctgtgccccagagattgatacaccttattccctgatttctgtctgactctaaatggaactcttatgcaaacagcatcagcgccggtacagcgtattttagtgataaaactccgtcatcacggcgatatgctgctgataacgccggtgattaatactctgaaagcgaattacccggatgctgaggtggatgtcctgctgtatcaggaaaccgcaccgatgctcagccgccatcccggcatcagccatatttttgccatggacagagcctggcgtaaagagggaacctgcaaacgtatcggacatgagtggcgtttactgaaatcactgcgccgccgccgttatgacctcgtggtgaatctggctgatcagtggtacagcgcgattgtgacccgtttcaccggtgcccgtatccgtatcgggctggatctgcggaaacggcagagtattttctggaaaaaatgttacaccctgctggcagatacctcacaggaactgaccatgcatacggtggagcagaatcttaacggattaaccccgctgaatctgccggtgacagttaaccatgtcacgatggcgtattcagaggaagaccggcagaagactgaacagcttttgcagcgcaaacaggtgaccggtgactatattgtggtgcagccgacatcccgctggttctataaatgctgggatgacgacaagatgagtgaagttatccgcacactggcggatgaggggcaccagattgtgctcagcagcgggccggatccgcgcgaaaaagcgatgattgaatctattcttgcgccgtgtcagcagtctgttgccgacggaaaaattgtgtccgttgccggagaactgacgctgccgcagctcgcggcactgattgaccgtgcgaaactgtttatcggtgtggattctgtgccgatgcacatggctgccgccctgcaaacgccgatggtggctctgttcggcccgacgaaactggtattctggtcgccgtggcaggcaaccggtgaaatcattaaagcatcggattacggggaacagccggacccggatgacgtgaacaccgggactgacgaacgttacctgagcccgattccggcagacgcagtgattaccgcggcacggagatatttatgaaaaatatacgtctggcgattgttcgtcagaaataccgcccggacggcggcgcggagcgttttgtatcccgggcgctggaagcactggacaaccggaacctggagctgaatgttatcacccgttcctggcagggtgctgcggctcccggctggcatattcatgtggtgaatccgccgaaatggggacggatcagccgtgaacggggatttgccaacgctgcccgtgcctgctggcagaatgaaaaatttgatattgttcagagccatgaacgcattgccggctgtgatattttccgggccggggacggtgtgcaccgccgctggctgttacagcgggcgcgggtactgcccgcctggcgggcgaaactgctgtttgcctcgccgtaccaccgttatgtgatgaaggcggagcaggagatgtaccatgacccgcactttaagcaggtgatttgtaattcggaaatggtaaaaaaagaggtgatggaagactttggtttgtcagagtcgctaataaccgtcatctataacggaattgattctgaaaagtttcatccgctgccggaatcagagcgtctcgcgctccggcagacttatcagatcccggcggcggcaaaatgtctggtgtatgtcggttcaggatttgaacgcaaaggactggcggcggcgattatggcgggcagccgcaatgatgcgtatctgctggtggttggtcaggataaggcagaaaaaaaatatcgtcagctggcagcatccctgggttgtgcggatcgcatccgttttgcgggtatgcagaaacagacactgccgttttatcagatgagtgacgggctgctgctgccgacgctgtatgatccgttcccgaatgtggtacccgaggcgatggcctgcgcactgccggtgatcaccagtaccacctgcggcggggcggaatttatctcacagggtgaagagggttttgtctgtgatgcgctggatattggcggtctggcagaggcggtctcacaactgccctgtgatcacctgagcagccggatgtctgaatgtgcacggcagcgggttttaccttatacaccggcggcgttatcacagcagcttatcgatctctacgggcggatcctggcataatgaaacagcatattttatttattattgacggtttaccgggcggcggcgctgaacgggtggtgctgagcctgagccacgggctggttctggccggttatgatgtcactctgttatctctcagcaatacccgcgattatgatatcccggaaggggtggattatcaggtctctgcggatacttaccgtggcttgttccaccgccagactgaaatccggcgccgtgccggaaaaatggatgctttcttatctgatctgtttgcccgcaaaggtaaaccggtactggtggtatccaatctgcataaaacggatcgtattgtggcggtatcacaggcactgaccgggctgaatgtctggttttgcctccacggcatgttttcagccagttatctcggcaataaaaccggccttcgccgccgtctgaaacaggaaaaaatccgccgggtatataacggacggaatattatcggtgtctccggtgcggtgtgccgggatctgtgtgagaacgtcggcgtgacgccgcagcagtgcgtgactatttataacccgtttgacgttgcggatattcagtgccagtcgcagaaagataacccgtatcaggggcaggattacatggttcacctcgggcgttttcatgaggtgaagcggcaggaccggttactgaccgcgtttgcgctggctaatttgccgtgcaaactgctgctggcgggacagggcagccagtctgccacacaaatactgaaaaatcaggtagctgaactggggctggaagagagagtggaatttatcggttttcagtcaaaaccgatgccgattatccgtggtgcgaaagctgtggtattaagctctgacagtgaaggactttcttctgttctgatcgaatcactgatctgcggcacaccggtggtcagtacccattgcccgggaggaatcggcgagatcatgaccggcgaactggcagcgtatctttcagatatgacaccggtgagtctggcggaaaaaatccgtctggtttatgaacacccgccggtgatcacccctgagatgtatcagaaatttgagcagcagacgattgtcagccagtactgtgatttaattcagcaagtcccgtcaacacacgcgtgaggagcacaactatggcgaaacccgcttttatcattacccttgatacggaaggggataacctctgggaatccggtccggtgatcaccacgcagaatacccagtttttaccgcgctttcaggcattgtgtgagaaatacagttttaagccagtctggctgaccaactacgaaatggcaacggatgatgcctatattgaatttgcacaggatgtgattgcccggcagaccggggagatcggcatgcatctgcacgcctggaacagcctgccgctgaaggcactgacggctgatgatgatcgcttccagccttatctgattgaataccctgatgatgtgatgaaagaaaaaattaacgtcatgacatcgctgctggaagataaattacagaccaaaatggtcagtcaccgcgcgggccgctgggcattcaatgaaaagtatgcccgtctgctggcagaatttggttatcagacggattgctctgtgacaccacgggtgaactgggcatatactccgggagcaccggcacccatcggtaagggcggcaccaattacctgaattttccgtctgaagcctattttatggatctgaatgatatccgccgtcccggggattcatcgttgttacaagtgccgatgagcgtacagttccgtcattccccgctgatgaacggcctgaaacagttttatgataagttacgcggcaaaaaacgctcgccgtccgtgaactggctgaggccgaaaggcgggaacctggcacagatgcagcaggtggtggatgcctgtctggcgcagggaaactctcacattgaatttatgctgcattcatccgaatttatgccgggcggcagcccgacattcagggatgaggcggcaattgatgcactgtatgatgatctggagcagttgtttgcgtatatcgcacagcgggcggaagggatgacgctggcggaattttatcagcgcaaactcgcacagcgtcacgcatcataatcttaacgcggcatgtgctctgccatggcggcgagcacatcatccgcactgacagaggataaatccccgtcctttgatgtcagggcaaactgccccttaccgtaaccaccgatcagccccgggtccgtcgggccgtacagggtgatattgggtttatccagtgcggccgtcaggtggctcagcccggtatcgactgaaatcaccccttccgcaccggcaatttctgccgccacatccgccagcgataatttcggcagtacatgcacatgggtgaatccttccgccagacgcagtgcccgctcctgttcatgcggtgcaccccacggcaggcggatatgcagatcagtatcagccaactgggcaaacagcgcccgccagtgtgattccggccagtgtttggcatcacgggtggtggcgtggagacagaccagatacggcacggcatccggcgataccgtacggttattcagaaaatgggcggcaatcgcgtaatcaccctgtgtctgcggtttctcatagctgagactcagagcaaaaagctgacggatccgctcaacagcatgctgtgttttgctgacagcgtgtttttcatcatagaaaaagctcgccagcggctcgcggatactgtgccggtcgtagccgtgtttgcggccgtgtgccagccgcgtaaccagcagggcacttttaatcagcccttgtgcatcaatcaccgcatcataggtctgtgactgaatagcttcgcggaactgacggcgttcatcacggatatcgcggcggaaccagtttttccgccagcggcggatagcgaccggaatgacgcgatcaacagcagagtgccagccggggatctgggcaaaaccctcttcaacaacccagtcaaaggtgagatccgggaatacctgcacggcatcggtcagcgcgggcagggtatgcagcacatcccccatcgacgaggttttgacgattaacacacggcgcatggcggggaactcttcagcaaatcatccagttctgacagaacctgctccggctgaatatcaatcaggctctgatgatagccctcatgagcatcccctttgcggactttatgataaccggtgatcaggcggataacgcgggctttctctgacagcggcggcgtgaaatccgggctgctcgggccgtataatgcgacaagcgggcgatccagcgcggcggccacatgcatcagaccggaatcgttggtgataatggcatgacaaccggcgatcagatttaccgcctgttccagagaggtttttccggccaggttcagacaattttcgcgctgctcatcactgagcatggcgaggatttcctcaccggcagcgtgatctttttctgagccgaacagcactatctgaaaatcacgctcatcaatcagtttcttcgctaattcaccatagtgataatgcggccagcgtttggccgggccaaattcagcccccggacaaaaaccgatgaccgggcggtgatcactgatattaaacgcagccatgctctcggcaatatcctcatcacgcaccaccagcttcggccacagcaggggctgcggcagagcggcggcggcagggacatccgctttatcatacgcgagggcaacataacgctgcaccatcagcggaaaagcggctttgtcgagcttccggtgatcgttgagcaggccgtaacgcatttcacccagccagccggtgcgcacagggattttcgcaaaaaacggcaccagtgccgattttaaagagttcggcagcacataagcacgatcatacttattatcacgcagggaatgaccgagacgacggcgctcaccgagtgccagtgcaccgtggccgatcggcatagcgacagcctcatccacttccggcatttttgccagcagcggacggcaccatgcgggtgccatcacatcaatcgttgcctgcggataacgtgttttcagggtacggtaaaggctttgtgacatcatcatgtcaccgacccacgacggcccgatcaccagaattttcatgtgcgtttaattaattcccctgatttaaccaagtcatatattcacggacaccttcggcgaccgttttgaactcacccgggtaaccggctgcacgcagattggtcaggtcagcctgggtatacgcctgatagcggcctttcagtttttccgggaacgggatgtaatcgagcgcgcactggcgttcgctgtggaaaccggtcacggcatcggcgacagcctggaaagattccgcgcggccggtaccgcagttgaaaataccggatttggcatttttccagaaccacagatttacatccgccacatcacccacatagatgaaatcgcgcaggaagttttcactgccagagaataatttcgggttttcgccgtttaaaatctgattattcagatggaaagcgacactcgccatgctgcctttatggccttcacgcgggccgtagacgttgaaataacggaaaccgcagatctgggactctgcttccggcagtatttcacggacatactgatcaaacaggaacttggagtaaccatacacattcaatggtttttcgtactgccgatcttcaataaagttatcactacgcccgccgtaagtggcggcagaagaggcatacaggaacgggatctgacgatccagacaataatgcagcagttctttggagtactgatagttattatccatcatgtacttgccgtcccactcggtggtggatgagcaggcaccttcatggaatacagcctcgacatccccgaaatcatccccggccacaataccggcgataaaatcttctttatccatgtaatcggcgatattcagatcgaccagattgacaaatttggtgccgtctttcaggttatccacgactaaaatatcagtgtaaccgtcatcattcagtgcttttacaatattgctgccgataaatccggcaccgccggtgacaataatcatcacgcattcctctgttcggttcattcaagaaaatgaaaaaatcactgcttttatcatagcattgaagggtggcagacgtggatgaaaaaatctgtctgttattatcagcggtgtcatctgattgttttccgtcggtaatctgttatacaggaaacattatttatgatgtgccctgtctgcgggctttaaaggaacagatatgaacacgaccaccgttttccggctgccgctgttatttgtactggcttatgtgcttatcctgggcggctcgctggtcctggtttcttatccggcggtcagtgtccgctctcctgacttaacattagcagcgtatttatcgcggatattttctttccagctgattcagatgaccggtattttcacactgacatcactccttttttattataaccggataacacaactgaaccggaaaacggtactggcggttatcggcctgtcgatatttctgtatacggtaaacagtattctcggtggctttaaggcggcattggttggtttgctggtgaatcaggtcattgctgagaagattgagtttgccgatttaatcctgatggtaaaaaccaccgatatttttctgtatctgctctcatttgtattactcgctgtcgcgacccgtctggccgcaaaatattatctgaaaaccagccaaccggcagtgattccggacggcgcattaccggatatttacgccctgttgttcagcaccgggatggtgtatctgatgctgatgacgacatcatttatgatggctgtgctgtcccggtatcagcccggaatgcagccggaactgatctctgaaaatgtctataccactgcggcaggcctgctgatttcgtgcgggattatttttatttttgtccgcagccagtttccgctgaccggcggtgtactgcggatcaggccgctggtgaaatctgttctgctcagtacggtattcggccttctggccacggcggtcatctcggccggtactgtttttatggtattaatcagtgacagcttccggaatttcggggaaacggagttatggattgtgacgctggtctgcgccgcactgacactgtggatctgccgcgcggttatcggtgtgatgttccgccggtaacgggctgatataaaaggagtgactcatgcagggagaatcatccgcggataacacgtcatttttccgcctgccgctgttatttgtgctggcctggctgggggcaggatacctctgggtctatgttattctgccgaaattactgacggggtatgtcttttattacctctggccgctgattcagcttaacagcatcacggagtggattgtttacagcccgctgttctttgtggtcacgtcatttgttttcctgcagcggcatttcagccgggcagattcgggggcggttatccgcgtcattattatggcggttatctgttttgtcctgattgaagccgccggttttctgcagctgatgatgacattacccggtatggaaaagaggccgcattttgcccctccgccggtactgatgatgacattgcactggtttttaaaactgctgctggcggttgccgttgtatggctgaccgcgtggctgatgaccagaacgtgcagtaaaaatacccccgcaccccggctgacaccgcagaatcaccgtctggtgaacagtgtgttactggtgataccgatgctggtcatttattttctgacgtcatttctgatttttatgaccgcagcggacagctcgtcccgtgaggggatcatacagtttgtgttgattctgtttacctccggattcacggatttattgctgcaactgctgattacggcctctgttctgattgcgatactgtacagtgccttcggatactgcggggaacagctgcgggtaaaacgactgttgctgacagccgtgaccggtgcactggtgatcggtctggtgtattacgggctgatttttatctcgctttattttaccggcggtaatgcttacggtaacccggacgcaacggatggctcagtaaccgcttcccgttatctgagccttgtgattgccgggtttattctgcggataatggtaaaaaaactgttccgggaaataccggctacggagaaaaagccggattaaaaggattgtgcccatgaaggattcagtctctgtaaacgcctcatttttccgtctgccggttttatttgtcgctgtgtttttcgcggctgatatggcgttattttttattccggagtttatggccaaaacagcggcacctctgttcagagacagagtcttgtggcaactgaacagagtggtggctcacctgctcctgctcttcccggtgatttccctgattttttaccggcagtgtctgaaccgggtgtccgggaaaacccttctttttgtgataatcgccgcgcttctttatattgccggaaaaacagcggcagatatcccggtaatatcctgcatatatgatcttaaaaagtcgggaattctgactaataacgatcagatattctggtttctctgggcgggaagatgcttgtcttatattttactgctttgcggattatcgctgctgatttattgtcttcgccggtttttaaccggagacgctccgcgctttgtgatgacggcacacaatacccgccgggtttatacggtactgacggccgccggaatgacattcttattacagatgatgccgctgtttatgcaactgacagacatcagccgggaaatgacggttccggtgcgcgataacgccggcagtatgattccggggtttatcattatcgcggttattgccgttttcacgttcaggccggtatttactttttacggagaaaaactgcatacaggccggttgcttattctgatcctgctgaacagtattattatgttcagcagtacattgatactgatgatgttctggcttgtcccggtgctggaatcagccatgacatccggtgatacacagatcatactgttggccgggctggttatctcggtcctgctatcgctgagtctctgccgccggttcagccggtattttttccgcggccttcaggtcagtactgactgactcttttaccgcaggcggcgcggtatccggctgcggcagcgccatgcggatggataacaggacttccgtcactttgccgttcatctgatctctcaggagtgcttccgtcagcagattgatatagttggtgtagaactctccgccgacctctgctttaccctcacactgctctgtcattggtgtcagccacggtttttccttcaccaccggtttgaccggcacgaccggtttctccggctgcggtttcacggcagatggtttaccggcatgcgtcagcatatatcccggcgataccagctcaatatccggcggcagttgcgggatgagtttatgcagtgcgcggaccgtcgacggatgcgggtgcccgatagcgatcaccgatccctgtttgcgtgccagagcaacagcccggttcagttgcttacgcgtctcttcctctgtctgcacattatccagaaaaacctggcggcgcagtacgcggaccggtgttccctgtgcggcctgtgtcgctttggtgctgccgatggtcacactgtcgaggaaataaaaaccggagccggagagagacgccatcacatgctgcatagcggtcagatcagacgtcatcgcgctgcccatatggttattcatgccggtggcatacggcacccgggcaatcgcggctttaatcagggtatcaatttctgcggcactcatggacgggcgcagggtatcgcgctccagcggctgtttgctgatcggtgccatcggcatatggataagaatttcacggccctggcggtgtgctttctccgccatttctttgccgaacggggagttcggcaggatagcaattgagacctgcggcggcagttccaggatgcggttatcatcctgtttgcggtaaccgaaatcatcgatcacaatggcgagctgcgctgcagcggcagaaaacgttatcagtgacgaagtgataaaaagtaacgaagtcagtaagatatttttggttttctgccggtaagtcactgtgtgctatctccccagccagggctgcgggttaaccgtccgtccctggcgccggatttcaaaatagaggcccggtctttcctgacccccgctgctgcccaccagtgcaatcggctgaccagctttcacctgatcacccacattcaccagtgcgctctggttatagccgtaaaggctcatatcccctttaccgtgctcgaccaccaccatcagaccataaccctgcagccagtctgccagcaggacccggccatccgccaccgcttttacctgtgtgccttccggcgcgccgatcaccatgcctttccagcgcagttcaccggagatactgtcaccgaaccggtgcagcagcggaccacggaccggccagatagcctgaccggccggacggcccagtcccccggtgcgggacatcagcgagcgctcgtcctgggtcggggtataggtggagccttttttcttcgcctgagcctgtttctcgcggatacgggcggcttcacgggcttcgcgttccgcacgggctttagcctcacgttccgctttggctattttgttgcgcagctggctttcgttttcccgcatcaccagcaaatctttctgatcagctttcagtgagcgttccagctcagtcagcgtggatttccgtgcggtctgggcgctatcaagttttttcttttcagtctgctgtttgccgagcaggcttttatgctctgcacgtttttgctgctcggtctggcggcgggcgtgcaactgctgagtggtttcttccagctctgcaatggttttttcccgcgcggcaccgatataggtgtaataggcgaggatccgctcatcgcgctggccttcctcacccttgaaaatcagttcaataccctgatgacgcccctggcggaatgcggcatccagctgttttgacagcagcgcccgctgggctttctgcttcgcatccagttgttttatttcagcgctgagagtggtgatttcactgtcgagctgtttcagggttttctgcgtggaatagagttcacggccggcagcagcgatatccttttcctgatttttcagctgggttaacagatttgcgcgttttccctgctgctctttgacgctcttttctttctccgcgatattcagctggagatttttcagctcattcttgctggcatcggcggtggttgtattggcggcagaaacagcaaaagagaccggcaacagcagagctgccagtaatgtgcggacaccgggggacacccggcgggaatgcgtgcggaaaacgtgcttatgcgccaatttatctgaccctgccgttacgccaaagaaacgatcgtatttaactattctaaactgcaattattccatgccatttaaagcgttaccagtcctgttatccgggatttacacttcgggacaatccggcggcggagattcaccgcgaatttgttgcgtttgttttttaccttagccgtgaatcaatggtaaattaacccctctgtctgtcggaaaaatgaattttcgcggcatgcgccgcaaaattacgatgaaaacagccataacccgggcaagaccggctgtatttgaaccggcacacaggtatacttctgccctttgatctttgttattaaccaacgggagttattgtcccccatgctgcaagaaattatgccatttgtcagtaagcaccctattatcagccttgtatgggtcgcattactgatctcagtcatcgtactgactgtcaaaggactgttttcaaaagtgaaaacaattccgcgttctaccgctatcgcactgattaataaagaagaagcgattgtcgtggatacccgtacccgggacgatttccgccgtggtcatatcattgacgcggtcaatctgacgccgtcagaaattaaagacaacaacctcggtgaagtggaaaaacacaaaaaccgtcctgttatcctggtttccgccaacggtatggagctggtcaaaccggcggaaagcctgctcaaagccggttttgaacgtgtatttgtgctgaaagacggtctctccggctggaccggtgataacttaccgctttcccgcagcaaaaagtaatccggcaaaggatgattggaacatcccctttgtaactcacactctttatatggatatcaaaaggtaacactatgtcagaacaacaaaacacagaaatgtctttcaacattcagcgcgtttacaccaaagatatttcttttgaagcgccgaatgcacctgccgttttccagcaggagtggcagccggaagtgaaaatggatctggataccggttcaaccaaactggctgatgacgtttatgaaatcgttctgcgcgtcactgtgacagcgactatgggcgaagaaaccgcattcctgtgtgaagttcagcaggccggtattttcaccatcggtggtctggaaggtactcagctggcacactgcctgggtgcatactgcccgaatatcctgttcccgtatgcccgtgagtgcatcgcaggcctggtcggccgcggtacattccctcagctgaacctggcaccggttaacttcgatgcactgttcatgaactatctgcagcagcaggaacaacagcaggctgcgcaggaaggtacacaggaagcataatgacagacgcttctatgactgtactcggtgccggttcatacggcaccgctttagcgatcacactggcccgtaacgggcaccgtgtggtgctgtgggggcatgacccggaacatatccgtcagcttgaggccgatcgtgccaaccaggcatttctgccggatgtcccgttcccggataccctgatccctgaagcctcccttgaaaaagccctcgcggccagccgtaatattctgctggtggtgccgagccatgtgttcggggacgtgcttaaacgtgtcaaaccgctgctgcggcctgatgcccggattatctgggcgaccaaaggtctggaagcggaaaccgggcgtctgctgggtgaagtggtgcgtgaagttctcggggataaaattccgctggctatgatttccggtccctcttttgccaaagaactggctgccggcctgccgaccgctattgctgtcgcggcgacagaacctgcctttgcagatgaggttcagcagcttttccactgcggcaaaagcttccgcgtctataaaaacccggattttatcgggatccagctcggcggtgccgtgaaaaacgtcattgcgattggggcggggatctctgacggaatggggtttggtgccaatgcgcgaaccgcgcttatcacccgcggcttggcggaaatgacccgcctgggagtggcattaggcgcagatccgtctacctttatgggtatggccggcctgggtgacctcgtgctgacctgtactgacaaccagtcccgtaaccgccgtttcggcatgatgatggggcagggcgtgagtgtggatgaagcgcaggagcgcatcggtcaggtggtggaaggataccgtaataccaaagaagttcgtgcgctggcagagcgtgcaggcgttgaaatgcctatcaccgagcaaatctatcaaatactctactgcaataaagatgtgctcgaagctgcccgtgccctgttggggcgtgccaccaaagaagaaggtgagcacttttaagcccgttattttatccgaagtctgtgaggtaattatgtcctacgaagaactggaagaggtctggagctatataaagcaggaagcgcgggactttgctgattgtgagccgatgctggccagttttttccatgcgacattactcaagcatgaaaatctgggcagtgcgctcagttttatgctggccaacaaactggcaaccccgaccatgccggcaatttctgtccgtgaagttgtggaagaggcgtatcacaatgatccgcagatgattaaatctgctgcaatggatatcaaagccgtccgcctgcgggatccggcagtggataaatactccacgccgctgctctacctgaaaggtttccacgccttacaggcttaccgcatcgccaactggctgtggaaccagaaccgccgcgcgctggcaacctaccttcagaaccaggtttccgtgacatttggtgtggatatccacccggccgcaaaaatcggccacggtattatgtttgaccacgcaaccggcattgtcatcggcgaaaccgcggtggtggaaaatgatgtctctatcctgcaatctgtcaccctcggcggtaccggtaaaaccggcggcgaccgccatccgaaagtccgcgaaggcgtgatgatcggtgcaggtgcaaaaatcctcggcaatatcgaaatcggacgcggtgccaaaatcggcgcaggttccgtagttctgcacccggtgccggcacataccaccgtcgcaggtgtaccggcaaagatagtcggtaaaccggggtgtgaaaaaccctctctggatatggatcagcactttaacgggtgcgaggggatttagtttcctgattcagcagccaaaagtaaaaaagacagccaaggctgtcttttttgtgactgaaatacagaacacattaatcccgtaataacgcccctgcataatccagctgccgccaggcttcaaatacaattactgcaacggtattggataaattcatactgcggctgtccggcagcatcggcacgcggattttttgatccaccggcatattatccagcacataaggcggcaacccacgagtctccggcccgaacagcagataatcaccggcctgatagctgacattactgtgacgaggtgtgcccttagtggtcagtgcaaacacccggttaccggttggcgactgcgcattatcagaactcagcccctcgctgtcgagaaaggcgtaataatcatgatgatgtttgatatccgcaaactcactgtaatccagcccggcccggcgcagacgcttatcatcccaggtaaaccccagcggatggataagatgcagccgaaagccggtattggcacatagccggattatattgccggtgtttggtggtatttcaggttcgaacaggacgatgttgagcatatttttactgatagtgaaaagcggtcagagaccgcttcaggaataatgccaactattttccccgtatatcaatggcggggtcaagttcagcaggaaggtttttgattttttcttgcagtccgtaatcatcaggatcatcctggcaatcaaacaagctgtagtcggactgaagatgttcatttttaattcccagccatcctgcgatgccattagtaaaattcagcccggatttaaatgatttgcaggccttatgctcagttgcatcagaattggtcataaataagggaatctcataatgtaatttacttacctggctattatttaaatatatttccccatcaatttcattatgaattaatccatggtcagaaaaataaatcatagaatatgttgatccattttttttattttcctcatttaaaagatcatgaatatttttcagaaaaacatctgttttttggattgatgagatatagcaattaatataattatacttttcattattgacagatgtaattaatttataatcttttatgcggtcacaggcattaggatgagacccataaaggtgtactactattagttttttcttacgtggagccgaatcaatagattttttaatataattaagaagagagaaatcacttgtattatcagagttatagtctttgtactttaaaaaattcttatgctgactattttttgcaatagctgtgattggagtgtcatatgttccaatataaccttggtttgatatccaataggtttcaatcccggctgagttagccagatcaataaaactttttgtataatcagcatcccatgattttttatctgggtttgtaagcatcaagcgtaaagatgctacagtatttgagcctccggatgttaatccatcaactaataacccatttacattgctgatgaatggggtattgtttatcggatatccaaatccatggtgatagtcttttctggcgctttcaccgataaccagaacatagttatcataagtggagctatctgtcagaatagatttaccccaagtgcttcctacattagtatagtttagttttactaattcattttttactttctgagcagaattaattatttctttgaagaaagagaacggtgattgattcaccaatgaaaagaaaatgaagatacataaaatggttttgtttttataaaaatcaatatgatatcttactgttaaaaacctaaataacaataacccgaaaataataaaaaagggataaacgtaattaaataaaggaatttgagaaaaaaattccttactttcaagcagatcagtagcaaaaatagaagaaatatattggtagttaggcgccccaaagattaaacctattggagagtaaagggaatagataattgtggcagggaaaatgaaaaaccaaaatgcttttttagaggagttaaagataataacaagaatacttaacaggaaaacattatcatatgatgaatcagaaccagtaccacgcaacatcaattttgtggtaagtaagatagtaattaaactaagtgatgagaaaattagtttttttattaaaggtctattaatatacattttgcgtaaattatgttatgcaggtaaaaatacccatcccaaggttaaggtgagtaattgtaaactatttacgcgtattatgcttaagtacgaattaaaaatacaaataataagtgtatcatgctatatgatttatcttatttgttcatttttggaaataaatagcgtgacttcaagctttttatcgaaagatcctgctgaattattagctgtttattggatttttatatatcttcctcatagaagcagaactgataacttcagtgagaaaaattattatcagttcttggccaactaagttaaaattttttcatctttttggttttttgaactcataaagaacagtattagcaattccctgttccagacttactggggcaacaaatccggtctcagcaataaaatcagatttaaactgagtacgggcacagaattttttaatgcggatactgcttatcgggaattccttaccagtcacttttgccagaatgtcaaagcagtaaccacccaacagaccaacactatatggtacgtggatattagacttatgcttatccatagctttgcagattatatctgtaagatcttccatattaaaatcaggtttatcgacatagttaaatacatggcgacctgaattaaagttagtagcaaattttaagaatgcggcaatgttttcaacataagccattgatttttggtttttaccgccaccaatcatcaggaagcgaccggatgcaatctggcggaataaattatagacattaccacggttattttcaccaaataccacagttgggcggattgtcaccagtgtgcgatctgtatcttctgcctgccaggcatcatagacatgttcggcagctaatttggatttaccgtaatcattgaatggctcatattgaccatcttcaccggtttctttttcaacaaaaccgtaaacagcaacagaggatgtaaaaacgatatgtttgattccaagctgagctgcgacatcacatacatgcttagcaccatcgacatttacatcatagtaaagactgataggatgcacattatctttgtgctttgcagccaaattgataataacatcggaacccgttaatggttcaaccagagattccggtttagtgacatccccaaattcccaatgatcaggaaatgcagcacttttctcaatatcaacgattttgaacgggatattgtctttttgtaattgtgtggacaggcgagtgccaatgaagcctgagccaccgataattgtaagcatgaataccttctattttcttaattttttataaataacattgagaagtgaagtgggtaaaattcggggaatactacgcataaaaaatattatagtcgcagataatggagaatcgattttagattttatttttagcttcgcaagttgaaattcactttttatatatgttaaacctctgcggcgagaaatcatagaagagccagctcggacattaaccaggatatcttgcaaattatgtgttttatagcctgcagcgatcattctgatccaaagattatagtcttccatatataaatgatgttggtatccaccaaccgctaagactgcatttttcttgaaagcgaccgtcatatgattaaatggattacgttttttagcgagtttaattatgtcattgtgctcacaggcaacattccgctgaccgtttgatatcaccatatcgtcattgaattcttcaatattcccaccgataagggaaatatcaggttcattattgataaggttaatctggttttcaaagcggtcaggcaaacagatatcatcagtgtccatccgaaatatccattcattcgtacaatgttttaatccctcatttaaagcattccctaatccagagttatgtaatatagatattattttaaaaaaattaggatgccttttctgccaatactctagaacattatctaaatcaggtgatagaggcccatcttttacaacaacaatttcctgaggaaggatgctattattgaatatgctttctaagctactatgaaagaaaatactattctctttataatagacagagatcaggatggagaaattcatttggtgtgtctcgacaacaatcggtgattaaggattttatatagtaatggcgatgctatgttgaataaaattattaatggatatagcctgtttattcttcttttcaatattcttgtattatagaatagataatctaatgtttctttattttctaaattaaacttcaagcttagctttattagatagaaaaaagttctttgctggaaataaataagatcactgaatattttttttgatttgataccatcaaattgaaataaagaattatatagcgaaagtacatttatcttattttttgtaactacagactgtacagttcccgactggctcagattatagttaaataaaatatcaggtatataacaaaccttattttttgaatgtatcagagattgtagtataaaaaagatatcttcaccaaaactgtattcagttgggaattgtattttgttttctaaaataaagctatgttttatacagacagaacaaatacataaatgtaatttttgatgtaaaaataaatgcataactgtgtgggatggcataatagtagctgtatgcatttttttattcatagaggttttattaatactatagttaaaagtatatatatcactattagtatttttttctatatggctatctagtagtgagaatatattttcactaaaataatcatcagcatctaaaaaaagtatatattctccagatgataatgagatccctaaatttctactggcagaaacacctctgttaggctgagatatataaaggaaaccttgttcagaagaaagaatatcatctgtcttatctgtagagccatcattgataatgatatattcgatatcgctacggtttttttttgttttttcaataaaggttaatatatcataacaatgatcttcaatattatatgcagggataatgatagagtatttcatattattataactccaatgaattgtaatctatcactttagatcctgcttcaatattcattatgtgactatcgatatgatcattaaatagatttctatcttttgttttaggggtgtaaatatcacttaaagttagctgtgtatctaaaaaatagcttccatcaatatgctctgtggtgtgtttttttaagttatttattttatcaccaagacgactgactgctgtatcattgagccaaaaaaatagaggtatactgtagttagctttgattcttttttttccataatatacagattgattatcttcaagtatggctatcccgtggtcagatataaatgaaagtgtaacatcgccatctatttttttgaggttatcaataatacttgaaactacatagtctgtataaacaatactattatcataagtattggttaatatttctttgtcttttaaagttggagatttgtattctgtagatgtataggatggtttgaatatttcaaaattatctgggtacctatattgaaaattaaaatgactgccaactaatttatagataattaattttttttcagaattatcatttttaattatattatcaattatatcgattcctatttcatcttttgttgccgcaaaagttgagcctttatctctttgtatatattgatcagcttcattaacaatctgatttattgccccatcacctttctggatttttggcatataggaaatatagaatgttttataaccagcttctttataagctgaaattagagacttttcaggccacagttcatttaggttatcttgcgtcagaatttttctggttaaaatcaatggagtggatgataatgtatgagaaccattggatattgtatttgtaaaatttatcagattttgtttttttaataagggtgtcgtatctcggttataaccattaataccgaagtgatctcctctcgtagtttcacctaatataataactacagtactttttcctttactatcagtccttgcattccatgtgaatttttttatattttcaatagatgacttattttcttttatgagagctatactctctacaacagattggactgatttttttatagcgagaccattgtaagagataaaataaatcatcaaaggaacagatataaatggtgtgataacatttatttttttattcttacatgataatggagaaaataagaataatatggataataatccggttaatgggaataattgtcttactgtaatattttcaaaaaaagaagatgcttcatctatattagtatccataagtatggataaagattctacaattacggaatccagagggaatcccatatttttaaaaacagagagatatatggccgagtatactgatactaataatattattaatacgccgaatatactagtgtagcgactgaatagtaatgctaatatggatgttgatgcaattataattaataatgaaaaatggccttctccaatttgagttattttatataccgaaagtaagtatgctgtgcttatcaggaaaaaaatagctaactttaagtaggttaatttattaattttcatagttcaactttttaattatttcggttttgatatcttgctttttattatgaggctgaaaaaatatttcttttattttttcgctattactaaattcagcattagtattaatcttagataagaataatactaactcatcaaatgtataaaccttatctcctgatgtgaattcatcatatggatatgcgaggtcacgacatgttttactatataaggctatatcaaatggatacaataatgttttataattttcttttaataagtaatcatagtatattgatgagtaatcagttattaatagatttgtataatataatatgggatatggatctatgtcatttttaataaaaactatgttactataattcttattctcttttaactctgtattagggtggagttttattatgaatagtgaatttgttgccagcagaacgtcatttaatttatgatagttaggaattgctttttccatgaagttatcatcattatctcgccatgtgggcatgtataatattaaattatcgaatatgcttgctttctctaatagcctgaattcataagaaagttcaaaactctttatgttatttataacatcatcgcttttcattttaaatatagaacatctggggtagctactggtaattatattagataaagggatattaaaagcttttgagaagtgattgttcataaattcagatgttgataaaaaaatatctggtttttctcggtatggggaataggcgattttatcaattatatgagaggagtgatatatttttctcataacaggcgtatcagagctatagtttatatttttgatccccaccccatgccataaataaactaataatgtatttcctgatgtccagtacgataggtcatattgactgccatatgaagtaatatatacttttgcggtcaaaagataatacaaccctctaattgagtatttatattcagatttatatccattcgattttaatagatggcttaatttcttatttggagttatccatatcagattaatatcactattattgttttctatataaaagtttatgaagaaatattttgaattacatgaaaaatttttctttgaaccaatgacccagtttttattatttctgggtgttaaccttgagatgaaatataaaggataaaataaaaataaatatgttaataacttagttatttttctcatttttggattgcctgacattcgagtcttgttatttttaaactattatcatcttctttatttagtattgagacatatggagaaatccgagggccgtcacattggtcagaaggtgagctaattattgttttttcaaaaattaaaagttggcttattataaaaaataatgtcagtaatttatagaatcgtatcttgctattaactgatattatatatatagaaaacatatacgaacataagaatactttctctagccttgagaatatttctatagttgatgagaaaaaaatacagactaaagaaatgaaagcaatgttaataaaaataacatcacgttcattttttaataatatttcttttgcaaagaataatattgcccataatggtaatgagcgaagtattattcctaatccagtattaatctcaggagcgctaatgaataaatccaatttcaggtactgttcatatcctaatgctggaattaataaattcattaccagggaaagtatttctttcttaaaatatagaattaaaaataaaagagagaaaattaatagtctgtggttgctataagttctctttataaactgaaacgataagaatggaagtgctaaatataataatgaagaaatgtgtattgttgatgcaataataattaatgatatatagtagtaaatattagtatttcttctataattcattatggcatatatgcatatagataatgccagagatgatcttagcaagaaaaaagatacgaaataagttgaagttataaatataaataggtatgaaactttatttttatctgggagagataaaaatataaaaaagtatgtaacaaaagatataaatgcaaataatgcttctacaggtaaagatagaaatataaataaattatttattaatttatagccatgttcaatatgatttagatctgagctttttaatgccgcaaatatatcaacatatgctctataatcaacgcctatattatatcgtagtgcagcaggaataaagataaaggaaaatgaaagaataagaaataatatcttgtaattatttttttttattttctcactgagataaatgaaaagacaacttcctgtcagggttaaattatataaaatatagctaaataacatttgtttttctatattctctggtgaagtaataaatacgaatgagagtcattaaactgtcacataaaagatataaaatagcaacgactagagctgttatctcaatatttataaaatataaggtgccaaacattattaattgtaaaagaccaccgcagatagtactaatatttgcaatgcgtgcttttcctaatggaatcaatgcagggtaaccgaagtgtattccaacaatgctaactattagtgttatcatgaatatacacagaactgtatatgcctctgaaaatccgtttccaaatatcagagaaataatactatcaccgaaaaatataccaattagactacctatacatgttgctgaaactgacagcagtgtaattttaaagaatagcttaaagttatgggttctggccatataaggtatcagtggtgttgataccgtagtcatagtataaacaccagccttatacaattgttcggcaacgccgtatatagcgacttggtgtaagtttccggagagtattcccagaaaaaagctaccccccatggaatatatcgatgaccctaatcgagatataaaaaattcaaatgattcttttgcaatcaatagagtgttacgtgactggtcataaataattttatattttttacttatatatatatattgtataatagttgatattattgattgcagagctaatagcgtgaagagtatattaatatcactctttgagtgaatgaatagaaaaatacatataaatgagactaattttgttgaaataattactctgctataaatatataatttttctatcccttggaataaccacattaggttataggcattaccaaatatagctgttagtaatagagttatttgcaggtaagaataatagtttagtgaaaataatatcggtattaaagataatatacatatagcatacaaaactgtttttattaaaatagtatgatatagaaatattccaatgcttttcttgctattttcaccttctgctattctttttgatattgaaaggtcaaagccatatgctgttattatattgtataaattaatgatagagatagaaaagatatataagccaagtaattcaccaccaagaactcggcttagatatggtaattgaagcagagggatcaggtagctgattacctgagtccctaataaatttaagatattttttttgaggctcattactttagattaaatcattttttatactgtatatttgtcctgtatgctcaaatgtcatagcagctaaagtaaattctgcaactgcttcagaagataacagcgtttctggtggttcaattccaaagtttgaacgtctcattggtgtatctgttcgttccgggttaatgcagtttatcttaatatcgagaggcagccactcttcagacattgcttgcgtgaagttaacaacagctgcttttgttgatgaataaatagaatagttagctcttcccctggtaaaagaactggaagtaaagtgaatgatcatacctttactttctttgagatacggataagatgccagtgttgtatttataacacccgtatagttaatattgatgctatccaatatttcttctgtctgaagtgatattagtggttttctaattaataggcctgcagtattaataatgaaatctatttttccttccttttcttttacatcttttaagaagttatcgatagaatctttattagttatgtcaacattatttaagtttctactacacgcataaactttcatgttataattagtacataaaacagataagctttcaccaataccactactaccaccaataatgacagcaactttattttttagtttatctgaagctaattttttgtcacgctgatttctgttgttcaacccatctttaataatattatctgcaaggtataaatcttgagggtgagttaacttgaaattagattcttctcctgccacagtatatattttttcatcagggagatatttttttactatgccgcaatcatcagatgccgctttactcgggtcattaaggaattttttatatgcatctgatagagtgaattttttaaacgcttgtggtgtttgtccccgctttaatttacgtctgtcaggtatatttgcaatgaaattattttctacttctacaatggtatcaacagcatcaacaaccacatcaacggcattatatgttaataacgcagagatacaatcatttatgatacgctcactgacaaaaggtcttacagcatcgtgaataatgaggttacaattttcgtcaggtgtagcagtaagtgcagcccaggttgaatcatatctttctttgccaccagaaataactttatttatttttttaaattcatttttcgtagcaatttcatagataaaatcaatatattcatctttacttacaataataatttcatcaattgcactacaattctcgaaagcttcaatagtatattgaattacaggtttaccggctaattttacaaattgttttggtatgcgtgattcaaaacgggatcctgtaccagatgctaatattactgcaatattcttgggcatgagtaaagtatctcttcgctttttgtagggaattataaataaccatagctaccgcactgggttaccgctcccagagtgcgctattgcgagtttatcttactgattctattgaagaatcgagtcagtaagagttgtggtgtgttacagagggctgatttttcaataagttggtaagtgatttacaccaaatcaatcagcgctgtttatatttgctgtcaaaggctagtccgattacccggacaggtcaagcatgataacactcgcgagtctttcattaaacgaactttatccggtttaatgtggcaatctttttctttaaatctgtcttttttgtgttaacagcagaaaaactgttactttaagccagagctttggattattactttttctaatcggtacatgcacaatcacagcagaaatgttttattacatcatattgatgacaatggtaattcctgcttaagaaggaatagttaccggggcctgattgccccggtaactatggagagcctcagcgcgggtgcagcggcagccagatttccaggcgaagtccgccgagcgggctgtcgttggcggtgactttaccgttatgctggctgatagcggtgctgacaatcgcgagtcccagcccggtaccgccggattcgcggtcgcgggcttcgtcagtgcggtagaacgggcggaagatatgttcgcgatcttccgggctgacacccgggccatcatcatccactacaatgctgatgcctttggtgtcagcactgaatgcgacctgaatatgctggtttgagtaacgcagtgcgttacggacaatattctcaaatgcgctgccgagtgcggacgggttgcagtaaattgtccacgggcccggtggtgaggtgatttccagcgttttatggcgctgctctgcctcaaattttgcgttgtcgagaatatcatcccacagctcattggccttgatgttctggcgcagcagctcatttttgtgctggctgcgggagagaacaagcaggtcattgatcatgccgtcgaggcggtgggtctctgtctcgatgcgttccagttctttactctcaccgtggcggcggcgcaatagcgccgtagccagctgaagtcgggtaagcggggtgcgcagctcgtgggagatatcggaaatcagccgctgctgtgcgttcaccatgcgttcaagggcactgatcatctggttaaagctgttccccgccgcaaggaattcctgcgggccggcttccagttccggatgctggcgcaagttacccttggcaacatcatccgccgcgtttttcagttttcgtgctggttttgccaggctccacgccagccagagcagcagcggggtgctgatcagcatggtggctgccagtaacaggaaagggcggtcgatcaggaagttgataaaatcagactgtgcggtgttcgccgggcggatcagataaagctgatagcggtcttcgccgtcccggacttcaaacggcccgagcagctcaatgcggccgtaacgtttctttttcgggttgtcagtgttatccgactggcccataaagttacggatgacctgggaatcattgcggataggcccgatgatccggccttcggtggtgacaataatcaggcgcttgtccggcggcgtccattttaccagggcgcgggtcagccgccgccaccagagcaggtcattcgccggatcctgtgcgagatcagattcaatatgttgctgcagcatcatcccctgccggtactcggcctcctggagcggcatcagttgccgggagtcgagcttcggcaccatcagcaccagtaacagcaccagtgccagggtaaaccagaagatggcgaaaatccgcgccgtcaggctgcttatcatgttgcagataccattaagtaaccacggccgcgtaaggttttaaaccacggcaggccgtctgtgcgctccggtaatttgcggcgcaggttggaaatgtgcatatcaatggcgcggtcaaacggcgtcaggcgtttgcccagcacttcctggcttaagtgttcacggctgaccacctggccgaggtgctgtgccagcaggtaaagcagagtgaactcggttccggtcagatccagcacttcgtcaccgaagctggcttcctggcggcccgggttgagctggagtttatccaccatcaccacggaagagttactgctgttgtcgctctgctgctgttgctcactccagttggagcggcgcagaatcgcgcgtatacgcgccaccagctcgcgatcgttaaacggcttcggcagatagtcgtccgcacccagttcgagccccagaacacggtctaggtcactgccgcgtgcggtcagcataatcaccggagtctggtagttctggcgcagttctttcagggtttcaatcccgtttttgcgcggcatcatgatgtcgagcaataacaagtctatggaatcgtcaaggagggtcagtgcctgctcgccgtcatgtgcaatgacaacgttgaacccttccatatcgagtaattcttttaacagcgaggttaattcgcggtcatcatcaacaagcagtattttattcattattcacgtcctccacgtgcaaaatacgacaacaaacgtttctattccatgactttacgttcttttacatgctctgacgcatgtttgcagccgggtgcgtatagttaattccaacgggtcaggtgacgcagactcagaagtttaaggagttactatgggtaagatagcaacaatcactttagcgtcaatgtttgtgatgcaaagtgcgcccggactggcgcaggattcagaaagtgatggctgcgttaccccggtgcagagtcacagtcagtataaaggtataacgacatcagggggagatggttatacctctatgttgaccggtatccggttaacggaagaacaacggatgcagttgcgggatctgatgcacaattaccgcgaccagttacggaatgtccgtaaccttgcagaagatgatattgcgctgtatgagctggttaaggccgaaaagtttgatgaaacggcggtccgtaatcagcttgaaaaggagatgcgcaagcggctggattaccaggttgagatgatacgggttcaccatcagatgtatcagttactcaacccggagcagaaaatgcagctggatgctaattttgagccggagagtattcatacctcatctgcctcctccgcgcagaatatgccggaatgaatttgtcagagtagtgaagtcagtagagtcgttaagtagcacccaagaagtttttccttgccatagacaccatccctgtcttttacagcccctcacgaggggcttttttttgcctgttttttggcaccggagattctgcaggcaaaaaaaagcggccttgcggccgccgtaactgaatcacaacgagaaattaaaagttgtagcgcacgccgatattgccgtgcagcggcgattctgtcttgtcgcctttgcggtaatcgatttccgcatacgcctgaacctgcggcgtgaaacggacagttaacccgccgccggctttcaggctgtcgccggagaaatcggtgtcaaacgtattgcgctggttaatggtcacatcattattgctgataaactcatgctgccaggccagtgtggcgtaaggggtgatgaccacctgattgttcagggtgaaatctttacctgcatgcaggccgagttcggattgcagagactgctgtgcgtccagttttgcctgcatattattgttcaggtgaactgatttgctgtccgctcgcatatagctcaggcgggcatacggctcggcccagaaggcttccggcaggtcaaaggagtaaccggcctctgcggatgcgccgtaagcattctgtgaataatccccgcggatgctgctgcggttggtggaaaccgcacgtaactcattattgaaatggttatatttcagcacaccatcgagataccagccgttatctgagaaccaggtggcataaccaccggcagtgatactgtcgatgctgctttcgccaccgcgctgatgcttcagtttgacatcgttatagccggtaaagacgccgagccataatttaccgttttccagcgggacagatttatccgcacccagctcaaaaccggcctggttcagtttaaagtgtgtgtgtccggtgcctgcacgggttctgtcgccggtcagacgcacccagacacccgcatcgccctgattatcccgtaattcgccgcggcggaaccgcagattgtcgagttcgtgattaaaaatcagctgcggcgcggcagccatggataacaccgcatcggtggatggtgttgttttatcgtccggaacaaccggcggaaccggtttttcaggctcgccgggctcatctttctgagccgccagataccagattttgccgtcctgctcatcacgctgatagagcgagtacatataggtcccgccgtctaccgcattgatattggtaccgtcgagggcgctcaggcggaattgtgcattgctgctttcgtccgtgattaaatcaagacgagcttcatccggacgggtaatttcagccccggaatcctgtatattcagagcatgatcaccactgccgttacggatagtgaggtaatcaccctgttgctccgcaatggccgtgttcatatagaatgtctggctgccggagagattatcaatggtcagatggctgtatccggcattgaccggtgcaacaaaccggacctgaccctgtccgctgagcgaaccggcaaaagcggcattcccggtatcaccggtgatcaccatcagggtgctgtccgggccggataagataatattttccgcataggccccggcatccgcagccagtctgtcttccgcaccggcagtcagctgtacctgagactgctgattaacagttgtgacaccgaggagctgtgcccctgccgccagccagcttttggcgcgatcattcagtgtggtatctgtcgcggaggagccgctgtaaatactttgtacggcggtgtcatataattcgttattaatggctttttcgccgcctttaataatctgggcaccgccattttttatctggttaaattccgcaataccggcagctgcagcggcattctgactgaaaatatattgctggccgccgtcaacagttgtattggttgctttggaatcatcgaccacatattgccgtgccccggcgttcacgagggtattatcggcaaaacctttaccgtgcagttgctgtaatccgccgtcattaataatggtgctgtccgcaaacccgccggatttcagcatctgggcaccgccgttattcacgaccgtattcagggatttgccatcctgctgaacatattcataaccgccgtcattcacctgtgtaccggttgactccccgcccaggtaaataaataacttcccgccgttgttgacggtattatttacagactggcccggatcatctgctttaccggtattactgacataaacggttccgccgttgagtacggaatcttttaatgttccgccgtccagaacacggattaatccgccggtctgaatatcaatacggttgccggtggccgggaaaccggagtgatatccgtcccaggcaatatgggttgttttatcaatccagacttcagcgccgctctgaacctgagaatcctcaaacaggccgagtacactgagtttactgccgctgagcagggtcagatctttggcgactccgacatagtctgtgggatcgccgataacccacgcgccaacctcatagcactggtctgcggtgagttctccggtcagtgttgagcctccgccgtaagtgatactgcttctgtcaccacaaaatgtttcagccataaccaatgaaggcgttgcagtgaaaataacagacagaatagcgaggtgtaatattttcttttttgttttcattagttattccctggtgtcggtatatataacgaaagccatttcgtcagacggaaatggtaaatttaaaaggagtaaattttatttatgagatgagtatcttatttaaggattgtttaatcaatgggcgcgaaaatgcatgtttaagtgatttttttaatattccatggtggtaatgaatcttaatccacattatgaatgaagctaatctgatggtttttttatttctttgggtggaataaaatcctgctatagtctgtttttgggtcacatgcgttgtctaaattccatatttgatttactgggggtaatggatatacccgcaacatgagtaatgacggcattgtgttaaatattaactgagtgtgtcagaatattgctaatattcattttgggaatcatgccataagttatattcaataattgcaaaaaaatattatataaatttctattgcattatttatgtcacgatgtgagtaatgaaataatttcttacggtttgtttttgttaattacataatgtgttgtaaatccggatatatattctttcccggatatgctttttatttcagatcctgctttttaccccttactttcctgtaacgcattatttgtgaaaaaaatgtttcatatccgctaattattttctgtttttcgggtatccttaacgggtatgctgagtaatcctgcggttatgacaggccggtgtttccggtgtctcaaaatgacaaaaaaatccgcaaagataggtgcatccggcgaaaccttatcttactataggattaggtgaatcaattcagcaatgcgttacagcagtgaattcccgaagcctgaccggggaagcgtgataacatgccgctcaggtttttcagatttacacatattacatctgcaaatcagaggtcatcatgagcaagaagatcaaacgaatcggtgtgctgacaagcggcggtgatgcgccgggcatgaatgccgcaatccgtggtgttgtccgcgctgcgctgtcagaagggctggaagttatcgggatttatgacggctatctcgggctgtatgaaaaccggatgaaacagctcgaccgcttcagtgtctctgatgtgatcaaccgcggcggtaccttcctcgggtcggcgcgtttcccggaattccgtgatgacaaagtgcgggaaaccgcgattgaaaatatgcgcaaaaacggtatcgacgcgctggtggttatcggcggggacggttcctatctcggtgccaaaaaactgaccgaagcgggtttcccatgtatcggcctgccgggcactatcgataatgacgtggcgggaaccgactacaccatcggctattttaccgcgctggaaaccgtggttgaagctatcgaccgcctgcgtgatacctccacttcccacaaacgtatctctattgtggaagtgatgggccgctattgcggtgacctgacactgtccgctgccattgccgggggctgtgaatttatcgttctgccgccgaatgaagtggaatacagcagtgatgaactgattgcagaaatcaaagccgggattgataaaggtaaacgccatgcgattgtggcgatcaccgaacatgtcaccgacgtgtatgagctggcgcggcagatagaggcgacaacacatcacgaaacccgcgcaacggtactggggcatatccagcgcggcggctcgccggtagcctatgaccgtatcctggcatcccgcatgggcgcttattctattcagttgctgctggaaggttacggcggccgctgtgtcgggatccagaatgaaaaactggttcatcacgatattattgatgcggtgatgaatatgaagcgggtgtttaagaaagactggtatgagaccgcgaagaaactctactaaaaaatcctcgtcatccttcagcctgtggcggtgttggcttcattcatcgcccggggcacatactgatgtatgctccccggactcttcactttgccgccttgccacagactgaatgattcataggattgtacgattcttttttgttgcatatctgcctgtaacatggtgaatttaagataagtcggataccggattcataaggacagtgggacagacctcaatatgcatattattattgctgcaatttcagcgttagctgcgcttgtatgggcgttacattcattacaaaactcaggcgtagacctgaactcgtttaatccgtttacctgggcccggcgcagaaagtggcaaaaacaatacggggtgaaacctatttataatttgccgacggcaacagaagcggctgccgttattattgtcggtacactgaagcaggaaggggaaatatcccgtgaacaaaaacaaacggtaattacgctgtttacggataattttaacctggaaaatcaggatgctgcggacttgttttcttcatcgtcacatctggtacatgataacgagctgaattttgatcagagtgttccccatatactcaagttaagtatgaagcaattcacgcctgaaatgatcgtgacattcctgtcgttattggaaaatgtggcgacattagagggacaaccaacaaaagcacagacagatattattgaaatggtacgggatgtgtttaaaagagcaaataaaaataacgtaaactggaaaaactgatatttgccatttacaacgatagtaccggctctgctgtccggagtccggtagtatcttcgtatcaggaattttttattgtgctcaggctggtaaagtgattcacttgagggaatttgacataagttcatgtgatgctgaatgtcagcagggacatgacgttataaggagggtgactatggcgaataatatttatatgaaaataaaaggatgtgcccagggcggaatttccgacggttgttcttcctataaatcattgggtaacaaatatcaggcatctcatactgatgaaatcctggtgattgcagtttcttttgatgtatccagagcacaaaacctgattcacggtcctgtttcgataacgaagtatgtggataaagcaacaccattgttacttacttcagtgacgaataatgaaataatggactgtgaaattgattattaccgtacatctgatacgggtactcaggaaaaatacatgaccattcttttacggaatgcgagtatcattaacttctcccagaatcatgccaatgctcttatgcaaaatgatgtattaccgagtgaaacactgactattcgctatgaaagtattacctgtaatcatattatggcatcaacctcaggttacagtatcgccagcgtgatatgataccggttgctggctggtaacatcagccagaaaattatttttttatattgggagatgcaaaaatagcgataaggaacataaagaatacactactccatgttattaagcttttattaccatttccgggagagataaataatttaccaagcatgaatttttcaccatgaacaaatattgtaagataagctccgccaatagcaataattgatagtatatatattaaatccagaaacgatgtttttttcaggatcaaatagtttctcgaccttcttatcaggaaaaatatcattataaatataatgtagaataaaataacctgaggccatccgaaggctacttttgacaatgtgttgaaatctgtcattttttagtatttccctcatcatataatccatatgtggaatatatagtaaccgaatccagaaaaccttcagtaaacaatgcggcaggtgtcattaacctccatgaggcaatgaaatcagtgtctatatatctgaataatttaaaagtacctggcttcagtgccggatttaccatgctccctgctgataatgttaaatcaataaagttataagccatatctgcttcgtgattactgtatcctaatttctgtgccgtatatctgtaaccatccctcagataaccgctggtattttctctgaataacagatagtaaccattttcatacatattattagtgccctgagcaatcagccctacactcagtgaattgcacagcagacccacactggcagcgcatgcaccataaccagctataatctgcatgcctccgcctacaaagccgacctgctttaaaaaaagagtggtaacaccatttttttcattattaattgcttgaatataagcatattgccgggcttcctgtgtctggatcgcaaaacgttgttgcgccaggagctctctcatatcttcgatattatccaaaccggccgataagctcagacaggcattttttacttcccattcattttttgcgatgaactggtcgatgtcgctgagaaatttcagtctcacgcagggattgtgcagatacataaacgcgatttcttctgcttgtttccggagttcaccagatatgttacgcagggtactttgatatgcttcactgaatgaataatctaattcatattggctcatttatcacccggccctgccagttaaccgtttcttctttgtgtgtttttcgggcaagaatcggtaatgataatatcaccataacctaaatttttaaagataatacctgatgactcactttgggattgatcggaataaaaagaagcggtttacacggtaacaggcacaaaaaaagcggcgatttcgccgctttttgctgtccggagcccggaaattattttgcagctttggctgccgctgcggctttgacgatcacggcgaaagcatctgctttcagtgatgcgccgccgactaatgcaccgtcgatatccggctgagtaaacagctctgcggcgtttttatcatttacagaaccgccgtactggataatgacctgctctgccactttcgcatctttcttcgcgatatggctgcggataaatttgtgtactgcctgtgcctgcgcaggcgtggcagatttgccggtaccgatagcccagattggctcatacgcgatgacggcgccgaggaatgcatccgcaccctgagtgttcagaaccgcatcaatctgacgtgcgcagacttcttcggttttacccgcttcattttctgcttcggattcaccgatgcacagtaccggggtcaggcccagttttttcaggaccgcaaatttctctgccactaattcatcactttcaccgtggtaagtacggcgctcggagtggccgataatgatgtattgtgcgccgatgtctttcagcatttcaggggaggtttcgccggtgaacgcaccggagagattcagaccggtatcttgggcacccagtacaatggaggagcccgccaggacctgtttggcctgagagagataaattgccggtggtgcgatcgcaacatcacatccggtgacattgccgatttcatgacgcagagcggtgatcagctcataaaccattttactgctgccgttcagcttccagttacccatgactaagggatgtcgcattgtatttcctcctgccggaatgagttaaatgacttaagctttattaccattgtccgcgcagagcggcgaacaggcaaacagagagacagtatagtgaaagcggcgcgaaatagctttgcttttcgtccactgtttactgtgccgtatcactattagatagcgaaagcttaatcggttcaatagcgaaagttaccccatttttatcatcaactaccagaagatagcgtaatgcaccgaattgagaggcgtaagtgccggttttgaaatccgttgccagtgcccggctcagggcggcatcaatattgtttttattgagtgtcggttcgaactgaataatcagtgccttaatataggccagcatcagggctcggttggttttttccgctgcactgtctgcaccgggcagcagtgtcagctggagacttttgattttttcactgtcgcgctcaaggatggcggaagagtaaatataagggctgatgcgggttgccgcccgcagatagctggcggtaatgtcgtttgaggccacgactttgtattcccgtaatggcagcgacgggttgttgcggttaaactgttcgcgcataacggggatggtgatgccgaaagcaggagcatccgcctgaagccagagtgtttccggcgggcaggggatggggatcagtaccgcgtcaccggccgctgccggtgtgacgggcagcagcgtgcatcccgctgtcagggcggccagtgcggtttttttgactgcgttcatagcgactccctgtggtccgtctgcaatataaccagtgtacacgattaggaaagagaaatgacactacaacaatgggcgttttcgtttcacgggcggatcggccgcaaagcattctgggcggggatcggcgtgtgcggcgcagtgctgtttctcctgatgtcattacaggggctgtttaagctgcctgttgaagtgattatggtgccggtgctgatggtgatgtatcccgccgccgcgatttttaccaaacgcctgcatgaccgcaacaagcgcggcggctgggcgttaatgctggtgatggcgtgggcactgaccacgccggactggagcctcgccggtgatttctggcagtgggggctggggcgttttctgccgatttttatcgtgatgataatggtgctcgactgcggcgtgtttaaaagccttgatgagggcaaccgcttcggggagagcacacagccggtggataaaatcgacagccactgaggcagagacagcgggcgcacccgctgtcagggtatcaccagtattgctcactggtgatatggccgggtttgcggcgcaggtgtttgcgcatttcccgctcagttttcagcagattttgtgtgtctttcaccatctccgggttaccgcacagcatcacatggctgttttcggcggtcagcggtaatccggcggcggcttccagctcaccggaactgatcagcgccggtacccggccatgcagtgagccttccgcatgctcccggctgacaacagtcacaatccgcaatttgtcactcccgatttttttctgcagttcccgcatcagcggcagatagctcaggtcggcggcatagcgcacggcatgcaccagcacaatatgacggaaccgctccaaatctttgccatattgcagaatggataaaaacgggccgatggcggtgccggtggagagcatccagagggtgtcgcagtccggcacttcatcaagcacaaaaaaaccggccgcttcatcggtaatgagcagttcatctcccggggtcagggttaccagccgcgggctgagtttaccgtcgccgacagtgaccagataaaattcaaggtcatcattgtccggtgcattaacataagaataagcgcgctgtgtgcgttctccgtcaatttccaggccgagtttggcgaattgtcccgctgtaaagggaaggacaggtgcctgaacatgcaggctgaataaggtatcagtatggtgtgtgatacgtgtgacacgtcctgtgatccagtttgacatgcataacctccgtcagtcgcagaatggtcgttattaatatgtaaaccagtgtaataagccaacggggaaaaatgtatcgattaaatgcgtcagaggatcctgtcgcatgaatacgataaatcgggatgaactgtacagtttagttgccggaaacagcataaaaacggtcgttttgttacaaaaataaatgtgtgaactatctcccaaaatttttttaatttgctattttatacggtatcgcaagtatgactgattccggccgtgattaatgctgccggaattgtgctgtgccctcccggtgacaatgtaaagactgacaataaaaatgaaaaaactggaaaactttcatctgctggtaatgctgattgcgctgattgctgtcgggcaaatgacgcagacagtgtatgtgcctgtaataacggatattgcgctggatttcggtaaaccggcgggggccgtgcagagcgtgatggcggcgtatttatttacctatggtgcatcccagcttatttacgggccgatttcagataaagtcggccgccgtccggtgatcctcaccgggttatttatttatgtgttatccacgactgccgcgctgttttcaccgaacctgaccatgctggtgattgccagcgggttacaggggctgggaaccggggtggccggggtgatggcgcggaccatgccgcgtgacttatacaccggaatttccctgcgctatgccaacagcctgctgaatatggggatcctggtcagtccgctgatcgccccgatgctcggcggtgcactggcatttttcttcggctggcgtgcctgttatgcgtttctgctcctgctcggcctggcggtgggttacaacatgtggcacaagctgccggaaacccgtccgccgatgaaagagaaacctaaaatgtgggcctctttccgtctgctgctgaccaaccggacatttgtgccgtatctggcgatgctgatttgcggcctggccggggtggcggtatttgaggcatccagcggtgtgctgatgcgtgacggtctggggctgggcagtatggcagtgagtattctgtttattctgccgatcccggcggcatttttcggtgcctggtttgccggacgggacagtaaatccttcagttttctggtgtggtgtgcggtaatctgctgcctggtggccggggcgctgatgtggatcccggggctgctgggcgtgatgaatgtctggacgttactgatccctgccgcgctgtttttctttggtgccgggatgctgttcccgctggccaccacggcggccatggagccgttcccgtatctggcgggggctgcgggtgcgctggtgggcgggttgcagaatgtgggctccggtgttgccacctggatttcagcactgatgccgcagggcgggcagggcagtgtcggcctgctgatgctggcggtctctgtgattatggtgctgtgctggctgccgctggctcaccggttgcagaatcagcagccgatggcatcctgataatgtagaaacaataacgggcgcaaaagcgcccgttatgctttttatccgcttatgctttattgcgggcgatttcatcgtggtgtttcttctcaccacgcatcaccactaacagcagcagaaccgcaagcaggctgccgccgatcatcacgccgaaaccaccgtcccagccgaaataatccacagtaaagccgacgattgcacttgctgccacagaaccgccgagatagccgaataacccggtgaatccggctgctgtaccggcggctttcttcggggccagttccagggcatgcaggccgatcagcatgacggggccgtaaatcaggaagccgatggtgatcatacacgccatatcaacagacgggttacccggcgggttgagccagaagaccacggtggcaatcgtcaccagcgtcatgaagaacaccccggttgcaccgcggtttcctttgaagattttatctgacatccagccgcacagcagcgtacccgggatccccgcccattcatacaggaaataggcgacagaatagcctgttatatcgaaatgtttgacttcccggagataggtcggtgaccagtcgagcacgccgtaacgcagcagataaacaaagacgttagcaaaagcgatataccacagtaacttatttggcagaatgtattgcatgaagatctgttttgccgtcagttcaacttcactgttctctgtataatcatcaggatagtcgtttttgtactcttcgattggcggtaaaccacaggattgtggggtatcccgcatcagggcaaatgcgatgagtgccaccagaatggctgcaaatgccggcatgtaaaacgccgctttccagtcaccgaaccaatacatccccagcagcatcagcatcggcggtaagccgccgccgacgttatgggcacagttccagattgatacaatcccgccgcgctctttttgtgaccaccagtgcaccatcgtacgtccgcacggcggccagcccatcccctggaaccatccgcagagaaacagcagaatagccataatccagacggaagaggttgcccagtcgcaaaagcccatgataagcatgacagccgaggcaaggataagcccggtcgggagaaaatagcgcgggttagcccggtcagaaaatgaccccatgataaatttggaaagaccataagcaatggagatcgcagacaatgccgtccccagttcgcctttggaaaatccctgctccatcagactggggaaggcgagggcgaaatttttccggaccagataataggcagcatagccaaaaaagataccaataaaaatttgccagcgcagacggcggtataccggatcaatgcgatcagcactgagcctctgaatgtgcggtgcgggtttaaaccggcttagcatagacatctccctcgctaagtatttgtcagtatttggtgacgaagtttaccggaacggtagcggttttcttcatatattttcctttgcgctcacataatattcgtttttattcgttattactgtgaatgtcagcacatgcggttacatactgattacagttggttgttttttgtgatctctgacgggtatccgggagtttggtctgcggatatgtacttttaccgggtgaggcgggtttttgttctggcggggattattggtttcgcgcataaaaaaccgccggtattacccggcggcagagagataaaaaacagaaaggagggttagttgtggtcttcccagtcctgtgcgcgggcaacagcttttttccagccgctgtagcggacattccgttccgttgtttcaatgcccggacggaaggttttctcgatggtggatttggctttgatttcctccagatcctgccagaacccggtggataacccggccagcagtgccgcacccagtgcagtactttcccggatcagcgggcgttccacggacgtgcccaggatatcggactggaactgcatcaggaaattgtttgccaccgcaccgccatcgacacgcagcgctttcagacgcgttccggcatcggcctgcatagcttccagcacgtcgcgggtctgataggcgatagattccagggtggcgcggatcaggtgattgctgttcacaccccgggtcaggccgaaaatagcaccgcgcgcatacggatcccagtaaggcgcacccaggccggtaaaggcaggcaccacatacacaccgttgctgtctttgactttggtggcgaagtattcggaatcggtggcatcggcaatgattttcatctcatcgcgcagccactggatggaggcaccggccacaaataccgcgccttcaagggcataattcacttcaccgcgcggaccgcaggcgatagtggtcagcagaccgtgttccgacagtaccgcttcgttaccggtgttcatcagcaggaagcagccggtgccgtaggtgtttttcgccatgcccggctgaacacacatctggccgaacagcgccgcctgctggtcaccggcgataccggagataggaatacgggtgccgcctttcccgccgatgttggttttgccgtagatttccgaggacgctttcacttccggcagcatggcgcgcgggatgccgaacaggtcgaggattttctgatcccactccagtgagcggatgttatacagcatggtgcgcgaggcgttggtgtgatcggtgacatgcacacgtccctgggtcatacgccagaccagccaggtatcgacggtcccgaacagtaattcccctttctccgctttctcccgcgcaccttcgacattgtcgaggatccacttcactttggtgccggagaaatacgggtcaatcaccaggccggtattttcccggatataacggaccatctcttcattctgtttgagaccggtgcagtaatctgcggtccggcggcactgccagacaatcgcattgtaaaccggtttgccggtctctttttcccagacgatagtggtttcgcgctggttggtgataccgatagctgcaacttcgtccggatgcacgtcagttttggcgaggacttctgttaagactgagctctgtgtggcccagatttccatcgggtcatgttccacccagcccggtttcgggtagatttgggtgaattcgcgctgcgcgatatcgataatattggcattacgatcaaaaagtaccgcccgggaactggtggttccctgatccagcgcgacgatatactttttctcacgggtgattgtttctgttgtcataattaaacctgttttatttctgagtgaacaaacacgcgataacgtcagagtacgtgattcgctgcggtattatttttcgtccccggtattacacacttcgcacggcagatgacggccgatcagcttgcggtaaccgaatgcaccgagtaacccgccgacgatcggcgcaaacatcggtaccaggaaatacgggatatcacgcccgccggtgaaggcaatatctccccagcctgcaaggtatgcaaccactttcgggccgaagtcacgggcagggttaagggcgaagccggtcagcggaccgaaggagccaccgataaccgcaatcagcagaccaatcagcagtggtgccagcgggccgcgcggcacaccgttgccgtcatcggtcagtgccaggataagacagacgaggatagcggcgatcaccacttcgataaagaacgcctgacccacgctgaccggtgctgccggataagtggagaataccccggcggtaaagaggctttcctgtgagccgcgcacaatatgatgcacctggtcataatcgaggaacacattgtaatacatggcataaaccagcgccgcagcggcaaacccgccgaggaattgagccacaatatacggaatcactttgcggcgctcaaagcaggcaaacagccagagcgcgagtgtgacagccgggttaagatgcgcgccggagatcccggcagtcagatacaccgccagtgccacacccagaccccagatgatactgacttcccataatcccagttgtgcaccggcgatacgaaccgcggccacacagcctaaaccaaagaagaccagcagtgctgtacccaggaattcggagagacattgtccgaagagggtcggagatttcattagactcatagtatcaatcctgatagtgcaaaattagggtgaaataagtgcaaattattaacaaatgatgttcttcgtgtatcagacgtatgtcttagtgtgaatttatcgttaatgagcggaaacgagaaataacgaaatcaaaaattgtggatctcgtcaacaaattgagcgatttcgcttattttgtaacagacgggcaacattcaggcgaatatcagccggattttattctgctgcattacggggaatacacgggatgtgactggacacattgataacacctacttacaatcagagcatcgcttacaaggaggacgcaagatgtcatttgaagtatttgaaaagctggaagcaaaagtccagcaggctatcgacaccatcaccctgttacagatggaaatcgacgaattaaaagaaacgaacaacaacctgaaccgcgaagtgcagaatgcagccggtgcccgtgagtcactggtgcgtgaaaacgagcagttgaagcaggagcaggcaggctggcaggagcgtctgcgggcactgctcggaaaaatggacgacgtccagtaaattacattacgcgtcatccttcgccctgtggctgtgttggtttcgctcagctccccggtcacatactggtgtatgctcccggggctcttcgcttcaccgccttgccacagaacgaatgannnnnnnnnnnnnnnnnnnnnnnnnnnnnnnnnnnnnnnnnnnnnnnnnnnnnnnnnnnnnnnnnnnnnnnnnnnnnnnnnnnnnnnnnnnnnnnnnnnnnnnnnnnnnnnnnnnnnnnnnnnnnntttgatgctgtggctgtgttggtttcgctcagctccccggtcacatactgatgtatgctcccggggctcttcgtttcaccgccttgccacagaacgaatgatttagcgtaatcgcggtattgctgcacagcggcgttggctttgttcgtccgccccggtcacatactggtgtatgctcccggggacgtcctcacttcgccgccttgccacagaacgaatgatttagcgtaatcgcggtattgctgcacagcggcgttggctttgttcgtccgccccggtcacatactggtgtatgctcccggggacgtcctcacttcgccgccttgccacagaacgaatgatttagtgtaatcgcggttttgatgcaaaacgaataattgagtgtgatgcggtttttatcttgtgtcataacgacaaaagggcggatattccgccctttttgctgtctgtgtctctgatgaggattacgcttcggtcagctcgtcttcatcgtcatcattttcttccggaagcgtcagcgggatatctgacaggataattccggtgttatccgcatacagataatcgccggagaagaaggttacaccgccgaaatttacgcggatgtcactgtcaccgataccttctgaaccacagcctgccggaattgcggccatcgcctggataccgatatccatttcagccagatcatccacctgacgcaccgcgccgtacaccacaataccttcccagccgttctgcacagccagtgccgcgagttccgcgtcaaccagcgcacggcggacagacccgcccccgtcaacgaggagaatacggccctctccctcttcttccaggagatcaaagagcagtccgttatcttcaaagcattttacggtggtgatttgccccgcaaacgatgaacagcccccgaagttggaaaacaggggttcaacgacattcacattttcctggtaaatgtcacaaagctcggaggtgtcgaaggtatcatttttcataggattttacgtctggttgctgccggatgcagtcagtatagccccttcacacggttgtttgcaaaatcaacagcggccgctttccgatctgaatcaagaaagcggcagatttcggcgtaaatccggttacagacgctggcagataagtcctgcggaaaacaggatattgaccagcagtgcggctttcaccatctgttccagcaacgggcgcatcccggtggcagtcatatcccccagcacgcgtctgatatgcataaacagtaccggtgcggagagcaggaacagccagctgtaccaaccgtgcagatagagcagggtaaagagcaccaggcacaggaacgccacggtaatcaccgtggcatggtaatagcgggatttcagcgggccgaggcggacggccagggtatttttcccggtcaggatatcattttcgatatcgcgcatattattgatattcagcaccgcaacagacagcagtccgcaggcggtcgccggcagaatggtcagcgggctgaaaaaaccggcctgcaggtaataggtgcctatcacactcagccagccgaaaaagatcagaacagaaatatcacccagcccgaggtagccgtagggctttttcccgaccgtataggtgattgcggcaataatcgcggccacacctaaccccaggaagccgataatatcttccggtttctcgcaggcgacaataatcagggccagcccggacagacaggcgagagtgacggtcagaatcagcgcctttttcatctgagcggcggtgataacacctttctgcataccgcgcagcggcccgaggcgtgcttcggtatcggtgccttttaccgcatcgccgtagtcattggccagattcgataaaatctgcagaatgccggtggtgataagggcgagcagggcaacagggaatttaaagtgaccggtccagtaagccagagcggaaccggtaataatcgcgatcaccccgagaggtaatgttttgggccgcaggctttccagccaggcttgggtacggctgatggccggtgaaggggtgactgacattgaaactcgcttacttttcagaatgaaataataacgacaaaaataataacgcagactgccgggcagattatacccgtacagtctgaatactattatgtctgattattatcaaattacagaataaagcgacttaaatcttcatcagccacgagctgatccagatgatctttcacatattctgcattgatctcaatagattgaccctgtttttcactggcatcgtaggaaatttcttccattaatcgttccagcaccgtatgtaaacgacgggcaccgatattttcggtggtttcgttgacctgccatgcagattcagcaattttacggatgccgtcggcggtaaaggtgatatccacaccttcggtagccatcagtgctttgtactgaaccgtcagtgaggcgttaggttcggtcagaatgcgctcgaaatcttcagtggtcagtgcctgtaattccacacggataggcagacggccctgtaattccgggatcagatcagacgggctggaaacctggaacgcaccggaggcgataaacaggatgtggtcggttttgaccatgccgtgcttggtggagacagtacagccttcaatcagcggcagcaggtcacgctgaaccccttcgcgggacacatccggcccggaggactggccgccgcgcttacagattttatcgaactcatcgataaacacgataccgtgctgttcaaccgcttcaatcgcctgctctttcagctcttccggattgaccagtttggcggcttcttcctcaaccagcagtttgaaggcttctttgatcttcattttgcgtggtttttgtttctgtccggccaggttctggaacatggactgtaactggctggtcatctcttccatgcccggaggtgccatgatctccacacccattggtgcggcagacacttcaatttcaatgtctttgtcatccagctggccttcgcgcagttttttgcggaatgcctggcgggcagccgacggctctgcctgggtgtcagtctgaccccagttgttttttgccggcgggattaaaacatcgagaatgcgttcttcggccatttcctcagcacggaaacggtttttctcgatagactgcagacgcaccattttcacggcggaatcagtcagatcgcggatgatggaatccacttctttaccaacataacccacttcggtgaatttggtggcttcgactttgataaacggcgcattggccagtttagccagacgcnccgggcaatttcggttttaccgacaccggtcgggccaatcatcagaatatttttcggggtgacctcgtgacgcagctcctcattgagctgcatacggcgccagcggttacgcagcgcgatggcaacagcacgtttggctttatcctggccgataatatggttatcgagttcgctgacaatttcgcgtggagtcatttcggacataacgtcgatccttatgcttttgaaggtaattcttcaaaattcagattgtggttggtgtagatacagatatcaccggcaatagtcagtgcgcgctccgcgatttcacgggcactcagatcggtggtttccagcatggcgcgggctgctgcctgggcgtacgggccgccggaaccaatggcaatcagatcattttcaggctgaacgacatccccctggccggtgataatcagcgatgcggtttcatcggcaacggccagcagggcttccagtttgcgcagcatgcggtcagtacgccagtctttggcgagctcaacggcggcttttgtcaggtgtccctgatggagttcaagtttgcgttcaaacagttcgaagagggtaaaggcatccgcggtgccgccggcgaaaccggcaatgactttgtcgtgatagaggcggcggactttgcggacattacctttcatgacggtattacccattgtcgcctgcccatcaccaccaattacgacctggccattacggcgaacacttacgattgttgtcatgagtcagcccctggttgtgctaaaggatggagagaggccaccgggtatattcccggcggcacagaattaactagagatatggggggagggctgaaggatttcaacccccggcggagcgaagaatacaatttgttacgccggcatcagcagcacggtttttcaccgactgcgcggcggatttctcatacgggccgagcatcacacgataccagccgccgccctgggacacccggctttcgataccggagaaggcgagaccggcgcggacttcttctgcctgaccactctcacggaatgatccgcactggattaaccagcgctcaggcgcagcctgcggtttttcctgcaccggttttggtttctcagccggtttttcggccggttgcggagccggacgggtttccggctgcatacgcagctgcggatcctggccggtaaccacgacctgtgagcgcggaaccgcaccgtttgccggtacttcctgcaactgaaccggagcctgctgcatatcagactgcatctgctccagcagctgccgctgttcctgggtcagtttggcattcggatcaatgcggttggccggtgcctgcgggttggagtaatactgctccggtaccccggcttcgcggttttccagctctttgatataacgccagcgctcctccgggatcggcgggagaccgttaccggtactctgctgatgcgcaggcggaatgatgctgtcagaagcggtctgactttttttgttatggaccagatagaacaggccgccgacaaaaacgaccaccagtgccacggcgatcaccaatgtggtgaacggcaggcctttcgcctgacttttcttccgtgatttactttttttacgcggcgcagagcgtccgcgtcccacataatctcgttgtgccactgtttcaattcactaatgagtcggttaagggaacatattattcagcgttacatgttacttaaccttatggtttttgcctagcttttaggcgcgcaggcactttctctgatgattaaatcagaatccagcaggcgcgaaccttttgccacggtgtgtccctgcaactgttccagcagcagtaagaaagactgacggccgatttcataacggggctgtgcgatagtcgtcagggtcggcgaacagtattgtgcagccggtaaatcatcgaaaccgacaaccgagagatcctgcggcagcgtcagcccctgttttctggccgcccagagaacgccgatcgccataatatcgttgtggcagaaaatcgcggtcggtggttccggcagtgccagcagctgtgcggcacattccgcgccgctctcgtgggtgaaatccccgcgtaccagatattcgtcccgtaccggcattcccatgcggcgcatggcctgaatatacccttcgacacggtactgacacaacggcagctcttccggtccggaaatacaggcgatgcgggtgtgtccgagcgactgtaaataatgggtggcattaaaggcggcggtcaggttatcaatattcaccgtcggcagctccagctccggggcaaattcgttagccatcaccatcggcgggaagtggcgctgttcatcatggcggctgtcaaacggcacatcggagccgagcagcaccatgccgtcaatttgtttggtgacaatcagattcacaaaggtgtgttccggcttgtgctgataacggcagtcgccgatcaggaccagatagccgtgtttggcggcaatttcctcgataccgacaataatatcggtaaaaaacggatcaccgatatccggtacaatcaccagaatggtgcgggattcattacgtttcatcccccgggacagattgtgcgggtaataccccacttccaggacagcattttccactttctgccgtgtctgcacagacactttctccggattcatcagtgtccgcgacacggtcgcggtcgagacgcctgcggctctggcgacatctttcattgtcgcgccggtatcgttacggcgtggttccatcattaattcctttggttaccctgtaagtgtatcgattgcgcggtttttgtgatcattatggtccgctgtacttttcacatgcctgtgaaaaaccgcctgagcttcttaagtgaaattcagacggtttattaatcgttctattaacggctattctaagccctttgtaaaattaatctgttacctggtttgcataaaactgtgagttatctcaattttttgagacagcgcgcactttccgtgagacgtcagtctcagccatcagtcggatcgacatccacattccagcggactttccggctttccggcatctgctgaatatacggaatggcctgcgcgacaattttctgcaactgactgcgggacggatgctgtaacagtaactgccagcggaaacgtccgccgcgtttggcctggatagcaggcagcggccccatcagccagaaatgctcatcccgcagcgggtgggattcgaacagctgacgtaccgtctgcaggaatgcattcgcccgctggttattctgatcttcggcgcggatcatcacctggctggtataaggcggcagacaaacactctgccgctcattcagcgcctgtgcggcaaaggcggcatagcctttttccagcagcacggtcagcagcggatgctccggatggtgagtctgcaaaatgacctcgccgcgtttcccggcgcgtcccgcccggccggagacctgggtgtagagctgtgcaaagcgctccgccgcgcggaaatcgccggagaacagtgcgccatcgacatccagcagtgcgacaagggtgacatccgggaagtgatgccctttggccagcatctgagtgccgatcaggatgcgtgcgccgccctgatgcacatccgccagatgctgctccagctcgcctttgcggctggtggtatcgcgatccagccgcgtgaccggaatatccgggaacagcggggtgatgctctcctccagctgttcggtgcccagcccgaccggtaccagctgtgtggagccgcactgcgggcactgtttcggtaccgggcgctggctgtcgcactgatggcagcgcagcatgcggtggttctggtgcagggtgtaaaaatggtcgcagcgcggacattccgctatccagccgcactcgtggcacagcattgccggggcaaagccgcgccggttgaggaacaaaatgacctgattatctgcggccagatggtggcggatgcgtttgatcagcggttgtgacagcccggaggtcagcggcagccctttcaggtcgagcagatgctgatcggcaagctgtgcatttcccgcccgctgtgtcagcgggaggactttgtattttttctgccggacattaaacagggtttccagtgacggggtcgccgttcccatcacaatcgggatatcatttttcttggcgcggaacaccgccagatcgcgggcgtgataacgccagccgtcctgctgtttataggagccgtcgtgctcctcatcgataataatgatgccgagagaggtaaacggcgtgaacagcgcggagcgggtaccgataacaatggcggtctccccgcgttttgcccgcagccagacagccagccgttcgctgtcattcatgccggaatggagaatatccaccggagcctgaaaacgggcgcggaagcgggcgatggtctggggtgtcaggccgatttccggtaccagaaccagggcctggcggccttcggccagcacattttccagcacactgagatacacctcggttttcccggagccggtgacgccgtccagcagccagggagaaaactgatgctgctctgcgcggatcgcccccacagcggtggcctgctcggtattgagtttcaggcgttcgccggtgacggcaaatcccggctgccagggtttgctctccggctgcacatcgttcagggtgatcaggtttttctttttcagtccctgcaatgcactgtcgctgagttcatattccgcagtctgatggcggtaaaccggctggcggcgcagacaggccagcgcctgctgctgtttcggggagcgtttgagggtatggatatcaatctcacgtccttccggcgtcacttcccagcaccacagcggtgcaaaggcggcttctttgccctgacgcagcaaaatcggcatggcatgaaacagcacttcccctaacggatagtgataatactgcgccgcccagttcagcagcggccacagatccccgggaaacagcgtgtcgtcatccgggcaggcaatgaccggtttgagtttctccggactgaaggtgctggtttccgccagttcagccacaatgccgactgcctgtttctgccgtccgaacggcacaattacccgtgcccccggtaccgggcggggcatatcatcaggcagtaaatagtcaaatgtttgtgtcagaggtactggtaatatcacccggacgactgtcattataatgtccatcatcggcagagcgccggcgtgtaaaaaatacacagcggcggaaaaggcgcaaaagtgtctgaataatcaccggatttcagcttttccccggtaaaaacagggaaattatccgcaaaacaggatccagaataccacgaaaagacagcggatttcattgcatggttcagggaatttctgtatgatccgccgcctttggtaattaaaataccaccgataacttatcatcaacacgacgtgtggtgtccggcaaaaaggcccggatagcgacacggccttaaccgaggttttcccatgaaaaaaggtattcatcctaactacgcagaaatcactgcaacctgctcttgcggcaacgtaatgaaaattaactctaccgcaggtcacaacctgaacctggacgtgtgcggcgaatgccacccgttctacaccggtaaacagcgtgacgttgcaagcggcggccgtgttgatcgcttcaacaaacgcttcagcgttccttctgcgaagaaataatggcactgcgcggcatgccgcgctctgttccataaaaaacgccctgaatgaaaatatttcacagggcgtttttttatgtctgtttccgggttgagaagtcgtataacacgcggataaaactcaatattcccacgtatccgggtcgaccccatgctggcgcataatttctttcgccacttccgggatttcatcactgcgttctttgcgcagatcatcatcatcgggcagtggctgtccggtaaaagcatgcagaaatgcttcacataacagttcgctattggtggcatgacgcaggttattcacctggcggcgcgtgcgctcatccgttaaaattttaagtactttcaacgggatagaaactgtaatcttctttacctgctcactttttttgccatgctcagcataagggctgatatattcgccgttccattcagccatggattaccttgttatcttagtcagtttgaggaggagccgggcacagaaaagtacctgactgatatcggtattatcccacttgtatatataaccgtaaagcaggatggatgtccagacatattgacgtctaaatgaaccgcagatatgctgataactcgttcggttactgacagggaaagaggtatggcacgcaaacccgcgacagcggcaattcataacggactcaatgaagagacccaattcggctgtgtcataccgccggtgtatctctcgtcgacttataattttccggccttcaacagcccgcgtgagcatgattattcacggcgcggcaatcccggccgggatatcaccgggcgcacgctggcggagctggaaggcggtgccggggcggtggtgaccagcagcgggatgtcagctctgcatctgctgtttaccgtgtttttgtcaccgggggatgtgattgtggcccctcatgactgctacggcggtacttaccggctgctcgacagttgtcagcagcgcggccattttaccgtccgttttgcagatatgaatgatgaggcgtcactcagtgccgcgctggcggagaaaccgaagctggtgctgattgaaacaccgggcaacccgctgctgcgcattacggatatcgcggccgtcagtgaaaaggcgcatcaggccggggcgctggtggcggcggataacacgtttctcagcccggtattgcagcagccgctggcactgggtgcggattttgtcatccactcctgtaccaaatacctgaacgggcactccgatgtggtggccggtgtggtgatcgccgcagacgcggagcactgcgaaacactggcgtggtgggcgaataatatcggtgtgacgctgggggcgtttgacagctatctgctgctgcgcgggatccgcaccctgatcccgaggatccggttacaggaaaaaaatgcccgtattctggcggattatctggtgcgccagccgctggtgaaaaaggtgtattatccgggactggcgacgcatcccgggcatgaactggccgcaaagcagcagaaaggattcggcgcaatgctcagttttgacattaatggtgatgaagctgcaatttcccgctttttatcttacctgtctctctttacactagcagagtcgttgggcggggtggaaacactgatttcccatgccgcgaccatgacacatgcgggaatgccggagcaggcgcggcatgcagcgggaatttcagacagcttattacgtatttctgcggggattgaggacagcggtgatttgattgctgatctggatcgcgcatttcagtcagtgactaaggggtaagggtaatcatgagtgcgttggcgattgatgaaaaagggcgtcagttacataaattcggcggcagcagcctggcagatgcaaaatgctatctgcgggtggcgaatattatggcgaactacagtgagccggatgacctgatggtcgtgtctgccgccggcagcaccaccaaccagctgattaactgggtcaaactgagtcagagtgaccgcgctgccgcagagcaggcgcaacagaccctgcaacgctatcagactacccttatcagtgacttactgccggagattcaggccaatgtcctgattttccagtttaatgatgatattcaccgcctggcggaactgctgaaacacccgctgaatgatgtgacttacgcggaagtggtcggccacggggaaatctggtcagcccgtctgatggcgcaggtgcttcaggagcagggcatggcggcgcagtggctggatgcccgtacattcctgtgcgcggagcgggcggctcagccggaagtggataccgcgcggtcgcagccgctgctggcagagctgctggcgctgcatccgggcaaacgcctggtggtgaccgggtttatctcccgtaaccgtgccggggaaaccgtgctgctcggccgtaacggcagtgactattccgccactcaggtcggtgcgctggccggagtgaaaaaagtgactatctggagtgatgtcgcgggggtttacagctcggatccgcgtaaagtcaaagatgcctgtctgctgccgctgctgcgtctggatgaagccagtgaactggcacgtctggcggcaccggtgctgcatacccgcaccttacagccggtgtctgtcagtgatatcgatttacagctgcgctgcagttaccagccggaacagggctcgacaaaaattgagcgcgtgctggcatccggcaccggggcgaaaatcgtgaccaaccacgatgaggtttgtctgattgatatccgcctgccggccggggatgatgcgaaggcgcgttataaaagtattgatctgctgcttaaacgcagccagatccgtccgctggcggtcggcctgcataatgatgacaatcttattcagctcagctataccgccgaagtggcagacagcgccctgcatgtgctggaaagcgccgggctgccgggcacactgaccctgcgtgacggcttctcgctggtggcgctggtcggtgcgggggtctgtaaaaacctcctgcattaccaccgtttttatcagcagctcaaagatcagccggtggagtttatctggcaggccgaggacggcatcagcctcgtggctattctgcgcacccgtcagaccgggcatgtgattcagggtctgcaccagagcctgttccgtgcggaaaagcagatcggcctgatggtgttcggcaaaggcaatatcggcagccgctggctggagctgtttgcgcgtgagcagagtaatctctctgcccgcagcgggtttgaatttgttctcgccggggtggcggacagcgaaagagcgctgctcagctatgacgggctggatccgagccgcgcactggctttcttcaatgaggaagccgagccgatcgccgatgaagacactctgtatctgtggatgcgcaaccatccgtttgatgacctggtgattatcgacctgactgccagccaaaccctggcggaaagctacgccgattttgccgcgtacggtttccatgtcatcagcgccaacaaaattgccggggcagcaaaaacccgcgactaccgccagatccgcgatgcgttccgcaaaaccggccgtcactggctgtacaacgccactgtcggtgcgggactgccgatcaaccactgtgtgcgcgacctgcatgaaagcggagacagcattattgcgatcagcgggatcttctccggcacactctcctggctgttcctgcaattcgacggcaccgtaccgttcagtgagctggtggaacaggcctggcagcaggggctgaccgagccggatccgcgtattgatttatccggccaggatgtgatgcgcaagctgattatcctcgcccgtgaagccgggtatgaaattgagccggaagatgtccgtgtggaatctctggtgccggaagcggcacaggaaggcacaccggatcacttcttcgagaatgtcaccgcgctgaatgaacagatggcctgccgcctggaagccgcccgtgaaatgggcatggtgctgcgctacgtggcccgttttgatgccaacggcaaagcgcgggtcggggtggaggctgtccggcctgatcatccgctggccgcactgcagccgggggacaacctctttgcggtggaaagccgctggtaccgcgataatccgctggttatccgcgggccgggtgccggacgtgatgtcactgccggggcgattcagtcagatttaaaccgtctggcacaattgctgtgatgcatcgtattccgactatcaccggggttaaatagtcttaaaaagtcactgtgcgggacaaaaaacgactataacgggaattgtcttattacgtttatagtacagggttggtataaatagcgcatggtgatgtttcagatggacatatgaccattatggatgatggctgtgacaggatgtcatggtaaggatatgcaccggacgtgcttcttctgacaggaagtcaggctaaggacagaaacaatcccggcgggatgcgattaacggatttaattgcatcccgttactatttttactctccgcagttttctgttaacggtttcccgttacactttcccgctgaatttttccccgccggactgaggattttcgctcaggctgaatcgttactatttttgccttaattcgcgatatctgtctgtgacgtttgtttttccctttcattatgctggcgggacggatttttacccgataatccggcacctgcctgtgcgcaacatgatggcagcacagtaattaaatctgataaagtcctttcaaagcgcgttttttttgatatgaatatagggcagagataaatgcaagggaacggcgtcacaaaataagaattaatccgtcgtatgaaatcactaagatgtacaggacagagaactgccggctgaaagttcctcaccggcggtcataggattctgccgtcaataagggtcaggggtcgtatgaatcaacaatattccgcaatgcgcagtaacgtcagtatgctcgggaaactactcggagacacgatcaaagaggcccagggtgaacatattctcgagaaagtagaatccatccgtaagttatccaaagcgtcacaggccggtaatgaaatccagcggcagaagctgctgatgacactgcaaaatctatccaatgaagaactgctgccggttgcccgcgcatttaaccagttcctgaatttaaccaacgtggcggagcagtatcacagcatttcgccgcacggtgaggcggccagtaatccggttgccctggcggcgctgtttgatcagctgaaagccaaaaactttactaatgaagagatgcgcaaggccgtggatgagctttccattgagctggtgctgaccgcacatccgaccgaaattgcccgccgtaccctgatccacaaactggtggcggtgaatacctgcctggcacagctggatcacgatgatctggctgattatgagcatgatcgcattatgcgccgtctgcgtcagctggtggctcaggcctggcacactgatgaaatccgcaaagaccgtccgacaccgcttgatgaagcgaagtggggctttgctgtggtggaaaacagtctgtgggaaggagttccggcgttcctgcgcgagtttaacgagcagctcgaggcatccctggattacaacctgtccgtggaagccacgccgatccgctttacctcctggatgggcggtgaccgcgacggtaacccgaatgtcacggcagatatcacccggcgcgtgctgaccctcagccgctggaaggctgctgatcttttctataatgatattcaggtgctggtctccgagctctccatgagcgagtgcacaccggaactgcgtgagcgcgtgggtgaggatgccgccgagccgtaccgcgtcatcaccaaacagctgcgcgcccgtctgaaaagcacactggactatctggagcgctgcctggccggtgaaccggctatcaaaccggataacctgctgaccgataacgaagagttatgggagccgctgtatctctgctatcgctcgctggttgagtgcggcatgaagattattgctaacggtcagctgctggataccctgcgccgcatccgctgcttcggtctgcagctggtgcgtattgatgtgcgccaggaaagcacccgtcataccgaagcgctgtctgaactgactcaatacctcggcctcggggattacgccgcctggccggaagaggaaaaacaggaattcctgctgcgcgaactccagtcaaaacgtccgctggtgccgcagaactgggagtgcagcaatgaaacccgcgaagtttttgatacctgccgggtgatagctgaatcaccggaaaattctgtcgcctcctatgtgatttcgatggcaaaagtgccgtcggatgtcctggcggtcaaactgctgctcaaagaatccggcagcccggtcacattgccggtcgcaccgctgtttgaaaccctcgatgaccttaataatgcagagagtgttatcacccgcctgctgagcatcgactggtaccgcaatctgattaatgaccgccagatggtgatgatcggttactccgactctgccaaagatgccggggtaatggcggcgtcctgggcacaataccgcgctcaggatgcactgattaaagtctgcgcccgtgaaggcgtgacactgacgctgttccacggacgcgggggcaccatcggccgtggcggtgcaccggcacatgccgcattgctctcacagccgccgggaagcctgaaaggcggtctgcgtgtgacagagcagggtgagatgatccgctttaagtttggtctgcctcaggtcactatcagcagcctggccatgtacgccagcgccagcctggaagccaatctgctgccgccgccggagccgaaaccggagtgggccgcgattatggatcgcctctctgatgtctcctgtgagatgtaccgcgactatgtccgcgaacagccggattttgttccgtatttccgtgcggccaccccggagcaggagctgggtaaactgccgctgggctcccgtccggcaaaacgccgtccgaccggtggtgtggaaaccctccgtgcgatcccgtggatttttgcctggtcgcaaaaccgtctgatgctgccggcctggctgggtgcgggtgcggcactgaaaaccgccgtggatgaaggtaaccgggcaatgctggaagtgatgtattaccagtggccattcttcagaacccgcatcggtatgctggaaatggtgttcgccaaagtcgatttatggctggcggaatactatgaccagcgcctggtggagccgcgcctgtggccgctgggggcaaaactgcgcgaacagttatcacaggatattaagagtgtcctgatgatttccaaagatgagcagttaatggcggatctgccgtggattgcggaatctatcgctctgcgtaacgtatacaccgacccgctgaacgtcttacaggccgaattgctgcaccgctcacgtgaatgcgatcagtcagatccgcaggtagagcaggctctgatggtcactatcgccggtattgctgccgggatgcgtaacaccggctgatattatcagcacgtcttttttaccccggatggccgcctttatcagcggccattttttttgacatccttttgccggaaaagggttgtatgttatttaaattaatattatataataaagtatattattaatgcctataactgaggtgactatgtcctactacaaagatgtgatcaaagatatcgccggcaacatgcaggaattacacaaaaatattccggacgtgatgggggcgtttatgaccatcatgcaaagcagcacggctgacggtgtactggataaaaagaccaaagagttgattgcggtggcaattgccgttgccaaccgctgtgacggctgcattggttttcataccaaagcgctggttgagctgggggtaacagagcaggaattatcagaagcgctgggaattgctatcggcatgggcggcgggccgtctgtgatgtatgcggcgaatacattaaaggcatttaaagagttctcataaacgcgtcatccttcagcccgtggcggtgttgggttaccgccacaaactgaatgattcagcgtttattgatcagaaacgcacccggaagccgagatccgcactcaccggtgtttcactcttattgcctttcaggtaattgatttcagtatagaatgcagcctgcggggtgatttgtgcatccagtcccaggccgtatttgccggtgctgccggaaaaatcattactgaaggtattggcgcggttgatggtcacatcattctctttggtgaactcgtgaaccaccgccaggcgggcatacggtttcagtaccgcactgcggacttcaaaggatgtggaaaccagcgcaccggcttcaccctgaaaactgtccgcactgtgaatatcagcacgcataccgttgctcagctgataatccgcactgccgatccgcgcatactgcagtttgccgtatggctgtacggtcagggcaggcatgatttcatagttaaagccgctttcaaccgacgcggtaaacgcattctgatgatagtcaccacgggcggcactgccgtttttcatccggccgttattgctattatccagacggttgcctttgagcatagcacccgcaaaaaagccgttatcatgcagccaggtggcgtagaggccgccgtgccagctttcaactgtaccattgccatagtcagaggtgctgactttgctgcggctgaagccggtgaatacaccaaccagtacggtggaatcttccagacggaatggtttatccacaccgatctgcataccgtcgagtttgtttttaaacgcggtatcgtttttatcattcaggcgggtgttgtcgtgcagatagcgggtccataatccgtagctgtgctgcgggttactgtagtaataccccagacgttgttgcagggaaacggattccgcctgtaacacctggcgtggtgccgcagccattgccatcacatttttggcgctgtaactcaggaccggtttggtaccgccgttatcgctgccgttattaccattgtcagtatctttatcgcctttgcgtttaccctgcaaataccactctgtgctttcgccggattgggttttcttcagggaatactgataagcaccgatttcagcagtctcatctttattcagcagacggaacgcggcatcaccgctgttaacggacacaatcgtgtggcgggtggcgcttttcggctctttaccggagtccgcaaactcaataccgaaattaccggtggctttattgctgacggtaatatgatcaccccagccgtctgccatctgtgtggagatataaaaatcgccctgtccggttaatgtgccgattttcaggtgattttgctgagccgccggagaataggcttccatagcaaccataccgcccttcatattcagggtgttgatggtggtgaccagatccgcaccgagtttatccgggatcggggcaaaatcttcaacatttgcaccgccggtccatgccgggccgatttccaataacccggcattatcaacggtttcaaatgtcacatttcccggcaccgcagggttgtttgttgtgacatcgatttcaaattcattggtattgttggcgaaaacttcagcgcctttttcaatcaccagagtacccgttgaacgggtatcttcgctgaaactgacatcaccaccggatttgaccaccgcgccgttcaggacgctggttgcattcagtgaaagctgtgcgccgttttcaataatgaaatttgtcccggtcacgttgcggtttaaatggaaatgcaggccacccggaacaacaataccggtgctgtcttcggtgatgattttattccggtcttcattggcatccgccagtgctccggcagaatagcccgcaactgcggcttcaattaagcaaactaatactaattttttcatgtggttccgacctgctgatacccgtgacagtgctgtcacgctgagagagtgtgaaatataaaaaatttcttatgagttgactgcgtattttcagctgttcagacaggcaggagaatgcggatctttacgtaaaaaacagcaataaaagataaaaagtaagatatgttgcggttggtgtattgtgcagttgtttcgggtaacaggatgaaaaaaacagcaataatacaaaataattaaacgatatcactgattactcaatgatatcgttatcttttatgccacacaggccgccgggcggacacccagggtatggcagatagcgtaagtcagttccgcgcggttcagggtgtaaaaatggaaatctttcacgccttcacggctgagcagtttcaccatctccattgccacggaagccccgaccagcttgcgggattccgggtcatcatccaggccttcaaacatggtgccgagccagcccgggatgcggacattagtcattcctgcaaagcgctgtaactgtttgaagttagagaccggcagaatacccggcacaatctccacatcaataccggccgccgcgcagcggtcacggaaacgcagataggtgctgacatcaaagaaaaactgcgtgatagcgcgatctgcaccggcatcaattttctttttcaggttaatcagatctgactgagcactgcgtgcttccggatgcacttccgggtaagcggcgacggaaatatcaaaatcggcgactgattttaacaaaccgaccaggtcagcagcatacatatccggtttgctgctgctgtccggcaggtcgccgcgcagcgccacaatatggcggatgccgttatcccagtaatctctggcgatagttttcagctcatcacgggtggcatcaatacaggtcagatgcggaaccgcaatcagcccggttttctctttgatacttttaatcaccgaatgagtgcgatcccgctcgccggagttcgccccgtaagtgacggaaacaaatttcggcttcagcacactgaggcgttcgatggactgccacagggttttttccatttccggtgtgcccggcggaaagaattcaaaggatacggccacacggccggccagttctgccaggttctgattcagtgcttcgtgctggtctatatgtaaaaaactcatcgctgccccccgcagtcgtccgtggcgcaaatacccttattcattcaaactgcaggttcgttggctgtactcagccagccgggtcacatacctatgtatgctccccgtctgtcttcccttgccgcctgcctgcatcctgaatgacgttgggtatatatcccggcacgtgattatttgaatgtctatacgtttagacgtctggatgtagattacgggatgaattggttaaacgtcaaccactaattgtcacagtgcgggtgagggtttctcacacactgtatgaaagattgtcatgatgaggggaaaagcgcggacagacgggctgtccgctgagaagaattattcgggggttttgcagcagaaatgggtgacaagctgggtcagcagttcacgggtcggctcaataaagcgggtttcgagaaactcatccggctgatgcgcctgttcaattgaaccgggaccgagcaccagggtcgggcacagatcctgaataaacggtgcttcggtgcagtaattcaccgtctgcgctttttcaccgagcaggttttcaatcacaccgaccattttatgatccgtcgggcaggcgtaacccgggatcggcgcgtgcagctcctcaatcgccagccgtcccggccagcgttgtttcaccggctccagcgtggtattgagcatgtcgtcaatatcactgagggtcatgcccggcagcgggcggatatccatatgcaattcacagcagccgcagatacggtttgccgcatcaccgccgtgaatatgaccgaaattcatggtcggatacggaatgacaaacgccgggttattgaatttttctttcagctcgttacgcagcgacatcaggtgcgtgatggattcattcatcagctcaatcgcattgacgccgcgctccggatcactggaatgaccggactgaccggtaatgcggatagcattggagaggtggcctttgtgcgcccgcaccggctgtaacgaggtgggttcaccgataatggcaaaggacgggcggatagcggcattggcggcaaaatagcgcgccccggccatggtggtctcttcatctgcggtggcgaggatatagagcgggtgctgcaaatctttcacactgatatcgcgcagcgcgtcgaggataaaggcgaagaaacccttcatatccgccgttcccagcccgtacagcttgttgttctgctctgtcagggtgaagggatctttgctccagcgcccttcatcaaacgggacggtatcggtgtggccgcacagcagcagaccgccgtcgccatccccgagactcgcgagcagattgaacttgccgcgcgtttccggaacgggttgcacctcgacatcaaaccccagggtttcaaaccaggtcgccagcagattgataacagtttcattgctctgatcagattccgcttccgtggaactgatggaaggtgccgcgatgagctgacgataaatctcaataaatgcaggtaatttaatattcactgttgacagcctttagtcataatagtatcaatattcatgcagtttatgtgaataaaaatacattgtttgtgtttcaggtacaaggtgaagataacttatgttgaaaacgctgattatcggtgccagcggatataccggtgcagagctcgctgcttatatccaacgccacccgcagacggaactgaccggcctgatggtttctgccaacagtgcggatgccggaaaatgcttttcggatctgcatccgcagttccggggcctggtggatctgccgctggagccgctgacagacccggccgccgttgcacaaaataccgatgtggtgttcctggcaaccgcccatgaggtcagccatgacctcgtgccggttttccttgcggcgggttgcacggtgtttgatctttcaggtgcttaccgcgttcagcaggataatttttacccacaatactacggatttgaacacaaacataccgccttattggcgcaggccgtgtacgggctggcggaatggcagcatgacaacatccgcaccgcacaactgattgccgtgccgggctgttatccgacggtctcccagctggcactgaaaccgctgctggataatgacttactgaatctgacccaatggccggttatcaatgccaccagcggcgtgagcggcgcgggtcgtaaagctgcgctgaataacagtttttgtgaagtgagtctgcaaccctacgggctgtttactcaccggcatcagccggaaattgccgcgcatctcggcactccggtgatttttaccccgcatctcggcaactttaaacgcgggatcctggcaaccatcacctgcagactgaaaagcggcgtcaccgcagagcagatcagcgcggcctatcacaaggcctatgacgataaaccgctggtgcgggtgtatgaccacggcgtaccggcactgaatgccgttgttggtcagccgttttgcgacctgggctttgccgtgcagggagagcatctgattgtcgctggtgcagaagataacctgctcaaaggagcggccgctcaggcggttcagtgcatgaatattcgttttggctttaatgaaacgctgtccctgctgccacaataagcagacagcccggctcactcttttatctgacggaaaacggaaatggaaccattagtcatcaaattaggcggtgtgttactggacagcgaagaagccctcgggcgtttattcaccgcactggccgcataccgggcgtcaaatgaccgccgcatcgtcatcgttcacggcggcggctgcgtagtggatgaactgatggcgaaattacagttaccggtggtgaaaaagcagggactgcgggtcacgccggcggatcagatagacattatcaccggggcgctggcgggcagtgccaacaaaacactgctggcgtgggcgacccgttatcagctcaacggtaccggcttgtgtctcggggatggtcagagtgtcaaagtcacaccactaagtgacgaactgggccatgtcggcaaagcggcaccgggcagcccggtattgctgaatctgttactgaacaacggttttctgccggtcatcagttccatcggcatcacggaagacggactgctgatgaatgtgaatgcggatcaggcggctaccgccattgcggaaacgctgggcgcggatctggtcctgctgtcggatgtcagcggcatcctggacggcaaagggcagaaaatcaaagcactcgatggtgtacatgcacagaaaatgatcgacgacggcattatcaccgacggcatgattgtgaaagtgaatgcggcgctggaagcggcggccacactggggcggccgggggatatcgcctcctggcgtcatgcggatcagttgcatttattatttgatggcgaagccatcggcacgcggatttccgcgtaatccggattatcagcacattggcagaatcactccgcagcggcggataacatttactgaaaggacagggttatgacagaggcaaaaaaaacaggcattaaaaaaatcgtactggcttactccggcggtctggatacatcggcgattattccgtggctgaaagagcactatgataactgcgaagtggtggcatttgtcgccaatatcggccagagcgcggaagatctcgacggtgtcgagcagaaagcactgaactccggggcatcttcctgctatgtcgtcgatctgcgtgaagaatttattaaagattttgtctatccggtgctgaaaagcggcgcactgtatgaaggtaaatatctgctcggtacatcgatggcgcggccgattatcgccaaagcccaggtggagctggcactgaaagtcggcgcggatgcgctggcacacggtgcgaccggcaaagggaatgatcaggtgcgctttgaggggacctacaccgccctggctccgcagctgaaagtcattgcaccgtggcgtgagtgggatctgcgttcccgtgaggcactgctggattacctgaaagtccgtaatatcccgaccaccgcgtccctggaaaaaatctacagccgtgatgaaaacgcatggcatatctctaccgaaggcggtgtgctggaaagcccgtggaatcagtcgaatgccgattgctgggtatggaccgcagatccgcaggaagccccggatcagccggagctggtcactgtcaccattaaggccggtgaagtcaccggggtgaacggcaaagcgctgtctccgtataactgcctgaatgccctgaacgaactgggtgcgaaacacggtatcggccggatcgatattattgaaaaccggctggtgggtatgaaatcccgcggttgttatgaaactccggggggtaccatcatgatggcggcactgcgcggactggaagagatcatcctcgaccgcgacagcttcaaatggcgtcagcagattggcctggaaatgtcctatgtggtgtatgacggccgctggtttgccccgctgcgtaaatccattcaggcagcggcggattccctggcggaagaggtcagcggtgaagtggtgctgaaactctataaaggacaggtcacggcgatccagaaacaatccgccaacagcctctattccgaagagtttgccactttcggtgaagatgacgtatatgaccacagccatgcgggcggctttatccgcctgtattcactctcctcgcggatccgtgcgctgaaagcacagaaataaccggcgggagacagggatattatgcacagggacgtgcatcagactgatttatcattaaaaacagaaagggaaaaagtatggcactgtggggcggacgcttcagtcaggaagcagatcaacggttcaaacaattcaacgactcgctgagattcgactatcgtctggcggnnnnnnnnnnnnnnnnnnnnnaggagcaggcggcgctggagcaggcactgaatgagctgctggcggaagtgcaggccgatccgcgtgccattctgcgcagtgatgcggaagatatccacagctgggtggaaggcaaactgatcggcaaagtcggcgatctgggaaaaaaactccacaccggacgcagccgtaacgaccaggtggcgacggatttaaaactgtggtgcaaagaggcggtcagtcagatcctcgcggcattacaggaattacagcaggcgctggtgctgacggcggagcagaatcaggatgcggtgatgccgggttacacccacctgcagcgggcgcagccggtgacatttgcccactggtgtctggcgtacagtgaaatgctggcgcgggatgaaagccgtgtccgcgatgctctggcgcgttttgattgcagcccgctcggctcgggtgcactggccggaaccgcgtatgccatcgaccgggaacagctggccggctggctgggattttcgggcgcaacccgtaacagcctcgacagtgtgtctgatcgtgaccatgtactggaactgctcagtgatgcggcgatcagcatggtacatctctcccgctttgctgaagatatgattttcttcaacagcggcgaagctgcgtttattgaattatccgaccgcgtcacctccggctcttccctgatgccgcagaaaaagaacccggatgctctcgagcttatccgtggtaaatgcggccgggtgcagggcgcactgaccggtatgatgatgaccctcaaaggtctgccgctcgcctataacaaggatatgcaggaagacaaagaagggctgtttgatgcactcgacagctggctggactgcctgcatatggcggcactggtgctggaaggcattcaggtgaaacgtccgcgctgcgaggaagcggccaaacagggttatgccaacgcgacggaactggcggattacctggtggcaaaaggcgttccgttccgcgaggcgcatcatattgtcggtgaagtggtggtcggcgcgatagcaaaaggcgtggcgctggaagaaatgccgctgacagaattgcaggaattcagcccggtgattgccctggatgtgtatgacatcctgtcacttcagtcctgtctggaaaaacgctgcgcgaaaggcggagtctcaccggaacaggtggctgcggccatcagtgaagctaaaatccggctgaaactggtgtgacataatgcattgtccccggatcacactttgttccccgtgatccggggtttttatttattatcatcatgcatataacgcgaaggccatattccgccctgcgccggggggatatcgccgcctccggtctgacagtcatgctttcttaccggttaatgcggaatgctccagtcagagcttgtgcggtatgatggttatcaatggatttacattgttaatcacggcagggaatatggacgattttctgaaccggctggaaaaacatacatggcttttccgggcgggctgttatggcatggggctgttgtcagtggcacttatatttttatcgcgcggtaatccttatctgctggcgtcggcaaccggtgcgatggcggcggcattttacctgtttatgctgcacagacagtcttatgtaaccgggcttatcgcaaaagccgggggcgtgacggcatttctcgcacgggaagtttcacctgaggaatggccggtttaccgggatgttgcggacctgactgggatccggcgggaatttgatgcctggtgtgcgcaacaggctgtaccggtgactatcggagccgcagagcaggcgctgggcgtgataatggcggaaacgtacggcattgagcgggaagtgcgggatgacgcttactcactgaaatccgtcataacagggcaggcgcatcgtcagtcagtattgacactgctgagcgccgccttatttatgtcgggcgggatgctgctgttctgtggtttagctgttctccggccggaatttctcaatgacctgctgaccggcctgatattactgattgccgccatggtggtttactggctgacccggtaccgggaaaaacagctcacaatgcagatgctggcctctccggtgaccaccgcaaccctggacatactgatgagtgtggcggtggccgccgatattcatgatgctttttgtgactatatgcgcacagtaccgaaaccggtcaccatcggcagagccactgactggctgacagcggaacagaaacggcggcagcgctgacaaaaaagatgcctgttctgattttcaggataaaaattcgcttaataatctaactgcgttatgatagttatcaattgattttatctattaatcgcagacggagacacaggcatgaatatccgggatttggaatatctggtggcactttctgagcataatcactttcgccgcgcggcagatgcctgtcatgtcagccagccgacactgagcggacagatccgcaagctcgaggatgaactgggtgtgatgctgctggagcgcaccagccgcaaagtcctgtttacccagcagggaatgctgctggtggatcaggctcggaccattctgcgggaagtgaaaattcttgaggaaatggcctcccttcagggagaaagcatggcagggccgctgcatatcgggctgatcccgaccatcgccccgtatctgttgccgcatatcattccggaactgcaccggctgtggccgaagctcgagatgtatctgcatgaagcccagacccatcagctgctggcgcaactggacagcgggaaactcgactgcgcgattctggcgcgggtaaaagaaaccggcagctttattgaagagccgctgtttaatgagccgatgaaactggcgatttatgatgagcacccgtgggcatcccgtcaggaagtggaaatgcatgagctggccggggaaaaactgctgatgctggaagacgggcactgtctgcgtgatcaggcgatgggattctgtttccaggccggtgcgcgggaagatacccacttccgggcgacaagtatggaaaccctgcgcaatatggtggcggcaggcagcggtatcacgttactgccggatctggccattccgccggagcacaaacgcgacggcgtgtgttatctctcctgcaccaatccggagcctttccgtgaagtgatcctggtttaccgtccggggtcgccgctgcgcagccgttacagccagctggcagaggctatccgtgcaaaaatgtgtgcttattaccagcaggagcctgcggcttaaaataagcggttaagtccgttcagtgcggcaacccggtaggcttccgccattgtcgggtagttgaaggtagtattgacgaaataatcgatggtattaccttcacctttctgttccataatcgcctggccgatgtggataatctcagccgcgcgctcgccgaagcagtggatccccagaatctgccgggtttcgcggtggaacagaattttcaggctgcctgcatccagcccggcgatttgcgcccgtgccagatgtttgaactgcgcccggcccacttcatacgggatcttcatcgccgtcagctgctgctcggttttaccgaccgagctgatttccggaatggtgtaaattccggtcgggatatcctctatcagatgcagtggcgcattgccgtcatgggtgatagcacgggcggcaatccgtccctggtcataggctgccgaggcgaggctcgggtagccgataacatccccgaccgcataaatcgccggattgctggtctggtaggtatcattgacactgatgagtccccggctgtcagcggtgatcccgacatgctcaagaccgagattatcggtgttaccggtgcggccgttggcaaaaagcaggcagtccgccttcactttttttccggagcggaagtgaataatcacaccgtcatccgtgccctcaatccgctcatactcttcattctggcggataaccacgccgttgttccagaaatgataggtaagtgcatccgacatttcctggtcgagaaacgccagcaggcggtcgcgagtgttgatcagatccaccttcacactcagaccgcggaaaatagaggcatattcacagccgatcaccccggcaccataaatgatgacatggcgcggttcgtgtgtcagtgacagaatggtgtcgctgttatagatgcgggagtggctgaaatccacatccggcgggcagtacgggcgcgagccggtggcaataaccacattctccgcacggagaatatcgcagctgccgtcgctgtaacgcacacggacatcaccctcttcggtaaatttagcttcgccgcagaacatggtacagccgttgcgctcgtagaaaccgcggcgcatgccggtctgctgggtaatgacccggccggcgtgagccaggatttcagaaaatgaagatttcagaacccgggagttatcactgtacagcggattctggttaaattcgataatacggctgacggcgtggcgcagcgctttggaaggaatcgttccccagtgggtccagccgccgccgacgtcatcataacgctcaattacggcaacccgttttccctgcttcacaagtcccattgccacaccttcgccacccgggccggagccgatgacaatggcatcaaactggttctgttgcatatgagaagtaacctgtttatacataagttaacaacatcatcttaacatcagatggaaaatcagcctatgattagtaaggtttacaggtcacacttcgggaaatctttttttcaggaatttcaccggccataagctaatcatcactgaaaaaagtattaagtttgttatattgatccgtctgaataaattgagagtctgaattccgtgagtaacgtgattggtgtaagagcaaaacagaaagaaaaaacccgccgggccctgattgaagctgccttcagtcagctcagcgccgagcgcagcttcaccagtctgagcctgcgcgaggtcgcccgtgaagccgggatcgccccgacctctttctatcgccatttcaaagatgtggatgaactggggctgacgatggtggatgagagcgggctgatgctgcgccagctgatgcgtcaggcgcgtcagcgtatcgccaaaggcgggagtgtgatccggacatcagttgcgacatttatggagtttatcggtaataaccccaacgctttcaggttattattgcgtgagcgctccggcacatccgcggaattccgtgcggcggtcgcacgggaaatccagcattttattgcagaactggcagactatctggaactggaaagtaaaatgccgcgtcagtttactgaattgcaggcagaatcgatggtgaccatcgttttcagcgccggtgcggaagcactggatattgatctggaaaagcgggcgcacctggaagagcggctggtattacagctgcggatgatcgccagaggcgcgtattactggtaccgccgcgaacaagagaaaatgcatgactccgattacaccccattaatctgacacttatcaccaaggagaacgttatgacggaacaacatcgccgtgacaaaggaaccttactgctcgcttttattgtcgggctttcagtacacggtactttttcagcactttttaattccgcagtccatttttcggtttttccggttctggcattgtgccttgcggtctattgtttccatcagcgttacctcaaccagatgctgccggaaggtatgccgaaactggtgaccggtacgttcttcttgggtctgttctcctataacgccctgatgcgcgcagaatatccggaagccggatcaaactacttttctgccgtctttattgtgattatcgccttgtggctctaccgggcgatgaaacagcgccgtgccaccgggcaggatgaagtgacagagtaatcgcggcaatttactgaatatacccccggtggcaacccgctgccggggttttttgtgtctgctttattgttccggccggacaatccccaggcaaaccgcctcttcttttgcacccggctgtgactgatagaccacctgtttacgcttcgcgataaccagatccggccagtcttccagagcaccggtaaacggctcatcggcacaggtccggtttattttgccgatcagcagcgcaccgtgacggcggatatcatcgcgggtgacatgcagattataaatattggttgcccggtaatcatggccagactcattgatccacggctgaagtgtttccggctgatatttaccgtaaaacgttacccattcatgcagatattccccgccggtgtatttcagcggttttccggtttcctgttcccaccagctttctgcctccgccgtaaaggttttcatcccgatatttttttgcccggcgtcacggatgttgaatcccatcactgcggcatagcctgtaataacaatgacggcaaacactatcagcccgttcatcacgtttttcagcggttttaccggcggtgtgaccacagagcagatcagtgccggaatacacagcagaacaaaaggctgcagccactcggtaatacgtccgccctgatggaaggtgaaccagacataaatcaccgcgagtggtgccagaatcataatattgataagccgttttgcctgctcttccggccagccgaaacggccgcctttcaggcggataatgacggcaataatgatcagcggatagaacaccgtaaacagtgaaccggtggttttcagggtcaggccggttttaatctgtgaatcgacccatttaaaggcggcaaaatcattattcatcagccagataacattcgggatgaccagtgcaaaccagatggcgatcgcagcataaaaccagggggaacggtaactttcccgcgctttcggcacaaacagggtaaagagaaagaccatcccggtgagtgcgagcgtggaatatttccccatggtcgccagcccggatgtcagtgcaaaaccaatccaccaggccgggttgtcataaacggcgcggacaaaaaagtacagcatccacggccagaaggtgaccaggatatagttatcattataagggattaaatcgaaattaatgatccccgacagattcagtgacaacagtgccagccaggcgtaatcagaacgctgtgtgaggcggtgtgtcagataccacaccccgcacataccaataccgatgccggtaaaatgaatgaagtaccagtaaaaatcggcggcaatcaggtcagggaaggcaatgaccgggtacatcagcataccgaccagccacggatttttcggtgcaccccattcaccggttttgccccagttcagggcttccacggcatcgtagggtaccgtcggatccaatccgtagctgacaataatccagagcgtgacataagcagcgacccaaaaccagacagggcggtgcgacgtttgttgtgaaaagtgcataattctatatcttggttaaaataatggctgtgttcattattcacccggaggcgaaatgatagatcgttttgacggaaatcagggtaaactagccgccagcgaatcattgtcatggctgcgggcagcccggaagccatgaatatagttttgtactgttcatttacatggtaaatgttaacacaaattaatcagttatttttaagcgagtaaggtatatggccgctatttcaaaaaaaccagcccggtcacggacaccaaagaaaagccgtgaggagctcaacgcggaaggccgtgaacgcaaacggcagaaaaaacaccgcggtaatccgtccggtgcccgtcagcaggatgatgcccgcaagaccggccgtggtgcggagaatgcggttgctgatccgcgtatcggcagtaaaaaaccggttccgctgtttgcggaaggtaaaacctccgtcaaaccggcggtaaaaaaaccggctgagccggttaaagccagactgtctcctgaagaggaactggcaaaactcgagaatgacgagcgtctcgatgcgctgttactgcgcctggagaacaacgaaaccctgaccgcagaagaaaatacctacgttgataccatgctggaacgtatcgacgcgctgatggaaaaactcggtatttctcttgatgaagatgatgatgaagagaaaaccgacgacatcatgcaactgctgaaagggcgctgatcctcagttattttactgaaaccggcggtactgcatcaaaaccggcgtaacgggcgactgttatgccggttttcttattttaagcctacgtgtttgcggtactgtctgccttaacagaggattaaacagcgccgtgcggcggttatctgcaatatcagcgctgtttttctgtgacagttatggcagatatcttactgagaataataaataattctgaagagtaatacgggattatgctgatgctgttcaccgggagaaactaatgagtgatacaaaacgtccgccgcacgatcacagccgctttatccgctgcctcggctgggtggcaacctttacggcattttgtatgtatgtctcctatattccacagattatggataatctggcgggacataaaacatcaccgctgcaaccactggctgccgcatgtaactgtacactttgggtaatttacggtcttaaagtgaaagatctgccggttgcggtcgccaatgcccccggtgtcctgttcgggctggcggcgatgctgacagcattatagtgatccgcctgattatccgtctgtggcacgatcatattaatcgggcggcagatccgataaactgtgcggcacacaaaaccgtcagagaacggaaatacattaattctgcaatggtgaggcaaaggggagagcatgtctgacgcgatcatctgggatctggcattgatccggaaatataactattccggtccgcgatacacttcgtatccgaccgcactggaatttaatcagcagtacagtgacagtgattttatcgcctcagcaaaccgctatccggagcgcccgctgtcgttatatgtgcatatcccgttctgccataaattatgttacttctgcggctgtaataaattagtcacccggcagaagcataaggcggatgaatacctggccgtgctggagaaagaaatcgccgcccgtgccccgttgtttgccggacgcgaagtgcatcagatgcactggggcggcggtacgccgacctatctcgataaagcacagatcagccgtctgaccggtatgctgcgtcagcatttccgctttgcgccggatgccgagctttccattgaaatcgacccgcgtgaaatagaattggacgttatcgaccatctgcgggcggaaggatttaaccgcctgagcatgggggtgcaggatttcaacaaagaagtgcagcgcctggtcaaccgcgagcaggatgaagcgacgatttttgcgctggtggagcgtgcccgtgcaaccgggtttgaatccgtcagtatcgacctgatttacgggctgccgaaacagacgccggaaagttttgcttttaccctgaaacgggtggcggaactgtcaccggatcgcctgagtgtctttaactatgcccatctgccgaatctgtttgccgcccagcggaaaatcaaagatgaagacctgccttccgcagagcagaaactgacgattttacagcagacgattgaaaacctgaccggcagcggttatcagtttatcggcatggatcacttcgccaaaccggatgatgagctggcggtcgcacagaataacggcatcctgcaccgcaatttccaggggtacaccactcatgaggaatgcgatttgctgggctttggtgtctctgcgatcagcatgctgggtgaccactatgcccagaaccagaaagacctgaaaacctggtatgcgcaggtggaagagcgcggcaacgggttgtgccgtggtctggtgctgacagaggaagattgcctgcgccgcgatgtgattaaggcgctgatctgcaacttccggctggattattcacagattgaaaagcagtataacctggattttaaaacccatttcgccgaagatctgcaattattgcagccgatggcggatgacgggctggttgagatccgcgacgatgctctggtggtcacaccgcgcggacggctgcttatccgtaatatctgtatgtgtttcgatacttatctgcgcaaccagatgcgtcagcgtcagttctcccgcgtgatttaatctgtttccggggttgatgcagtatcatcaatcccggcttctttcagtttccgcgtcagcgtattgcgtccccagcccagcaggcgggcagcatcctgcttgtgtccgttgctgtaattcagtgcacactgtaacagggtgcgttcaaacagcggcagagcatctgccagcagatcggttttcccggcccgtaactgtgcatccgcccactgcgccaggtgctgatcccagtttccggctgccggattatggctgtgctcactgcggatgtgttctccggcggcagtcatggtcaggtcggcaggcagatcctgcggcagcacttcctgggtggcggacatcacggtcagccagcggcagacgttttccagctgacggacgttgccggaccacggcagctgcatcagcagcgcttcggtatccggatgcagggttttcgcttctgttcccagctcttttgcggttttctgcagaaaatggcgtgtcagacgcggaatgtcccccggccgttcccgcagcggcggcagctgcatgcggataacattcaggcggtggaacaggtcttcgcggaatttaccttccgccaccagccgttccagatcctgatgggtggcggcaataatcctcacatccactttcaccggcgcgtaaccgccgacgcggtaaaactggccttccgccagcacacgcagcagccgtgtctgaatatcgagtggcatatcgccgatttcatcaagaaacagcgagccgccgtccgcctgctcaaaacgcccctgccgcacctgtgatgccccggtaaatgcccctttttcatggccgaagagttccgattcaatcaaatctttcgggatcgccgccatattgagcgcaataaacggcgcatccgcccgcgggctgtgatggtgcagggcgtgcgccaccagctccttccctgtcccggattcgccgttaatcagcacactgatggaggagcgggataaccggcctatcacccggtatacctcctgcatggcggcggattcaccgataataccggacaccggatcggcggccgcttcctgccgtactggcagatgctgctcgcggtaatgttccagagcacgggccaccagtgtgaccgcatcatctatatcaaacggtttcggcagataatcaaacgcgccctgctggtaagcattcactgcggcatccaggtcggaatgggcggtcataataatcaccggcagtaacgggttatgctgtttgaccgccgccagcagagacaggccgtccatgcccggcatccggatatcggagatcagcacgtccggctgtccgctgttcagggctgcaagggcattttcagcactgtcaaaacagacacaggcataaccggcgctgctcagtgcgcgctcaagcacccagcggatcgcgctgtcatcatcaacgacccagatttttcccggctgcatatgacctcctcaacaggcttactgacggattggcagataaagtgaaaataaggtgtgacccggccagctgctgaactcaattttgccgttatgctgatcgataagattacgggcaatggataaacccagcccggagccgccttcgcggccgctgaccatcgggtagaacagggtatccaggatatgcggcggaatacccgggccgttatcctcaatatcaatcctggcggccagccggtagcgttcaccgtgcagcattacctggaatgcggtgcgggtgcgcagaataatggtgccgcctgcggaatgcagggcttccagggcattgcgcataatattgaggataacctgctcgatctggtcgggataatgcgacaactccggcaaactgggatcgtagtctttaaccagcgtgatattgtccggtttttccagattgatgagctgaaaaacgcgttctgccacatggtgaatactctgcatacttttctgccccggatgctgagggccgagaaggcgatcaaccagcgcccgcaggcgatcggcctgttcgataatcacctgtgtgtattcctgcagtgccgggtccggcagcgcgcgggataacagctgtgcggcaccgcgtaacccgccgagcggatttttgatttcgtgcgccagtccgcgcaccagatcacgggcggcggcctgttgcgcctgttgtaattgttcctgagtaatacgccggtgactgtcgagcggtgtcagttcgagcagaataaaatcgccggataccggctgggcactcagcgaaagggcgtgcatctggttatttaccaccagggtcacatcgttgtcagtaaagctgtggccttctgccagtgtggcctgaaatgcggcggtatcgagggaaaggtagctgtataaaataggaagcggtgtgccggtgagtttacgggcactctgggcgaataactgcatggccgactgattggcgtaacggataatcaaatcattatccagcagcaggacacagttgatcagtgaatcaaggagctgctctgcctgcggtttgttatccgggttcatattatccacctctttgcaccaatttggtgcattgtagcgtatttaccccgcaggagaaaaggacccgcccaacggcggggccagtgcttcacggcaacaaaataaaccggagcctgtcactctgagtgccgccagacagcggcaccatcagaatcacacgctgtaatacatatcaaattcaaccggatgcggcgtcatattcaggcgctgaacatcagcacgcagcaggtcgatataggtgttaatcgcatcttcggtaaacacaccgccgcgtaccaggaactcatgatctgctgccagcgcatccagtgcatcgcccagagacggtgcgactgtcgggatttctttcgcttcttccggtggcaggtcatacaggtttttatccatggcatcgcccggatgaattttattgatgataccgtcgagaccggccatcagctgtgcagcaaaggccaggtacgggttagcagccgggtccgggaagcggacttcaatacggcgggctttcgcgctggacacaatcggaatacggattgaggccgaacggttacgtgcagagtaagccagcatgaccggagcttcgtagcccggcaccagacgtttgtaagagttggtggtcgggttggtaaaggcgttcagggcacgggcgtgtttgatgatcccgccgatgtaatagagtgccatttctgacagaccggcatatttatccccggagaacaggttaacgccgtcttttgacagagacatatggcagtgcataccggagccgttatcgccgaccagcggttttggcataaaggtcgcggttttgccgtagcggtgcgccacattctgcaccacatatttgtacatctgggtttcgtccgctttcagcgtcatggtattgaaacgggtggcgatttcgttctggccggcagtaccgacttcgtggtgatgtgcttccacgaccagacccatctcttccatgaccagacacatttcagaacgcagatcctgtgaagaatcgacaggcggcagcgggaagtaaccacctttcacgcgcggacggtggcctttgttgccttccggatagacagtaccggtgttccaggcggcttcaatatcattgatatgatagtaagcaccggagatatcggcaccgaaacggatgtcatcaaacaggaaaaactcaggttcaggcccgaacaggacggtatccgcaataccgctggtgcgcaggaaatcttcggcacgtttggcgatagagcgcgggtcgcggtcatagccctgcatggtgttcggctctaacacatcacagcgcagaaccagtgtcgggacttcaaagaacgggtcgatcagggcggattccgcaatcggcatcagtaccatgtcagattcgttgatgcctttccagccggccattgaggaaccgtcaaacatttttccgtcttcgaagaaatcttcatctacctgatgagcagggatcgacacatgctgttccttgcctttggtatcggtaaagcgtaagtccacgaatttaacgttgtactcttccatcatggtcaatacatgttcaacagacatattcagatctcctggtttgggatgttccgtcaatcctctggtggtcacccggagggacactgattgcggttctcacattgcttgataaatataaagcgaaaagcgtgccaacttttttaaaaggggggtaagccgcgttactgctgcgggttactcagataaggatagcggaaacggggtgaattgcaccatattggtgcatttttgattcggcttgcagatccgggatgcactgttatggtgcatcccggcagcagataagaataatggctattttttctcaggataacggtctttgatggcagcgatttcatcactctgtgaggcatcgatacacttcatcacagtgagttgtatgccgtcagtatgacttttataaggacgtttcagataatcacgggcgacctgagccgcttcctcataagcttctgcgggatagcggccgcgttcaacataagcaccggttgcggcattggcttcccgctgcataacttcaccgggttcactctgcgccaggcagtaactgagggtgaagttttccagcgcatttttcagcagcgggcgatcctgcggggatgcggcggcgatgccggatatcagtaaactgctgattgctattagcttaaaatccacaatttggcctcactggctgactggtaataacaggtatcggaacaaccggaaccatcccataatgtggcgtggcccgtggcatcttcccgggaaacattaaagacaaccaatcctttctttccctgaaaagcttccatttccttctttgattttgcggtcatatccggggcaccaagagccgactctaaaaaatcaatcagatcagcaactttgaatatataccattttttgtccgcaccggatgaagtcgcccaccgcgggctgcggctgaccggaacaccggaataattaagcgcataactcatccggattgcacacgcattctgaaaaattccctgatcaatattgtattgcactttaccaccaatttttttgcccacttctttaacgctgacattaattcgcgcaaaatttgcccacatggtcacaaaatcaggtttagtcatgttattgtccttaataatgattaatccgtaaaaatacatatttatcagtgcattgtaagtatagggttgtggcggtcatttgtccatttgacatagggaaggaaaacaggagaaagaggtgattgccggaaccggctgcaaacgcaaaaaaagtatctcttttatcctgaataggtttatgatatgcccctctgaattcgtcgctgagcgtggtatgcgccgctgattttgtaaaaaaatggcaggatgaattttatctccatgttttataatcatttattttttaagtgagatgtatcacacttctttcacttgcctcagagaacgtgtaaaataccaccaaacatctacaccatagatgggcgttgttgaaaagaatgctatctgtgacgtaattcccatccattaacgaaaacggtacaagtctttgtctatcgagaaattaagaaatattgccatcatcgctcacgttgaccatggcaagaccacgctggtcgataaattattacagcagtccggtacgtttgatgagcgttcaaaaccggaagagcgtgtaatggactccggcgatctggaaagagagcgcggcattactattcttgcaaaaaataccgcgattacgtggaacgactatcacatcaacatcgttgacaccccggggcacgccgatttcggtggtgaagtagaacgtgtgatgtccatggttgacagcgtactgctgctggtagatgcgatggacggtcctatgccgcagacccgttttgtaacgcagaaagcgtttgcaaacggtctgaaaccaatcgtcgttatcaacaaaattgaccgtccgggcgcacgtcctgactgggttatcgaccaggtgtttgacctgtttgacaacctcggcgcaactgatgagcagctcgacttccctatcatttatgcatctgcgctgaatggtatcgcgggcaccgattataacgatatggcggatgatatgaccccgctgtacgaagctatcgttaagtatgttgagccgcctcaggttgacctcgacggtccgttccagatgcagatctcccagctcgattacaacaactatttaggtgttatcgggattggccgcatcaagcgcggtaaagtcaaaccaaaccagcaggttactgttatcgatgcggaaggcaaaacccgtaacggtaaaatcggtaaggttctcggacatttaggtctggatcgtatcgaaacggaagttgctgaagccggtgatatcatcgcgctgaccggtctgggcgaactgaatatctcagatactatctgtgacaccaactgtgttgaagcattaaaaccactggccgttgatgaaccaaccgtcagcatgtatttctgcgttaacacctcaccattctgcggtaaagaagggaaatatgtgacttcccgtcagatccttgaccgtctgaagaaagagctggttcacaacgtggcactgcgcgttgaagaaactgaagacccggatgcattccgtgtatcaggccgtggtgagttgcacttatcggttctgatcgaaaatatgcgccgtgaaggttttgagctggcggtatcccgtccgcgcgttatcttccgcgacatcgacggccgtaaacaggagccgttcgagcaggtgactctggatattgaagaacagcaccagggtgacgtgatgatggcactgggtgagcgtaaaggcgaactgcgtgacatgatgccggatggcaaaggccgcgtacgtctggattacagcatcccgagccgtggtctgattggtttccgtactgaattcatgaccatgacttccggtaccggtttactgtatgccacattcagtcactatgatgatgttaaacagggtgaaatcggccgccgtcagaacggtgtgatgatttccaacggtcagggtaaagcagttgcatacgcactgtacagcctgcaggatcgcggtaagctgtttgtcggtcacggtactgaagtgtatgaaggccagctcatcggtattcactcacgttcaaacgacctgacagttaactgcctgaccggtaagaaactgaccaacatgcgtgcatccggtactgatgaagcgaccacactgactccgtttatcgagaaaaccctggaacaggcgttagaatttatcgatgacgacgaattagtggaagtaacgccgaagtctatccgtctgcgtaaacgccacctgactgaaaacgaccgcaaacgcgcacaccgcagcaaagattaatctctgccggttgttttgattcatgccactcagggcgcctccgggcgccctgagctttttctgcctgctgatcacataccggtcacaggctgataaccgcacggaaatacgggcgggatcgcactcccggatattttttctcaccgaaaatggttttcactctgttcaggaagggactctgcgggtagagtaaaaataattcatcaacccggagggatggtatgctttatatttttgacatgggtaatgtcattattgatattgattttaaacgtgttttatcagtctggagtaatctgagcggcaagccgctgtccgaactgagcagtgattttattcacggcgaaacctttaaacagcatgaatgcggcaaaatttccgatgttgaatttgccgaagccattaatgaccagctggatatgtcgctgagtttcgatgagtttgccgaaggctggcaggctatctttatctctgtccgccctgatgtgattgatatcatgaacaggctgcgtgagcagggacaccgcgtggtggtgctctctaacaccaaccgcctgcatcaggattactggccgcagcactatccggaaatcgccgcttccgcggatttcctgtatctctcccaggatctgggactgcgcaagccggacccggatatctatcagtatgtgcttgaaaccgaagaatttgagccgaaggatgccgtgttctttgatgatgtccgcgaaaacgtggatgcggcagtggcactcggtatcaaaggcgtgttggtcaccgatcgtgacacagtctcccgttattttgcagagtatgatttttccgcagaagtgactgagtaattcaggtgtgattgttttttaaacggatatgacatgattgcattaatacagcgtgtgacccgcgcggatgtccggatcgccggggaaattgccggtgaaatcggtcccggattgctggttcttctgggcgttgagcgggatgacgacgaacaaaaatcaaaacgcctgagtgagaaagtgatgggttaccgcattttcagtgatgcggacggaaaaatgaacctgaatgtggcgcagtccggcggtcagttgctggtggtgtcacagttcaccttagcagcggaaacacaaaaaggaatgcgcccgggattttcaaacggcgcggcaccggaaaaagccaatgccttatatgagcactttgtagcgcagtgccgtgcagcaggaatggtgacagaaacaggccggtttgcggctgacatgcaggtcagtctgacaaacgatggtccggtcactttctggctgcaggtatgatacaacagtctcaggccggtcaccggttaccactgacaggagaaagtgcgatgtatcatttacgtgtaccaaaaaccgatcaggagctggaaagctattttcatttccgctgggcgatgctgcgcaaaccgctgaatcagccgcaggggtcggaaaaggacggttatgatacctatgcacatcatcagatggtggtggacgaaaccgggcagcctgtggctgtcggccgcttgtatatcaatgcagaaaatgaaggcgcgatccgctttctggcagttgatccgcagatgcagggacgcgggctgggcacactgattgcacgcgcactggagtcagtagcccgtcaggaaggtgttaagcggattgtctgcagtgcccgtgaggaagcggtcgcattttttgaaaaatcaggttttgaaaacagaggaccgattacaggcccgcaaacgacgcctgttcgtcatttttttatgattaaatccgttgaaaccctcgatgcgatcctgcatcgccccgactggtgtgctgaattacagaaagcatggtatgaaactattcccctgagcgaaaaaatggggatccgcattacacagtataccggtcaggaatttatgaccaccatgccggaaggcccgaaccagaacctgcatcagaccatttttgccggcagccagttctcgatggcgacactgaccggctgggggcttatctggctgctgttacaggaaaactccctggacggtgatattgtgctggtggatgccaatatccgctaccgcaaagcagtggcaggcagaccggaagccattgcttcccgcgataaactcagcggcgacctggatcgtctggcacgcggcagtaaagcgcggattaagctggaagtgactgtcgggcagggggatgaagtcggtgcggtctttaccggcacctatatggtgctgcccggccagaaagacagcgcggagtgacgggtaagatgcatttcttttgctgtggctgacagagagaacaattggtcagatacggcggtgataacgggcaggcgaacgaaaagcatgcgcgtcatggatgacgcgcctgagcgcacagggaagtgttcacagcggcttttcgttttgcccgttatcagagctccccggtttcagaagatcacaccacagcgccttacggcgctgagattgctgacaaagcaggatnnnnnnnnnnnnnnnnnnnnnnnnnnnnnnnnnnnnnnnnnnnnnnnnnnnnnnnnnnnnnnttacgggtttgtcaacggcctgaaaacagcgccttacggcgctgtttttgtatcagcaaaggttacagaatttctccggtttcgctgttatccgggatcacccgctgtgcaggcggggcagaaggtaccggctctgcggaaaccggggtgttgctcatttgtccctgtgtgatagcccggtttatctgattcccctgtttatcctgtccggagagcatgccgctcagtgtgctgcggatatcctctgcccgcaactgcccgttcaggcgaagggtgtaattggcgctgccggtcagcggagcaggctgccagccccattgtgacaggatctgactgtccgccccggttgcctgtaatgtgaaactgaaaggcgcagtaccggatggtgtggcctgaaactgcattttcagcaacccttccccggcagaggcggcaaactgtgtggttgccgcgctgtcagctccggcagtcagtgtcagatacgggcggtgcagttcgacccggttaaaggtggcattgccggcactgacagaaagctcgccgtcccataatccccactgaccggatttcaggatctgcatggttttgatgtagccgttcacattggtgagctggaacgggaaaaccggctgtgtatcaatcagcagggcattggagactttaatatcctgcaggcggatagcatcaatcccctgcggggcggcttcctgtaatgcggcgaaccactgttccgggaggctgtacagcaggttgtcggcaacaccgctggtgatattcagtgtccgggtggcgcggttccactccccggtaaagcgcagaatactcttgtcataacggccggtcaggcggttgaccgcaatctgatcgccgcgcagttccagggtgctgataatgtcagaaaaatgctgcccgctgagtgtcagatctgctgcggcgatatctgcctgtccgttgtccgtctgccagcgcccttgtttaaaggccagatttctgaccgtgccttccagatagttaaccgcccactgacgaccttcgagcttgatattggtggcagtgatattcctggcctgaatatccggcaggttctctgtgctgtctgccagctgtgtcagtgtttgcggtgtctgccagcggatatcattaagcagcaggttatccaactgccactgaccttcggcgctgcggcgtccggtggcggtgatcaggccgttttccagtgtggcggtcaggttatcaaacgtgaattgttttccgctgacctcgccctgtgtcaggatatttttcagcggcagcccgtagtaattcaggctgttggcggaaaactggtatttgccgtttccggtcagatcactgccctgcggctgccacggtgtgatcccgccggtaacaccttccgcgtcaattacccggttgccgtcggtgcggcggagtgcggtctgattgagctgtaataacccggcactgagcggcagggtgctgctgtcagcagcatcagaaatttcgatatcccctttctgcacaatgatacgggcaaaccagccgggctcagaaaaactgcgccagtccagggtcagctcaatattggccgcttccagggcaaaatcaccggaaaccgtgctgatgctgacatcactgagcgaaataagtgaaggggaggagagcgagtgacttatcgcggaaagcgagactttgtagcgtgtgttgtcactgataagggctgaaacctgttttgtgccccatgatgtctgcaccacaagggccgtggcaacgataagaataatgaccagtgttatcagccagaaaacagcccgtcccaaccatttcataatgcgctccccgatagataatcctgagggcatactagcgtgaggctctttatggtgacaaggattatcgcggtttttccgcacagagcagcccgcgtgaccgtttccggtcacgcggttaaacagatgattatttctccggcgggaaaatcaggttcagggctatcgcggtcaggccaccggccgcaattcctgaagaaagcagggttttcagccagtcaggcgcgaactgcaggatcagcggctgctgggaaactcccatgccgacagccagcgacagcgcaataatcataatcgcccggcggttcagggtttcgcgggaaacaatccgcaccccggatgccgcaatcgtcccgaacatcacaatggttgcaccgccgagtaccggctccggaatgtgctgcacaaaaccggccacggccgggaacagccccagcacgatcagcatcagtgccaccacataaccgacataacggctggcaacaccggtcagttggatcacaccattattctgcccgaaacaggagttcgggaaggtgttaaagaccgcagacagggcggaattgaggccgtttgccagcacgccgcctttcaggcgcttcatatagagcgggccggacaccggttgttcggagacatcagatgtggcggtaatatcaccgatggtttccagcgaggtcaccataaagatcaggatcagcggcagcagcaggttccagtcaatggataagccgtaatagagcggtgccgggatcacaatcatttcttttggaatttccgcatggttatccggcagcatgcccatccaccaggcggccagatagcccgcggtcatcgccagtaccagtgaagcgacgcgcagatacgggtttttctggcggttcagcagcacaatcaccgccagcacaataccggcgaggatcaggttattggcagagccgaaggtgttatccgccattgcgccgtaaccgccgccgatggaggtcagcccgacctgaattaatgacaggccgataatcatcaccaccacaccggagaccagcggtgtgataatacggcgcgccagatgcaggaaacgggagaggatcacttctgtcatcgccgccagcatcagtgtgccgaacagcgccgccatcattccttccgtatccacaccgttatttttcagtgccataccgcccataatcagcggggcaacaaagttaaagctggtgccctggatagagagcagcccggagccgaccggcccccaggtccggatttgcagcagtgaggccagcccggaagcgaacagcgacatactgataatccgctgggtatcatgggcggaaaggccgagcgcctgggcgataagcaaccccggcgtaatcaccgccacaaacatcgccagcagatgctgacaggcggcaaagagggtctgcggcagcggcggacgatcttccagacgggagatgagttcactatttgtgttagtcgcgggagttacactggttttgtcagaaattgcagagttcatgtcaacaggtccgggataagcaatttccgtattttaatgatctgcggcacaaaagcaatcgtttgcgcggatgagatgttattttttatagcggaatataatcacagttttatttattttaacttgtctttatccgcttttttttctttaatcccgatacctgcttttttcttgcgtaataaggacgttattaacgcgatactgatgtaacaaataccaacaataaaaggggtacgtgaatgtatcaactcgacgtttacggcacgctggttgcggccacactcgtcctattactgggacgtaaactcgtaaaaactgtaccattcctcgaaaagtatactattcctgagcctgtggccggtggtcttctggttgcgattgtattattggggctcaaatccggtatggatctggaagtgaaatttgatgattcactgaaagacccgctgatgctggcgttcttcgccaccatcggcttaaacgctaacttagccagcctgaaggcgggcggtaaaacattatttatctttgtgattgccgttgtgggcttactgattgtgcagaacagtgtcggtatttccctggcgaaaatgatggggcttgacccgctgattggtctgctggccggttctatcacactttccggtggtcacggtaccggggcggcatggggtaaaattttcagcgacagctatggtttcacctctgcaacagaaattgcgattgcctgtgccacatttggtctggtgctcggcggcctgattggtggtccggtggcccgtttcctgatcaaaaagacagccatgagcgatgtaaaattacaggatgatgaagcaccgaccgcgtttgaaaaaccgcaggccggacgcatgatcacgtcaatggttctgctggaaacaattgcactgattgctatctgtctgctggcagggacgtatctgtatagtgttctgacggatttcttcacgtcgatgcagtggaagttccagatcccggcgttcgtgtgtgtgctgtttatcggggttatcctgagcaacagtctgtcactgatgggcttctaccgtgtgtttgaacgggcggtgtcggtgctgggtaacgtcagtctgtcactgttcctggcgatggcactgatgagcctgaaactgtgggaaatcgcctctctggcggtaccgatgctggtgattctggcggtacagaccgtggtgatggcgctgtatgccgtcttcgtcacttaccgtgtgatggggaaaaactatgatgcggcggtactggctgccggtcactgtggtttcgggatgggcgcgacaccaaccgcgattgccaacatgcaggcggtaaccgatcgcttcggtccttctcatgtggccttcctggtggtaccgatggtaggggcgttcttcctggatctgattaacgcactggttattccgttcttcctgacgttacctatcttcccggctgcgggcgggtaacagaacagtttttaaagcaggcaagccacccttccgggtggcttttttcgttatacgttggtgtattgtgtgcgttccggcagccagcgttctatcagggcttttgcctgttccggatagttttggtgcagatgccgtgccacgcgctgtacttccggcagcatgccctgatcgcgcagtaaatccgccactttaaattccgcattgccggtctggcgtgtgccgagcagttcgcccggtccgcggatttccaggtctttctgcgcgataacaaagccgtcgttgctgtcccgcagcacctgaagacgcagttttgccgtctgtgtcagcggggttttatacagcagcacacagtgggagacggcagagccgcgcccgacccggccgcgcagctgatgcagctgtgccagtccgagccgttccgggttttcgataatcatcagactggcattaggcacatccaccccgacttcaatcaccgtggtggcaaccagcagatccagctctccggccttaaactgtgccattaccgcctgtttttctgccggtttcatgcggccgtgaaccatcccgacccgcagatccggcagcgtggcggacagatcatcaaacgtgacctgagccgcctgggcttccagcaaatccgattcatcgatcagggtgcagacccagtaagcctgacgtttttcatcctgacaggcactgcgcacccgctcaataatctcatggcggcggctgtccggaatcgccaccgtggtcaccggggttctgcccggcggaagttcgtcgataaccgaggtatcgagatccgcataagcggtcattgccagagtacgcgggatcggcgtggcggtcataatcagctgatgcggatgaaatccctgctgttcgcctttttcccacaatgccagccgctggtggacaccaaagcggtgttgttcatcgataatcaccagcgccagggaatgaaaacggatatgttcctgaaaaatggcgtgtgtgccgataaccatggccacatcaccggcagcaatggcgtcttcctgtgcctgtcgtgccttgcctttctgtttcccggcaacccagccgacactgatacccagcggctccagccactgacggaaagtgccggcgtgttgttcagccagcaattctgtcggtgccatcagcgccacctgtctgccgtgtgcgatagcgcggagtgccgccagcgcggcgaccagcgttttccctgagccgacatccccctgaatcaggcgcatcatcggtaccggtttttccagatcctgctctatttccgccaccacgcgctgctgggcattggtcggtgagaaggggagttgcgacaggaactgatttttcagtgtttcctgcggtgacagcggcagtgcgtgataacgctgcgcacccgctctgacggccagcatgctgaggtgatgcgccagcagttcttccagtacaatccgtttcagtgccggatgctgcccgctttccagttcggcaagctgtgtatccgccggtggccggtgcagcgttttcagcgcctgcggcagactcatcatcgagcgggtcagttccggcggtagtaattcattgatggcgcaggtatcgagcagctccagcgcctggtcaagcagtttgcggagtgtggcctggcggacaccttcggtggtcgggtagataggggtgagcgtttcctgtaattcaacagacgtatcactctgacggactttgtattcggggtggaaaatttccgggccgtttttgccgcgccggatttcgccgtaagcggtgacctgttttccggtcgccagcgtatttttcatcgccgctgaaaagttaaagaaacgcagggttaagatgccggtaccgtcacttatctggcaggtcatcatccgtttgcggccaaagaccacatcggtgcgcagcacctcgccgctgacggtggcataaattccgggtaacaggtcagtgatggtataaagccgggtctggtcttcataacgcagaggcagatggaaaagcagatcctgaagggtatgcagaccgataccggccagtttgcccgcctgcccggccccgacgccgtgtaaagtcgtgagtgggatagcatcaagcagttgacctttcattttctgctccgtttcgtatcaggcggatggtttcttctgttgcatggcagcccaccagctgtccggcgcaatgatatggccctgttcatcaatctgcggacggggcagttttttctcgcgggcgacctgagccagcaccggataaccgcgttcaaacagcaggcgctgctgttcatcctgcgccagggcgcagcggggatgctcatagagaccggcagcttcgcgctggcgttgtgcctcatagaggatcacggcggcggcaacagacacattcagtgactgtaccatgccggacatcgggatcataatatgctgatctgccagccggatggcttcctgagatatgccggttttctccgagcccatgataatgcaggtcgggcgggtaaaatcgattgcccggaaatccaccgcgctgtcagacagatgcgtggcaagaatctgcataccctgtgatttcaggagggtcacggcatcagcgagtgtgtcgtggttatgcacattcacccagctgttgctgccggcggcggaagagaccagcgttttgattttttccggccagaccgcatgcagatcatggataccgactgcatccgcactgcggatcacggcggagacattgtgcggcttatgcacttcctcaagacacagggtgaggtcaggctggcgcatcgccatcatccggcagatgcgctcataacgttgggaattcataccgtgtgattaattccggttgcggctgacgcgcaggacatccggcataatgcggatcttacgcataatattcgcaagctggatacggtcttttgcggtcaggcggataaaggcgcagtaaacgcggccatctttctcctcggtattcatgctctgaatactggagttggcatcattaattgcggcagtcaggttagccagcgcgccctggtggttaaacatatccactttgatttcagcaatgaaatcggtgtcgatgtcattatcccactcaacggccatgaatttttccggctctttttcatatccgcggatattacggcaggattcatggtggataaccagccctttacccggactgatatgggcgataatcgggtcacccggtaccggacggcagcatttggcaaaggtgataagtaccccgtccgcgcctttgatcggcagcttgcgggtggtgctttcttcggtattactttccggctcgttcagcaggttacgggcaaccaccacactcatggcattccccaggccgatttccgccagcaggtcatccagagtcgccagtttcatccgcaccagctcacggctgatattttcctgcgggatatctgtgatcttacgaccgttaccgagtgcatggttgagcagacggcggcccaggttgacagaatcatcccgtttgaggtttttcagtaactgacggattttcgcacgggcttttgagctgacaacaaagttcagccacgcggcattcggccgtgcgcccggcgcggtaataatttcaacggtttgtccgctggtcagttgctgggagagcgggtacggctggcggtcaacgcgcgcgccgacacaggagtggccgatgtccgtatgcacggcataggcgaaatccaccggagtggcgccggtcggcagctccacaatccggccttccggcgtgaagacataaatctcatccgggaagagatcggatttcacgctctcaataaattcaaaggtgttgccggtgctttgctgaagttctatcaggctttgcatccagcggtgggcacgcacctgtgcggtagtgccggattcaccgtgctctttataagcccagtgtgctgccacccccatttccgccatctgatccatatcttcggtccggatctgcacttccaccggtaccccgtgagggccgataagggaggtgtgtaatgactgatagccgttggctttcgggatggcgatataatctttgacgcggccgggacgcggtttgtacaggccgtgaacctgacccagtacgcggtaacaggtgtcgacagtacttacaatcacgcggaatgcataaatgtccatgatcgagtgaaaacgctgctctttcaggtgcattttccggtagatggagtagagatgtttttcccgtccgctgactttgcagctgatcccggcttccgtcagacgcccttcgatttcggataaaatcttctggatcatctctttacggttgccgcgcgcggctttcaccacttctttgatgacgcggtagcggttcgggtaaagggcttcgaatcccagctcctcaagctccgttttgatatggtgaataccgagacggtgagccagaggactgtagatttcaagggtttcgcgcgcaatacggcgacgcttatcgggacgcagagacccgagcgtgcgcatgttgtgcgtgcggtctgccagcttgatgagaatgacacggatgtctttcaccatcgccatgaccattttgcggaagttttcagcctgagcttcttttttatcgcggaagttcagtttgtctaacttcgataccccttccaccagcccggcaacagtggtgccgaacagttgttcaatatcctgaaaggtggcaggcgtatcttcaataacgtcgtgcagcagtgctgccatcagtgtttcgaggtcgagacgcatctcggccaggatacaggcaacggcgaccggatgggtaatatacggttcgccactggagcgggtctgcccttcgtgagcatcccgcgcaacgacataggcttgttttaacagatcaatctgctctttcggcagataatccttaacaatatggttcaggctttcaaacaggtacaaggcagacctaccttaacttaacgacgtccttcggcgattgcagaaaccgcttgcatttcagcagcttcctgctcctgttgttcctggcgctcacgggcgtcaaggatctggccgttgatcagattttcttcgatttcgcgcagggcgatcacggtgactttatcgttttcttccggaaccagaggctctttgccgccggcctgtaactgacgcgcacggcgtgctgccactaatacgaggtcaaaacggttaccaattttttctactgcgtcctggactgttacgcgtgccataggtgtgctactccacagataaataaatgactcggcatgatactgaaagttgtatcactgtgccaataatttggcgattaaagcatcatgtcgctgaacctggcgacctgaacgcagacgttccgcacggataatcgtctgtaaatcggtcagcgcgacattaaaatcatcgttcacaatcagataatcgtactcgccatagtgctgcatttcactgaccgcctgtgccatacgtccggcaatgacttcgtcagtgtcctgaccacggccgcgcagacggcgcagcaattcttcacgggacggcggcagaataaagatactgcgggctgccggcatctgttcccggatctggcgggctccctgccagtcaatatcaagaaatacatcaacaccggagttcaggatatcttccactgttttacgggcggtaccgtagtaattcccgaagacacaggcatgttcgagaaactcattacggccgatcatgcttttgaattcatcttcagtggtgaagaaataatgctctccgtgcacttcgcccgggcggataccgcgggtggtgtgcgaaacagaaacctgggtgtcatataaaggctgtgttttcagtaatgcctgaataagactcgattttcccgcaccactcggcgcagagacaatatataacgtaccttgggtcattgttgatgtcttgtctgattgggggttgaaaaagcctcggggaataaatccccgcatatagtatacacacacgcgcagcgacatgcagcgttcaggtgattatctgctgaaaatttcttatttttccgggcagatgaatacggatgtttcatttttccgcaccggcggaataaaaatgtatgcatatacccgtcagttacatgacagtgcggtacaacaggaaaaaacagacaagcagggcagataagcagagccggaaccggtattgtccggttccgggtgagcggttattgccgttaatcctgattttcgtaattaaagaccggtaacccgaggcggtagcggatggcaattaaccgggatgtcaggccggccaccagggtaataataatgacggcatcacgcggcagcggcgtgtaaaacagtaatcccatatagagccaggcggcggcaaaggagataccggcatataattctttctggaaaaccagcggaatggtgttacacagcatatcgcgcagcacaccaccgaaaacaccggtgataacggcggcaatagccgcaatgatcgggccgtagttcatatcgagtgctatctgagcgccgataatggaaaataccatcagcccgatagcatccaggatcaggaaaagacggcgcagatgcttcatcatcggcgcaacccagatagtaataacggcagcacaggcaaccgtaataatatattcaggatgttttacccagcccagcgggtaatggcccagcagcatatcgcggacagatccgccgccgatagcagtggcggaggcgataataattacgccgaaaacatccattttccggcggccggcggccagtgctccggtcatggcttcagcggtaataccaataatgtacaggatactgagtaacatagtcttatcattgccggtttatcggaaggttagcatagtcagcacagccgaaagtctcgactgagtttttttagtctgacccagtcggattacctgaggttatccgaactgatggtataaaaagagagtatcactctaatgaatgaatatcagataacaacaacaccccgtcatcatcagcttactaatattaatgtatggacgccggatagccaatggctggtttatgatgtccgccctcaggggtcttcgtttaccggtaaaacgatagaaaaaattcatgtgaatacaacagaaatccgtgaaatttaccggggaaccgccggggcctgtgtgggtgtggtgactgtcagcccgcagttgccggtgcagtatgcctttatccgcgggccgctgaacccggatccgcagtggcagtatgatttccatcaccgtcagggggtgatggtcagtgatgatgtgccgggtgttgcacacaacattgatgctttctgcattacaccgccttatcagcccggcgctctgcgcggcggtacacatgtgcatgtgttcagcccggacggggagtggctgagttttacttataacgaccatgtgctgcatgagcgggatccggtgctggatctgcgtaatgtggcggtggcggttccgctgcatccggtatgtaccgggaaacatcacctgcgtgaatatgacggagaatttttctgctgtgtggtctcgcggacaaccccggtaccacagcccggcagtgatgacatcagccgtgcatacgaagagggctggattggtgagcaggggtatctgcgggctgacggctcccgtcagcggcgtgcgattgcgtttatcggggatacccggtctgaaaacagtgaggtgatcccggagattttccgcctcgatctgccggaacggcctgaagattatgccgttgccggcgatctgccgctcgaggggtctgacagcacgatgcccgctccgccggcgggtgttactcagacacggctgacatttactcatcagcgccggtatccggggctggcaaaacagccgcgtttctggctgcgcagctcaccgcagggtgacagaattgcgtttctgatgcaggacgatcagggaattgttcagttgtggacgatttccccgcagggcggggagccgcatcaggtcacttccggcagtgacagtattgaatctgcattcagctgggacagtaccgggcggtatctggcttttgtccgcaaaggattggttatggtgtgctgtgctgaaaccggggtatgccgggcggtgacggcaccatcagcagaaccggtgtcaggggatgcggtagtgttttcaccggataacagccgggtggcattcctgcgccgcacaaacggctggcagcaaatctgggtggcagacaccgggctgtaacggcggctgattactcctgcggcaatggtgccggagcgttatgggcggtttccgctgcttccaggcgttttacccgttccgcaggggatgactcgctgttgtctttgccgccggtggcataatcgaccggggccagaagggtgtcaaggacagcggagaagggcaggtcaatggcgacaatcggcttcattacccagccggtttcgtcatcctgcaacatggcgatactgtttttggtcccgggatagtagccctctgtcgggccggtccgggtcataatgcttgagcagccgctgagtatcgtactcagtcccagcaatccgcttattatcatacatttgcgtgtcataacatgtccctgcatatacagcgggcgggtaccggtaattatttcacccgaccggcgtactattccataaatagagtgtactgagaagtttttgtttttttgtgtgatcaggatttctgtttaacggcggagcgtgagtgctgtcaccggaaaatggtcaccggtaaatcatcaccggcaaaacacgcagatcacagacaaagggtatcatccccggggaactgttttaacagaaccggcggaattatctgtcagaaagtgtgactgaatttattgaacagtgcggtttgtaggccctaatacaatgataatagcaggattattacagccattaccggaggcgcttgcgggtaaactggatgcattactgaacggtgtgaggtaaatgccttgtgctttataccggccggtgatgccagttaacagatccaaagtcctcgttatacctttaccccgttatgtacttaccacataacggggatttttttaccggcggctgcaacagtgtggcagatgatcatcaaccatgccgacggcctgcataaaggaataacagataaccggcccgcagaatttaaacccgcgttttttcagtgcttttgccagagcatgggacagcggggtatccgcagggatggtgctgctgtcggtatagtggttaaccagcggcgtgttaccggtgaaattccacagaaaatcactgaaaccctcaccggcctcttgcatcgccagataggcttttgcattactgatgatggcattaattttcgcccgctggcggacaatccccgggttttgcatcagtttgtccacatcggcatctgtcatggctgccactttttccggatcgaactgaaagaatgcctgccggtaattttcccgttttttcaggatcaccagccaggaaagacccgcctgctggccttcaaggcagatcatctcaaataatttatggttattccgctcggggacaccccattcggtgtcatgatactgaatatagagcgggtcatcagtaacccacgcacagcgggtctgagcagcagcggacagtgacattgtgttctcccggaagacggctttccggttaatttatactggataaatatccatgtaaacgggtatattcccggtttttcgatccgggcggaaaaagatcggagaagcgctgtatagtccggcggtcagagggtatactgaatgacttttattttattattcattttctcgcgtgcggatccaacatgcaaaagtttgataccaaaaccttccagggtcttatcctgacattacaggattactgggcgcgccagggctgtaccattgttcaaccactggacatggaagtcggcgccggcacttcacacccgatgacgtgtctgagagcgttagggccggagccgattgcggcggcctatgtgcagccatcccgtcgtccgacggacggccgttacggggaaaacccgaaccgcctgcagcactattatcagtttcaggtcatcatcaaaccgtctccggataacatccaggaactgtatctcggctccctgaaagagctgggtattgacccgacggttcatgacatccgttttgttgaagataactgggaaaacccgacactgggtgcctggggattaggctgggaagtctggctgaacggcatggaagtcacacagtttacttacttccagcaggtcggcggcctggagtgcaaaccggttaccggggaagtcacttacggtctcgagcgcctggcgatgtacatccagggcgtggacagcgtttacgatctggtctggtgtgacggcccgctgggcaaaaccacctatggtgatatctatcatcagaacgaagttgagcaatccacgtataactttgaatacgccgatgtggacttcttattcacctgttttgaacagtatgagaaagaagcacagtccctgctggcactggaaactccgcttccgttaccggcctacgagcgtattctgaaagcggctcactctttcaacctgcttgatgcgcgcaaagcgatttcggtgacggaacgtcagcgttatatcctgcgcatccgtaccctgaccaaagccgttgccgaagcttactatgcctcccgtgaggcactgggcttcccgatgtgtaaaaagaactaagaggctgtcatgacacaacagactttcctgacggaaatcggcacagaagagttaccgccgaaggcgcttcgttctcttgctgaatcttttgcggccaacctgactgcagaactggccgctgctaacctgactcacggtgatgtgacctggtatgccgcaccacgccgcctggcggtaaaaattgccggtctggcggaatccgccgctgatcgcgaagtggaaaagcgcggccctgctattgcccaggcatttgatgccgaaggcaaaccgaccaaagcggcggaaggctgggcacgcggttgcgggatcaccgttgatcaggctgatcgcatggtcaccgacaaaggtgaatggctgctgtaccgcgctgtggaaaaagggaataaagccaaagaattactggcagatatggtcagtcgtgcgctggcaaaactgcctatcccgaaactgatgcgctggggcgataaagagactcactttgtgcgtccggttcataccgtcacaatgctgatgggcgcggatattattccgggtgaagtcctggggatcacctctgaccgtgttatccgtggtcaccgttttatgggtgaggcggaattcactatcgcacacgcagacgagtatccggccattctggaaacccgcggtaaagtgatggcggattacgatgcccgtaaagccatgatcaaacgtgatgcggaaaaagcagcactggcactgggcggcgtggctgacctgactgacagcctgctggaagaagtcacctcactggtggaatggccggttgtgctgacagcgaaattcgaggaaaaattcctcgcggttccgtctgaagccctggtttacaccatgaaaggtgaccagaaatacttcccggtttacgacaaaaacggcaacctgatgccgaactttatctttgtcgccaatatcgagtcttctgatccgtcgcagatcatcgcaggtaacgaaaaagtcgtccgtcctcgtctggcggatgctgagttcttcttcaaaaccgactgcaaaaagcgtctggaagataacctgccgcgtctgagcaccgttctgttccagcagcagctgggtacactgcgtgataaaaccgatcgccttgaagcgctggcaggctggattgccggtcagattggcgcagatgtgaatcatgccacccgtgcgggcctgctggccaaatgtgacctgatgaccaacatggtctttgaattcactgacacccagggtgtgatgggcatgcactatgcacgccatgacggtgaatccgaagacgtggcgctggcactgaaagagcagtatcagccgcgttatgccggtgataacctgccgtcaacgccggtgtctgatgctctggcgattgctgacaaaatggataccctggcggggatcttcggtatcggccagcatccgaaaggggataaagacccgtttgctctgcgccgtgccgcactcggtgtgctgcgtatcatcgttgagaaaggttacaaccttgacctggaaacgctgacacaggaagcggtccgcctgtatggtgataagctgacgaacgcgaatgtggtcactgacgtggttgatttcatgttaggccgtttccgtgcatggtatcaggagcagggttatgcgattgatactatccaggcagttctggcgcgtcgtccgacccgtccggcagattttgatgcccgcatgaaagcggtcactcacttccgtacactggaggaagccgctgctctggccgctgctaacaagcgtgtttccaacattctgtcgaagagtgatgatgcactgaatgataccgttctggcatcattaatgaatgcaccggaagagatccgcctggcagcctatgtgactgacctgaaaacgcagctggctccgctctatgcggaaggcaaatatcaggaagcactgactgaactggcctctctgcgtgaagcagtggatgcgttctttgatagtgtgatggtgatggataaggatgacaatatccgtcgtaaccgtctgacattattaaatgaactgcgcaacctgttcctgggtgttgcggatatttcactgttgcagtgatttttattaaacggtgatgttacgatatgaagcccggtctgaccgggctttattttttactccaacggcagtaataatgcgccttcagttttccggatatccattttattcagcccgatatcctgctttccgccgatataattggtaccgtcaaaaatcagagtgaaatcgctgaccgggcttttaggattacggtagtttgttttcatctgaccattattttcaatgctgctgttactcataatggtattcatcagtaatgtatttattttaccggatgatttgttttcaaatccggaatgatgcagatccattgtcagctggttatggccgtacatcggtgttctctccgggtcagtcagttgtaattccggtccggtggttatctgtcctgcattccgtatttgtgcggcagcagaatggatatacatattatccgctttgatatggctgttcgttttgatattcagaaagttattggtattttttctgttttccaaagagtaatccggattgatcatttccaaatcacgaagaccgccgtttgtttttgccagatcataatgaccgatatacgttgccagatttttggttttcagctgactgtttttaatatcaatagccgcggcaactaatgtgagtttatcggtatcagcaaaatgttgttctgcggtattcagcatacggacttttccgccgatattccggtaaccggaaaactgcccgtccggtgtcatactgacattaccggcagccagacttaagctgttcacaccggtcacactgcatccgttacaggcaataccgttcgggttagcgataatgagatgggcttttttgccatccacatgcatattaccgcgcagttgtgatttttcggttgaaagcacctcgttaataatcatacctgcaccggattcgcggttattaaataccacaccatgcttgccgacgttaaactgatcataggcattataagaaacaccgtgcgtatttgccggtgcgatattgatggttgtgtcgtttccttgacggacgacctgagttgtctctgatgatgcaggattaacggtaatatccgccgcagaggcgaactgagcgaggaaaagggcactgctgataacggacagctttactatttttggcataaccactccctggttgttgctgaggtataaaatccacgggcaggataaataaagtcgctgacagcggatatgaacagagtggttattttttgtcagttttcagcattccgatagcaaataaaaaacataccgtttaccaataagcggataaaaaacagaaatttggctgataaaccggcgaaataaaaataatggagcgaaaaacaaaaaattccggtttctgctcttgacgtttagcctttccggcagtaatatccatcccgctttcggcgagtagcgcagcttgnnnnnnnnnnnnnnnnnnnnnnnnaagaaaaaccctgcttttacagcagggttttttgcttttcagcatctgccgtttttcctcttctgttacttttaaaaattccgccgcttttttgatatcgctgttttctgttatccgtttaactgcccgctgaaaggatttcatcagacggacggatacatgataaaaaaaatagcggctgctgctgtgatggcggcggcctgtggctgcgcatggggcagcacttacacttcttctccgccggtttctccggcctcctgcgccatactgtcagaggtggcgattaagcagcgtgaattaattgagccctcttatctggctgatgaatttgaaaaaaacattaccggacactgtctgacatcagaacagatggcagaagcggtgatgacactggagtcagccgtacatcaggccggttttatcacagcacaaatcagtgtgccgccgcagaatgtcagcgatggtaccctgacacttcactatctgcccggctatctgagcggctaccgcgataaagagggcggagatgcgcatttcgggctgaacctgattttcccgcagcgggcggacggacaactgaatatccgtgatactgaactgggaatgtcccatcttaatcagttgccgggtctgggggctcaggccgccgttgaacctgatccgcagaaccccggcaacagtgtcatcaccattgcccggcagaaaaaacgcagcatcagcggctcactggaaatcagcaactacggtagcccgtcaaccggcagcaggcagataactaaccggctcagtcttgaaaatccgttacagctgtatgaccgcctgtttatttatactttgcgggatatggatcgcgaccattccgccggggtgaaatttatctacgggcaataccggcttcccttacggcactgggagtttacggcgggcggcagttacagtgaacagaagcagcaatacccggtataccgtggatcactggactattttacccgcagcaaaacgctggatctgagcctcggccgtaagctccttctgactccggcacatgatctcaccctcagcagcggtatttctgcggtaacccggcatgtcacactcggacatgcgccgctgatattgcctgagcgccggtctgtttactggaataccgggctgaatcaccgctggtatctgccggatttcaccttgcagtatcaggtgcagtataagcattcactgaaccgctttggtgcgctgccggtcactgaaaaaaagctgaaaccgacccggcagctgatggcagaaacaacactgacagtaccgttccgtctcgccggtcagccgttttattatgaaggtgttatgcgtggttttattaatgcggataaagcagatgagatggattatgaatctctgagcggtcgttattcggtacgcggctatccgttttcccacagcatgagcgccgcgcgggcttttatcagccgtaatgaggtggtctggcagcaggtattgccgggacataatctgtatctggcagcagacgccgggctgccgggggcaaaaatttccggcggtgcgcgatctcatagtctggcgggtacggagatcgggatgaaggggttttataaatcactgagctatcaggtctttgccggtctgccgctgaaagaagcggaacgtgtgcgggccttttcaccggcgggcggattttctgtcagtgtcagttactgaggatcggtttgatttcagtacgtgatagtaccgctgtatatcaggcagggtgcggattacagcggtagttgtggcaaaatgtgcaacggaaaacactgtgacagtgatatcagacaaaataatcgcgcagtaattaagcattcagtcacaaaatccggataatttttatcagctgtttattctgtgaacgttttatccggcagctgaataaatgctcagttgtgcacccgttcaaacattttagctgtttttgttatcaaaacgtttgatttgtgtgttttatgtgtagtcatcgtccatagtcaatagtattgactgcctctgtgacagttgatttagtgaagtgtcagaaaataataaacaaactgaaatttgtggtccggcactgccggacgacagagcaaacacgacattcaacgacaggcggagataatgatgatgagaagcgccaaacgtaagacaggatttgcgaagctgggtattacactggttgctctggcggtatccgccagtgtcaatgcggcgggaacgctggttttttgttctgagggatcaccggaagggtttaacccgcagctgttcacctcgggaaccacttatgatgccagctccgtgccgctgtataaccggctggtggagtttaaggccggtaccacagaactggagccgggcctggcggaatcctgggatgtgagcgaagacggaaaaacctatacgttccatctgcgcaaaggggtgaaattccacagcagcaaggatttcaaaccaacccgtgatttcaatgcggatgatgtggtctttaccttcgaccgccagaaaaacccggataacccgtatcacaaggtttccggcggcagttatgaatatttcagcggcatggatatggataaaatcatcgataaagttgagaaagtcgatgacaacacagtccgtttccagctgagccgctctgaagcgccgttcctggcaaacctcgggatggactttgcttccattctttccgccgaatatgcggatcagatgctgaaagccggtacaccggagaaagtcgatctgaacccgatcggcaccgggccgtttgtgttacagcagtaccagaaagattcccgtatcctgtataaagccaatgacgattactggaacggcaaaccgaaaattgaccgcctggtcttctccatcaccccggacgcgtctgtccgttatgccaaactgcagaaaaacgaatgtcaggtgatgccgtacccgaacccggcagacctggagcgtatgcgtgcggataaaaatattgtcctgaaagagcagccgggcctgaacgtcggctatctctcctataacgtcacgaaaaaaccgctggataacgtcaaagtgcgtcaggcactgaatatggcggttaataaagatgcaatcattgacgcggtgtatcagggtgcaggccagaaagcgaaaaacctgatcccgccgaccatgtggggctacaacaacagtatcgaagactatccgtatgatccggaaaaagccaaagcgctgctgaaagaagcaggtatggaaaacggctttgaaatcgacctgtgggcgatgccggttcagcgtccgtataacccgaacgcccgccgtatggctgagatgatccaggctgactgggcgaaagtcggtgtgaaagccaagattgtgacctatgagtggggtgagtacctcaagcgcgcgaaagcgggtgagcctcagactgtcatgatgggctggaccggtgataacggggatccggataacttcttcgccacactcttcagttgtgcggccaaagagcagggctctaactactcgaaatggtgtgatcagtcctttgaaaacatcattcagccggcacgtaccacggctgatccgaaagagcgcgccaagctgtatgagcaggctcaggtggtgatgaaagagcaggcgcctgcactgatcgttgcgcactcaacagtgtttgagccggtgcgcaaagaagtgaaaggctatgtggtggatccgctgggtaaacaccactttgataatgtttctatcgaaaaataagtaaaccggaaatgagtgttaccggtctgccgcctcctccggggggcggcaaccctgtatcgaaccgcattgcacggacgacgcagaacacataactaaaacaatattattcatcgtgtgagtataaagggaaagtcctccctttcgtccggtcttatgaccagagcgctgtcagcggccattacaagagaaacagggatatgctgcaatttatcctccgacgggtcgggatggtaataccgacatttatcggtattacattactgacgtttatatttgttcatctgattccgggagacccggtcactatcatggcgggtgagcggggaatttcccctgaacgccacgcccagctgatggcggccctggggctggatcagccttactggaaacagtaccttcattatatcaacggtgtcctgcacggtgacctcggcctctctctgaagagccgtcagccggtgtgggaagagtttgttccccgctttaaagccacgctggaactcgctgcctgtgccatgattttcgccatttctgtcgggatcccggtcggggtgctggcggccgtcaaacgcgggtcaatctttgatcataccgctatcggggtctccctgaccggctattccatgccgattttctggtggggcatcatgctgatcatgctggtgtcggtgaatctcgatctgacaccggtgtcggggcggttatcggacagtgtgttcctcgacgacagtcagccgctgaccggatttatgctgattgataccctgatctggggtgaggacggcgattttcatgatgcggtgatgcatcttattctgccgtccattgtgctcggtaccatcccgctggcggtgattgtccgtatgacccgctcggcaatgctggaagtgctgggtgaggattatatccgcaccgcccgcgccaaagggctgagccgcatccgcgtgattgtggtgcatgcactgcgcaatgcgctgctgccggtggtgaccgttatcggcttacaggtcggcgtgatgctggccggcgcgatcctgaccgaaacgattttttcctggcccggtatcggccgctggctgattgatgctcttcagcgccgcgactatccggtggtgcagggcggcgttctgctgatcgccattctgattatcctggttaacctgtgcgtggatttactctacggcgtcgttaacccgcgaatccgccataaaaaataacaggagcgcacaatgtctgagacgacaaatactaccgtgacccgcgcgcctgagccgctttccccgctgcgcgaattctggcactacttccggcgcaacaaaggcgcgctgatcggcctgatctatatcctgctgatgctgctgatcgccgtttttgccccgctgctcgccccgcatctgccggatgagcagttccgtgatcatttattacagccgccggtctggcaggaaggcggctcatggcagtttattctcggcactgatgatatcggccgcgatattctgtcgcgtctgatgtacggcgcacggctttcattgctggtcggttgcctggtggtggcgctgtcgttgctgctgggtgtggtgattggcctcgctgccgggtatttcggcggctgggttgatgccctgatcatgcgtatcgtcgatatcatgctggcactgccgagcctgctgctggcactggtgctggtggcgattttcggcccgtcgattgttaacgcctcgctggcgctgacttttgtggcactgccgcactatatccgtctgacccgcgcggcggtgctgacggaagtgagccgcgactatgtgaccgcttctgcggtggcgggcgcaggcccggtgcgccagatgtttgtcaatattctgccgaactgcctggcgccgctgattgtgcaggcatctctgggtttttccaacgctattctggacatggctgcattaggtttcctcgggatgggcgcacagccgccgacaccggagtggggaaccatgctgtccgatgttttacagtttacgcagagcgcatggtgggtggtgaccttcccgggcctggcgattttactgacggtactggcgtttaacctgatgggcgacggattgcgtgatgcccttgatcctaagcttaagcagtagaggtgcagacatggcgttattaacagttgataaattatctgttcacttcggtgaaaaagagatgccattccgcgccgttgaccggatcagctatcaggttgaggaaggtgaagtgctcgggattgtcggggaatccggctccggtaagtctgtcagttcgctggcgattatggggctgattgatttcccgggccgggtgatggcggataaccttgagtttgacggccgccatctgctgaccatctcagaaaaagagcggcgcgagctggtgggcgcggatgtggcaatgattttccaggatccgatgaccagcctgaatccctgctataccgtgggatatcagatcatggaagccctgaaagttcaccagggcggcaaccggaaaacccggttacagcggactatcgacctgctgacgctggtcggtatcccggatccgaaatcgcggctggatgtctatccgcatcagttatccggcgggatgagccagcgggtgatgattgcgatggcgattgcctgccgtccgaagctgctgattgccgatgagccgacaacagcgctggatgtgaccattcaggcgcagatcattgaactgctgctggagttacagcagcaggaaaacatggcactggtgctgatcacccatgatctcgcgctggtggcggaagccgctcaccacattattgtgatgtatgcggggcaggtggcggagtccggtaaagcatcggatatcttccgcgcgccgcgtcatccgtatactcaggcactgttgcgggcgctgccggaattcgccggtaacaagagccgtctggcatcactgccgggggttgtgcccggtaaatatgaccgtcctgagggctgtctgctgaacccgcgctgcccgtatgccacggatttatgccgcagcacggaaccggaactgcgtactgtcggggcgcgtcaggtgaaatgtcataccccgctggatgatgaagggagaccgggccatgagtgaaaccacacagccgctgttacatgtcagtgatctgaaaaaatattatccggtgaagaaaggctttttttcgccggagcggatggtgaaagccctcgacggcgtatcgtttgatctgaaccgcgggaaaaccctggcggtggtcggggagtccggctgtgggaaatcaaccctcggtcgtctgctgaccatgattgaaaaaccaaccggcggggagctgttctaccaggggcaggatctgctggtggcagataaacatgcggagaaactgcggcggcagaaaatccagattgtgtttcagaacccgtacggctcgcttaatccgcgtaaaaaagtcgggcagattctggaagagccgctggttatcaacacctccctcagtgcggcagagcgcaaagagaaagtactggcgatgatggcgaaagtcggcctgaaaactgagcattacagccgttatccgcatatgttttccggcggtcagcgccagcgtattgccattgcccgggggctgatgctggatccggatgtggtgattgccgatgaaccggtatccgcgctggatgtgtccgtccgcgctcaggtattaaacctgatgatggatctccaggatgagctgggtctgtcgtatgtgtttatttcccatgatttatcggtggtggaacatatcgcggatgatgtgatggtgatgtatctgggccgttgtgtggaaaaaggtaccaaagcgcagatttttgagaatccgcgccatccttacacacaggcgctgctctctgcgacaccgaggctcaatccggcacagcgccgcgagcggataaaactgaccggcgagctgccgagcccgctgaatccgccgccgggatgcgcctttgctgcccgctgccgtcatgcattcggcacctgtactcagttccgcccggagcttaaatcctacggcggacagctgattgcctgttttgcggtggacagggaagaagaggcaaaaatttccgcataacattctgttttacagcaaattacagaaaaacatgttttaactgaagacaaacagcgataatggagggctccgttatcgctttttgctgtctggcgggtgagattagatcagcacaaagcacaatgatgacgtataatcactgcgtatggcgaaagatgtgataactgaattgtaacgaaaggcgtggaatatgcgtgtaaaagtcagaaagtcactgactatcaaacagatgtcagttgtcgctgcggtgactttggtgacgatcgcactttttatgacgcttctgttatcacatctgatacaacaacggaaagatgattacatcaatcagctttataattcgtcagtacaggtcaggaagccgctggcagatgccttgttagggtcggatttaaacgcaataaaatcaacgctgataacattgcgggccagcgggattttaggacgcgcgattgtgatgacgccggaaaatgttcaggtgataagcctggattttgccacacaccgtcctattcccggcacagcaaaaatgattttcgggatcccggttgagattaaggttccgctttacgcctacggcgtggcacataccggtaaacccccgcagggttatcttattcttcaggtggatgataaccgcatataccgcttcgcgatgaatgttgtggcactgatggtgaccagttatctgctgctggcgctggtgctggtgatcgcgataagctggtgtattaaccgcctgatcgtgcggccgctgcgtaatatggcccgtgagctgaacagtgatgagcctgcagagcagctcagttgttcggcatatcatgaggatgatgaacttggtttgctggcgaagggttaccggaaccagttgaacaaacataaaacggagtcatcataaaacttcccggacggtttgctgtctaaacccagacgaatcaaaagggcgtcccggaagccggtcagtttttgcctgtacgtatcgtctgacataacagtatttccggcatcagtggtaaacctcagaagaaggcataccagggattcatattaaaagaggttagcatgcaacgctcttatttacgtgttttactcggtggcgtcctgattgccgtcacatctcagttacacgcagaagcattacagccggacccggcatggcagcagggtaaactggcaaacggattcagctggcagctgttgcagactccgcagcgtccgaatgaccgcatacagatgcgcctttctgttcagaccggttccatgatggaaaaaccggctgaaaaagggtttgcttacctcatcccgaaagtggtgatgtttaacagccagagcctgaacacacagcagttatcgaacctgctgcgtaacggcataagcccggatatgccgctgccgccggcgattgtttcctatgatttcacactctataacctgagcctgccgaataataatccggaggtgctgaaagcggcactgagctggatggcggatgtctcaggtcatggaatttttaatcaggaaaccgttgctgccgccctggccgcgccggattctccggtcgctacctatccgccgaatatcaatgatcctatctggcgtgcccggttaaaaggcaccactctccaggggtttgacccggtgccgccgcctgcgggcaaaattgatgttgaggcactgaacagtttctatcagcgctggtacacaccggatatggcgacgctctatgttgccgggccggttgataaacgcgcgctggaagacggtatcagcaaagcattcggctccctggaaggtaaacgtcagactccggtcagtgttgccacactgccgccgatgaaaccacgctcagtccatgctgtgaatgaaaatcagaaagacgatatgctggcgctggtctgggatctgaactggtcttccgtcaaagattcagatgcactcaaccgctactggttaaatgatcttgcccgtgaagcgctttttggtgcattacagcagggcatcggcaagaaaaatgaaaaattcatggccatgaatatggattgccggatgcagtatcagcgtgccagctgcatgctcagcctgcgtgcgccgaatgaaaaaatgccggtgattgtctctgaactggccggtgaactggccgtgctgaaagaaaaagggatttccgctgagaattttgatgcgctgattgccatgaaacaggctcagcttcagcagttgtttgctatttatgcccggaccaccacggatatcctgatcaaccagcgtctgatgtcccagcagagtaatatcattgatattccgccggagcagtaccagcgtctgcgtcaggcgttcctgaataacctgacaccggatgtgctgaacgcagaaattcatgcgattttagaacaggataccgcattcttctttactcagccgaaaggtgagacagaaatgaatgtggatcagctgcgtgctcagttcgataagataatgcatccggagaaagcggttgctgcggcagagaaacaggctgcggcggatgcggaatccgctgagaaagcggcagccgaaaaagcagcggcagaaaaagccgccgcagagcaggccaaagccccggcggtaaccccggaagcggcagcgccgtcacaggaagcgaaaccggcagaaccaaaagcaccggctccggctaaaaaaggcgggcaaaacggcaatgccgagccaccggcggcagataacaacaccgacggtgtcagtgcctgatttcgggtaatggtatgaaataaaaagggtatctttcagatacccttttttaatggctattcatcgtcctgacacaagctgctttccagcagattcatcagccacggccgggtgtccctgttattcacaaagcccgccgccgcgatttttttctgcgggtgatagtaagctgcggttccccagaatcccaaatgataccagagtgtctggccgtcccgctctgtcaccatcaccccgcagcggtaatcttccgcaccgtcatggctgcccggtttcagcatggtttcaagggtgtccggcttgtcaaaaatacggccctcaaacagatttgccataaacaccgccagggcgtttaccgacataatcaacccgccgccgccccagagatccatggtcggactgatggtctccccgtcaatattgccgagatactgatgtgcccggggcggaagacccgccggcgcaggctcttccagttcccagtaagcggattccatgcccggtgcatcaaagcgcagcaactgccggaccgcctgtgccagcggcagttgtgtgatccgctcaataatatcgcccagcagcagatacccggtatcggaatagaggaaacagaggcccggtttcatcagcggatagccccggctgacatacaggcggatctgctcatcccgtgtccagagatggccgggatccgcgagcacatcacggatatacttctcatcggcatgatcgtacagcccgctgctgtgactgagcagatgctgcaccgtgatggtattcagatcataccccgcctctgtcagccagcggacatactgcggggagagcagcggcgcgaccggtgaactgagactgagcttctgctgttcatacaggcgcagcactgccgccgcggtaaacgttttggtattactggcgatccgcaccggggtatccggggtgaccggcgtgctgtcgtttttgctcagtccgccgtgtgccgcaccgtccggcaattcacacccttcgccggtgaaacagaatgccgtggcaaaaccttccggctgaacatcctgcagcagggctgacaaattccgtgccggcatgattatttcttcgcgtcagcgcgcagtttcgtcacactctgcccgccgacaccccagttgtctgtttccacctcatcaataatcacaaaggttgaggctgggtttttccccagtacatcaaccagtaattgtgtggcaccttcaatcagtttttgcttttgttctgcggtcgcaccttctttggtgatgcggatattgatgaatggcatagaggctcctgatagatgtggttgtctgcaactgtctgaatatcagccggtaacggttcagtatccgttacactgactgatattcataccatattgcagccaaaatctcaggcggttttatttttttggatgtcggtcgcaatccaggcggcagaaaagaggatcagccgcgcgaagaaatagaaaaaggccatcaggccgataaccgaaccaaatgcagcaccggacggggaggccgccatgttcggcaacagccaggtcataatggttttcaggatctcaaagccgatcgcggccagcagtgtgcctttcagcagggagcggcggctcagcttcatgcgcggcaggatccagagaatccaggtaaacagcagatagttggcgaggatggagatggtcaggccgatagctgtccaggcgggacgcagccattcgaccgaatccaggccgagaaacgcgacaatccgggcttgtgcggcaccggcaatcgaggttagcgagagagtgaccaccagtgccaccagcaggccgatcagcgccaggaaatcccgcagatagcgcaggaacatattctctttgacttcaatatccggctcccactggtcgtggtactgtgcccggatagccatccgcagattacccacccagttcaccccggaatagagtgccagtgccagaccggttaacccgacggtcgcacgctggcggattgcggtatcaatactgcgctcaatagtggcggcgagtgtcgggtcactgatactgttggcgacaccgcggataagtctggtcagcagttccggattaaaggccagcacataaccggcggcggcaaaagagaccatcagaatcgggatcatggataaaaacgagaaataggtaatcgctgcaccgaacgggctgcccattctgtcattaaagcgggtggcggtgcggatcagatgggcaataaacggaatattgcggatataatttccggctttcacactccatttcagggcttttttcccctgttttaacccttcatcaaaattcttccgcaggggttttaatgatgatgtgctgttgtcatcttccggtgtgtcattttcccgggtcatgtatcctcgcttgttcggaaattgattccgtttaagtttactacaggactcaccggatgaacaattcaggttccggtataacgggcttcagaatttcccgattgattaaccgggataataatatgtaattagccgcgcttatttctcctcagaataattaaaacaaataccaatctataagatgttcacaatatgaataataaatgtgtctttcccggaaataaccggggaatttaccgctgtttgctgataccggttattccgctgcttattaccgggtgtgtttataaaccggaagggccttatttaccggcaaaagtggtggttgtgtcaaaccatgtgtgtctgcttacccgtccggaaggtgatgaaaaaattatcaggctggatattaatgaggtcggcagtgaaaataaacggctgttaacgcatacctttaccccggaacaggcagcagtcagccggaaccactgtatttcaacgcagaattatcccttccggagcggatattcctatactgcgctgataacggtcgggtctgatgttcagcaccgcctgaatattcatcccggaacgcggaattttgaagtccgctttcagctgactaattatttcgggcagttaagagcaacagagttttaatgctgtttgccggtttctgttgtcagaaaaccggcagcggtatgattactttaataatgaatccagttccgcctgcgcttcttttaattccgcttcggcttcggccagtttgcgttcgcgtttggcaatcttactgatatcgcctttatcgatggctttctgtaaatcagctttgcgctctgccacttcttttgtccggtcgctgacttcatcgcgggcatcatcacgcaggctgtttggtgtgcagtaagtattcacattctgcaaagcccgctccagcccctgcacccggtgtgtattaccgtgagctttggcatagctgagctgctcctgaattttgctttttttgatgtcacagccattctgcgcactcagcgcggaggtgcttaccagtaatgcacccagagccagtgcagcagttgtaaaacgtgtcatgtttacctcgttatttatactagtcgtcattttatgactatcaataatgacaatggttcattatcacgccgcacagatgaggaaagggcattggttctttcctgccgaaatcaggttatactgagcacttcaatctgtactgatattcttgttccgggtggtgcacacccgaccatctgaggcccttgtatgcttagttaccgccacagctttcacgccggcaaccatgcggatgtgttaaaacacaccgtccagagtctgatcattgaatcattaaaagagaaagacaaaccctttttgtatctggatacgcacgccggtgccgggcgttatcagctcagtggtgagcatgcggagcgtaccggggagtacctggaagggatcgcccgtatctgggcgcaggaatcggtgccggaagaactgaaaacgtatcttgaagccgtcagtgcactgaatccgcgtggtgacctgcgtttttatccgggctcgccgctgatcgccgcacatttgctgcgtgatcacgacaaattaaatatcagcgaactgcatccgtccgatttcccgctgctgcgcaatgaattcagccgtgataaccgcgcccgtgtggtacgggaagatggttatcagcagctgaaatcacagttaccgccgttatcccggcgcggatttgtgctgattgacccgccgtatgaactgaaaagtgattatcaggccgtggtgaaagggattcaggaaggtcaccgccgttttgcgaccggaacttatgcggtctggtatccggtggtgctgcgccagcagatcaaacggatggtaaaagatttccaggcaaccgggatccgcaaaattctgcaaatcgagctggcagtgcgccctgacagtgatcagcgcggtatgaccgcatccggcatgattgtgattaacccgccgtggaagctggaatcacagatgaaatccgtgctgccgtggctgcataacgtgctggtaccggaaggcacagggcatacactggttgaatggatcacaccggaataattcgtttccgctgcgggcatgacggcagcgggtgtttatgtattgactgataaatggaacgagccaactatgagcaaacattacgattatattgcaatcggcggcggcagtgccggtattgcgtctgtaaaccgggcagcaatgtacgggcagaaatgtgccctgattgaagcaaaagcgctcggcggcacgtgtgttaacgtcggttgtgtcccgaaaaaagtgatgtggtacggcgcgcagattgcggaagctatccgccagtacggcccggattacgggtttgataccaccatcaatcatttcagctgggacaaactgctggaaagccgttctgcgtatattgatcgtattcaccagtcttatgagcgcgttctcggcaataacaaagtggatgtgatcaccggttttgcccgttttaaagatgcacataccgtggaagtgaacggcgaaacttacactgcggatcatatcctgatcgccactggcggccgtccggttccgccgtctatcccgggcgcggaatacggtattgattctgatggtttcttcgcactgaaagctctgccgtcacgtgtggcggtggtcggtgccgggtatatcgccgtggaactggccggggtgctgaatgcgctgggcagcgaaacacatctgtttgtccgcaaacatgcgccgctgcgtaattttgacccgctgatcacagaaacgctggtcgaagtgatgaacaccgaagggccgtcactgcacaccaactctgtaccgaaagcggttgtgaaaaatgccgacggcagtctgaccctgcaactggaaaacggccacgagcagaccgtggattgccttatctgggctatcggccgtgaaccggcaacagacaatatcaatctggatgtgaccggcgtgaaacttaacgaccgtggttatattcaggtggataaataccagaacacgtcagttccgggtctgtatgcggtgggtgacaacaccggtgctgtcgaactgacgccggttgcggttgccgcaggccgccgcctctctgaacgcctgttcaacaacaagccggacgagcacctggattacaccaatatcccgaccgttgtcttcagccacccggctatcggcaccgtgggtctgaccgaaccacaggcaattgagcagtacggcgcggataatgtgaaatgctacaagtcctctttcaccgccatgtataccgctgtcaccagccaccgccagccatgcaaaatgaagctggtgtgtgcgggtaaagacgagaaaatcgttggtatccacggcatcggctacggcatggacgaaatcctgcagggctttgcggtggcactgaaaatgggcgccaccaagaaagatttcgataacaccgtggccatccacccgacagcagcggaagagtttgtgacgatgcgctgatgatctgaggatgtaataaatgaaaccggctgtatgcatgtcatatagccggtttttttatttgtgtgctatcgttggtatccagtcataacatgcagattttgtaccgctaagccgaagggattggtaataaaccggataatataatcaccgaatgaaagttatagagtgatactacagggattaatttcggagctgaaagtgaatggatttaaattgagtaaactgattatttttccgctgtttattttttttcttttcgttacagtcatatttttattcctcccgggaaacagagaatatacaaaattaaatatagtttactattatttatatacatttaatgaaataaagaaaattccaatgatatcaggcgaatatgagataaaatatgagcctgtggatggaaattcagctgagtttaatgatattgttttctttaatgtcgatacaaagagaaaccatgaactctttgactatgtcaaacggtcaggtttctcaaagaagtttgatcagtaccggaagagagaacgatgggttaaggataatacaaaaattgatattatcatcaatgaagcggagcaaaccacatcgttcctggtggaaaaaaattagatatttcacccgaacttcttcgacattccctctgatgccgggccgacagatttccagccgagtttttcatagaaaccgggtttatccgcgatcatcgagacataggaaccttcgagagtggcggatgtaagatagccatcgatgctgttcattatacgacggccgagccccgcgccctgatatgcaggatcaacggcgacatcaaccacctcaaaattacaggcaccgtcaccgaccactcgtcccatggcgataagtgtcccgtcgtcacggatggtcacgatatataaactgttgggcagcccgatctcagcggctttcagtgattttgccgacaatccggctttaatgcgcagcgcgcagtattcctgtgcggaaggcgcacgctcttctgtaatcagtgtcatgaggttgttatctgtaacagcgggaattttttggcgatgaccttaaaccattcggcaaattgctgcggatggtcatgcatctcttttttcaggtcagtgagtgatatccagcgcacggcagcgacttcctgcggattcagggaaaacgggccgttatagtggccggtaaacaggtagtcatattcatgttcagtcagtgacggcgggacatccgcacggtaaataatatggccggcggcctgtaacgggctggtgatccccagctcttcctgcagacggcgctgtgtcgcctgttccagcgattcaccacggcggggatgactgcagcagctgttggcccacaatccgccggaatgatatttgctgagcgcgcgctgctggatcagcagctcacccgcatcattaaacaggaacacagaaaacgcacggtgcagtaatccgagctgatgaacgcggagtttttcgtcatacccgagggtattatcatgttcatcgaccagaatcagttcgtcactcattatatcttttatccggtaaagcggctgaaagatatactgtagcaaatatgcagcggaaagtttgccggaatagtggcataaaaacgccggaatatatctccggcgtttcattatttattttcagggattatttattgcgggcagccaggtaatcctgaagggtgccttccgggaatttcttacagaattcaacgatttttggtgcttctgcaacccctttttctgacagtgccacaaagtcaccgcccgggtattgtgtgtctttgctgatcacccacagggcaaccggcgcccagctttgcgggttcagattaacgaattctttgcaggtcattttatcgggtacctgaatatcagcaggttcagcgagagccactgaggaaaatgcacttgcagcaaccagacacgcggtgacgaaatactttttcatgataaataaacctcgttttttgtttcagaaaaaacaaccaaatacgttttcagaatagatcaaataacgtcatattcaatatttctctatttttaaagaggaaataataatattaaatggttttttcaggataaaaagtatgagcatgcagatgagactcatatcgggccgggtaacatgattttatgtcaggcccgatatgagtgacgattacggatggtgttccagccagctgacaataaagtcgcggatggcagtaatattgttgatatccagctgcggtacagtaacatcctgccgtggcttatctgacgcaaacgcaataacaaattcatccagcagtgtctgatacggacggtcagtcacatcgcggaacagggcgattttcggtacggattcccccttgaacccttccaccaggataagatccagctcccgtgtatcaaagcgggcggccagctgcatcagatcaggctccgcgccacccggggtttctgtcatcagtgcaaaccgctcctgactgaccaccagcgtctgataagcgcctgctttgcgcagctcgtagctgtctttccccggcgtatccacatccatatcgtgatgcgtgtgtttgaccaggccgatgcgcagcccgctttcccgtaactgcgggatcagctttttcagcagggtggttttgccggtgccgctgtaggcggtgacggccagcagcggtaccgggtgcggcagctggtgctgtttttcccattcccggcactcggcaagggtattgagattaataaaatcaccgggatttgcatcaaatgtgacggctttggcgccgatgttatccataaacagcagaagtttgcgatcgccgccggtgagatattctgtcagcggcgtgatcagcgagcggtgacacagtgcaaaggccggatgggctcgctggtgatcgcaggcataagcgcacagggcatcacctttctgctgccagagtttttctgccagatccgccgggaactgcggcacatcacagggtacgaacagcacccagtcgtgcagggcattttcaagaccggcgagcatcccggcaagcgggcccggaaaatccggtaatgtatcggcgatcacccgcaggccggtggcgtgataatcccgcgcattgcggttggcattgataaaaatgtcatctgtctgcggggcgagcagctttacactgtgctgataaagcgggatcccgcccagtaataccagacctttgtcctgtccctgcatccgggtggcccggccgccggcaagaatacagccgctgagttgcatcatcattttcagtttctctgacaatctctgataaatattctgaacttatcttaacaaggattccggtatagtgagcgcgaatatcaatgcaatggtcgttataatcacggataatacgtcgcagttattacagcctgccaatatttacgcatcctgacagtcctgttctttccggagcggcggataattggtaatgtgttacgatcttgcttataaggaatttattatgaaatgtcatcgtcttaatgaggttatcgagcttctgcaccctgtctggcagcaacattctgatctgaacctgatgcagatgttacagaaactggctgacgaagccgggtttgagggtgaattatctgacctgaccgatgatattcttatttatcacctgaaaatgcgcggctctgaggcaacagacgccattccgggtctgaaaaaagattacgaagaagattttaaaaccgccctgttacgtgcacgcggcatcatcaaagagtaatgcagatgattaccccgccggttttcacttttcaggatttccggcctgaccgcctgatcgacagcctgagccgttacggtatctggcttgattccggtctgacggaactgaacagctatgaaaaccgcgtatatcagtttacggatgaaaaccgtacccgctatgtggtgaaattctatcgtccggcacgctggaatgaggcgcagatccgtgaggagcacgacctgaccctgacactggctcaggccgggctgccggtcgcggcaccgctggcttttgacggcgacacgctgctgtcacaggacggttatctgttcgcgctgtttccgtcgatcggcggacgggcgtatgagacagataaccttgatcagttggaaagcaccgggcgactgctcggacggctgcatcagataagccgggaacgctgttttgagcaccggccgacggttggactgcaggaatatctgctgacaccgcgtgaaatcctcgcgcagtgtccgctgatcccgcaggcgcgtcgtgacagcgttatcgcgacactggataccctgatccgtgagacatctgcccgctggcacgacgactggcatgcgattcgcctgcacggggattgtcatccgggtaatattttatggcgtgatgaaccgtggctggtggatttcgatgatgcccgcaacggcccggcagtgcaggatctgtggatgctgctcagcggggatacggattcgcgccgttatcagctggatattctgctcgatgcctatcaggagttttgtgacttcgatacgcgggagctggcactgattgaaccgctgcgcgccatgcgcatggttcattttttatcctgggtggcacgccgctggcaggatcccgcttttccacgggcatttccgtggatggcggaaggtgatttctggtcacagcagcaatcactgatgactgaacagacagccgtactggcggagcctccgctgacgcgctttctgccttattgattttcaggagagataaagatgaagaaactttggttagcgctgattggatttgcgatgtcattcagtgtctttgcaaacccggtatccggaaaagagtacaccgaactgagcacaccggtaacaaatcagcctgacgtggtggagtttttctccttctactgcccgcactgctaccagtttgaagaaaacttcaaagtgccggaatccatcagcaaaaacctgccggaaggggcgaaacatgaacgttatcatgttgatttcctcggcggtccgatgggacctgaactgaccaaagcctggtctgtggccatggcgatgggtgttgaggacaaagtgactccgatcctgttcgaaggcattcagaaaaccggcacaattaaaaccccggctgatgtccgtgacgcctttatcaaagcaggtgtgaccggcgaggattatgattccgctgctaacagcatctttgtgaaatccctgattgccaagcagcagaaagcggctgcggattacaaattacgcggtgtgccggcagtctttgtcaaaggtaaataccagatcaacaacgccggtctggaagtcaaagatgtgaatgaatacggtaaagcgttctctgatacggtcaattatctgatcaaacagaactgatcacagcatctgtatctccgggaagcaatggcggtaacgccattgcttttttactatccacattaatcaagtgattacaacggcagattatcttgtggcattcgtttataacctattgatttttttgaacgagatt

SEQ ID NO: 10 - DNA, 6745 bp, unknown
  Altogen 322075 strain
  misc_feature (834)..(865): n is a, c, g, or t
  misc_feature (953)..(1061): n is a, c, g, or t
  misc_feature (1092)..(1191): n is a, c, g, or t
atgtttgctgaagatcccaaaaaaaaggtcattgacccggcagcgctgaaagacagtgctgcgaaatatgctgaggatgcggctgcatccgaaatcggcaaaaaaatgccggaatcggcgcaaaaggctgtctccgccgtacaacaggcacaaaaaaccttagcgcagaccccttctgcggccgatcttattcccggtggcggtattgccggtggtctcagtggtgccccgaaactccccggcggcgcaggcaatgccggtgatcttattcccggtggcggtatcggcggtggcctcagaggtgccgcgaaactccccggcggtgcaggcaatgccggtaatcttattcccggcggcggtatcggcggcggcctcagcagtgccgcaaaacttcccggtggtgcaggcagcctggcgggtgcactgaccggccgctcaccttccggcttggtttttacctgtaaaatcggcggattgccggagcagacttttcaggtcaccgaattctcactcagcgaagggctttcttccctgttttcgctgtcgatcagtgccgtcagcgcgctgccgtcaattacttttgatgaatatctgggcaaagcgtcctctctgaccgtaacccgtgacggtaccaaagtccgtacggtacagggcgtgctcgccaccgcagagcagggcaacacagacggcaataaaacctggtatcactttctgatccgccctgaaatgtggattatgaccctcaaccaggacagccgcatcttccagaaacaatccgtgccggaagttctcgcaacattgctggatgaggcgcatgtcaaaaatgagctgaannnnnnnnnnnnnnnnnnnnnnnnnnnnnnnnggcttttgatttctggtgccgtctggccgcagaagaagggattaacttctggttcgaggaagggccgaaactgttttacagcgacaannnnnnnnnnnnnnnnnnnnnnnnnnnnnnnnnnnnnnnnnnnnnnnnnnnnnnnnnnnnnnnnnnnnnnnnnnnnnnnnnnnnnnnnnnnnnnnnnnnnnnnnnnnnntctcggtatgaccgccggtatcaacctgacnnnnnnnnnnnnnnnnnnnnnnnnnnnnnnnnnnnnnnnnnnnnnnnnnnnnnnnnnnnnnnnnnnnnnnnnnnnnnnnnnnnnnnnnnnnnnnnnnnnnctgtgcagcgatgttattatccagaaagattacaacccggatcgcccgtcgtatccgtttaaacatgaagtcaccggcgacgtgcataaacagcatccggtgtatgaaagctatggccgctatcgcgacgatgagaccggtaaaccattcacgcaactgcgctatgagcagtcacagaaccagcgccagaccggtaccgcaggtaccaactgctttgcgctgatgccgggcaaaatcttcactctgaaaaaccatccttctgacagcatgaataaagcctggcaggtgattgtggtcaatcaccacggtttccagccgctggcggataacggcggcggagagggaaccaagttcagcaacaccgtgcagtttatccccggcacccgcgaatggcggccgccgtaccgcttccgtccgcaggcagacggtgatgagctggcaacgattgtcgggccggacggggaagagatttacaccaacgagcagggcgcagtgaaggtgtatttccactgggaccgctacggcaaaccggatcacagtgcttcctgctgggtgcgggtggcgatgggctggaacggtggcggctatggtttctccgccgtaccgcgcatcggccaggaagtgatcgtctcttatctcaacggcgacattgaccgtccgatagtcaccggctgtacctacaacggccgtaacggcccgccatcctctttcccgggcagcaaaacccagaccgctttccgcacacaaacccataagggtgacggtttcaacgaactgcgctttgaggatgaaaacggtaagcaggaagtctttatgcacgcccagaaagacatgaatacggtggtgcagaatgaccaaagcctcactgtactgaatgataaaacaaaaaatgtggcaggaaatgaaacgaatactatagaaggttttgaaaactcgaaagttgttggtgttcaggatattgctgtcaaaggcaattcctcactcctgacgggtggctaccgtaaggatcaggccgcaggacgttatctgattggctcaggtgaattgatccggcttgaatgtggtgaaagtgtcctggaactgagtgcttccggtgcgattaacctgaaaggaaaatccttcaatattaccgtagaaaatgatggtgaaattaatacaaaacaaggtgttttagggttaaatccggatactgcatcacctgccgtcagccctgatggtacaggtaataaaggtgccatcaccactgcggtaaatgatgctttttcagctaagggttaatgagtatgtatcagttaaatgaaggacagtttttgtctctgccggcccattggctggataccagcatgaatgtattccgggatcctgattctcagcgttcatttattgttgcccgcgcaacaataaaaccggggcaatctctgcctgatgaaatgcggtttcagtgtgagcaactgacaaaggttgctgcgaatattcatatttctgattttgaacctgtacaccttgctttggttcctgaagccgaagcgctggaaacgcaactgagcttttttcgcagcggcagtcagttttatcagaaacaactggcggttttaggagcgggaagccggcaaattttattattcagttatacatcggcagatccgttcaatacagatgatgacagctactggttgcggttaaaaaatacattgacgttgaattcatgacagaaaggaactcttatgccgactccgaatgcagcacggattgacgatgatattattcacagcagtatctgggctgatatcatttcaattgccgcagaagccgccgtatatacagctgccggtattgttgttgcagcggtggcaaccgctgcagcacctgcactggctgcagcgggggcgggggctgcagttgttggtgctgcgacggcaatcgggggaagctgtgtagtatcggggttaatcggcgggttaattatccgtgccggcgggtggggggatgctatttcatctgcctgctctgatttcgcgaactggctgtgtcctccgtcaccggaaggtaaaatcagtaccggttctgacaatgtgaagacaaacgggaaaaaagctgcaagggcagcaggccgactgttatcacaaacagagatagatgcattacctcctgacgaggaggctcaggttgatcttgtcagctcgcttttaaacatgggaaaagcgtttgcatctgaaatgatgcagccgacagttgacggcccggccggccctgttcaggaatcaaagaaagatcagataacctgtaataagcacagtgcgattcaataccttgccgaagggtctgacaaagtttcgattaacggtttgccggctgtccgtgctaatgaccgttcgacctgcgaaggaaaagtatccgaagctgtctccaaaaatgtctttattggcggaggcagtgtggtggtcaggccgattaaaagcggaaaaatgcccgggctggaattcatttacatggctgcgtcgttattacgcggtaatcccaaacagatcctcaaaaaattgccttgtatgcttgccatgggtgctgtcggcatggcggttgaccgggggggggatgcaataaacgccgtatttaatcccgtccatgcagcaacaggagctaaaacactgtttggtgaagaagaccaggattttatattgccggcacgctaccccctcgtatggcaacgcatatataacagcagaaacccgcatcccggactttttggtcagggttggatgacaccgcttgaagtaagtgtggtacgggagactaattattattgctaccgcgatatgagtggccgcgaacttcgttttgagccgccggtgcccggtattcagtattacagtgcagatgaaggcatcatcattgcagtaaatgaatgtggcgatttagtgattggtgacggggacggcgagtgctggcggcgtttcagtccggcagcggatgatccgcatcatctgcaacttaagtcgctgagtgatgaatacggaaacggattactcctgcaatatgatgaatatcagcggctgagcacaattacagacagtgcggaaacctttactgcagaattgttatacagcgataaatcttcccgttccgtgcagaaaattgttgagcggttgccggagaatgaaacgcatacgttagtgacatatcaatataatcttcaggggcaggtaatttctgtcactgatgcatcaggagtggtaacgcgcacatttgattataatcagcgccgtttattaacgcagcatcgtttgccggaagggctcatttgtcattatgagtgggctgaattcgatgactggcgggtggttgaataccggaccaatgcgggtgagcattgtgtgattgactacgatatggatgcgcgtgtaacacatgtcacacatgcaaaccaatatacccatacgcatgtctggaacgcgcaatttttagtcacagactataccgatgaatcagggaatacctggcattatgaatggaatgatatggggttgctcagccgcacggtatccccgcttaatgaacaatggtgctatttttacaatgattttggttgtttaacggaagaaacagacccttcaggacaaacaacattaacgaaatggctggattcacgtgacctcattaaatcggtcacttaccctgacgggacacgaacggtattaagttatgatattcacaacggtgttattgctgaaatggatacatcgggttataccacaacatttgtccgtgatgagtttgggcaggtaattcagcaaattgatgcaaagcaaggcgtcaatcacatgacctatgattcccgcggccagttaatacgtcatcaggattgttcaggaaacagcacttactatcgctataatcagcggcatcagatgatgtgcaccaccgatgcggaacacgaagaaacgcatatcgaatatgatgcggccgggcgtcctctcaatgtcattcgtgcggaaggatggtcgaaccggtttcactgggatgaactggggcggcttacacggcatgaaaatgcggacggaacgtatcatgcatatgactggactgataccggattattaaaacgcaccatcaacccggaaaaaggaacggttgaacggcattatgatgaacgaggtcgtttagtcgcattactcaacgaaaatcaggagcgatatcgttttcagtgggggccggacagccttgtgacggatgaaaccgggcttgatggtgtcacaacacattacgattatgatgcctgcggccgtgccgttcagcgtacatttgcatatggtactgaaaaggctctggttcatcaggccgcttatgatgtgctgggacaattaacaaagcggacaactgcggatggcgtaacactgttcgggtacaatagtaccggtcaattaatctccgccagaatgaccacaacgggtgataatccgtattcacagtttgtgcatatggactacgataaatcgggcctgctgatccgtgaacagacattaagcggacggattgattacacctacgatgtgcttggtaacaaaactgatgttctgtttgcggatggcaggacgctgaagacactttattacggcagcggacatactttacagatcaacctggatgatgcggttatcactgagtttacccgtgatcatttacaccgtgaagtcagccggactcaggggcatattgttaaccgccgtcagtacgacaggctggggcgcttatcccggcaaacctgttatcaccatactcagcagggtaccaggccgctgaatgagatgcgctgggattacgatttacggcataatctggttgccatgcaggaagaaaccgcgccctatggctggaaaagctatcagtatgataataatgaacaattattaaaccgccgcagtgatcgttactcacctgaaacctactattatgatgccgccgctaatattcttgatggcgcacagtcatctgcctgccggcataaccgtgtcacagattatcagggatatcactatgaatatgatattttcgggcggacaacgaaaaagtcccgtttcggggaatactggacatacagttataacagtgaccatcagttaaccggagcgttacattcctccggcaaccccggtgaaaaacgttgccgggttcagttcagttacgaccctctcggtcgccgtctgcataaaacggtggattacttaccggcccttcataccccggaggcctatcagcggctgccattaaatgcacatgcatgcggtacgacgacgtttctctgggaagggctgcggctgctgagtgagcggcgtcagggggttgagatgctgtatgtttatgaagacagcaacagctattcaccgctggcgcgcattgaccatgaagacgggaaaaaatcagtttattatttccggtgccagccgaatggcttaccggacgcccttgatgacagtgaaggtaacccacagtggtatgcacgttttacctcatggggtaaaacggaagttgagtcaggacggctgcacactcccgggca

SEQ ID NO: 11 - DNA, 46909 bp, unknown
  Altogen 322075 strain
  misc_feature (29818)..(29836): n is a, c, g, or t
cagccacaggcggaaggatgacgcggattcaggatttgaggagaccgcgcacaaccaccttgctcgccggggcgctgcgatccgtcgcccgccgcactgccatgttgatggcctgccaggcaatttcctgaagatcatgagaaatgcacgggaagttgaatccgtaaatatcggcatgagagacttcatcaatgctgaacagtgagacatctttttgcgggatcagattatggcggatacaggctttgataatcccgagtgagatctggttattgcagccgacaaaataatccggcgcgggatggtatttcaggtaatggtcggtgactttaaaggcttcatccatcaggaagtccgcatgcagcacattgacgctgctgacctggccgtgcaaaccggccaccatgccggttacgcgatcctgggccacattggaatcttccgggccagagacaatcaccacgttatccgctttttgtgacagcagatagcgccctgcctgcaatccgcagtcgaggttatcgatgtaaacaccgctgcatgctttggcatccagttcacggtcaaccaggatcaccggaatattgagcagttccagctgtttcatatacgccgggcggtaaacccgttcggcagaaacaacggacagaataatggcatccacgttgtaaccgatcagcttatcaatgatacgcgcttcattttcacgggattcataggagtcaaacatcagcgtgtcatacccggcgttataggcttccagggtgatgcgcttggccagcccgccgaaaaacgggttgctcatgtccggactgacaataccgatggtacgggaggatttcgcgcgcaggctgcgtgccgccgcattcaccacataaccgattttatctgcggcatcgagaatacgcctgagagtttccgggtgaaccttatccggctgcgaaaatgcgcgggatgcggtgatcttactgacattcgcaatagcggccacattttccagtgtgactttctgtgtccggggttccgccaattttctctccttagcagcaacgtatcattttataccattataatatcatctaaatcgattcagtcacgtgaaaaacacgctttttattacttaaaccgacactaacaactttttaacactcgagtctttttatccgcggatcggtaaaaatgtcgtattcatcggtgttttctgtggagaactccgacaccaccgcaccctgcggcccggctttaaaccagtggcgggtatccggcatgatggtgtactgctctcccgggcgcagcagaataaagcggtcacaggtgtaccattcctcatccccctgcggcggacggcagaccggattgccctgagcatcctgattcagtgtcagcgccggatcatccacaaacagatacacctcgccccagcggcagcggaaagtttcctgcttgcccggccggtctttgtacggcggatgacggtgctccggacaggtctggtcagcaaagagaaccagctctttggcgcagtacagcgggctgttgcagtaagtgagaagctgcaggcccgagcggggataatccggcagattaaagtgagcaatttcaatattctgcttttccgcttctgtcagaatgatatgtgcctgttccagaaccgtcagtgattccgcgatatacggctgtttattcatctgcctctctcctgaatgatatcgttatcattatagccttgtcccgggcagcaaaaatgtgacctgaaaggctctttgctgaatactacatgagtagttcggactttatttaataaaagtttaaccatcatcacataattataataaacattgctctattatccgcatcatagtaatgatatcgatatcattttaatgaaaggaaatgatcatgaaggcattagtattagagaaagcagggaaaatcaccattcaggattggcagagtaatgaagtgctgggcgacgatgatgttgagattaaaatccacaccgtcggtatctgcggcagcgatgttcactattatcagcatggccgtatcgggccgtttgtggttgaggcaccgatggtgctgggtcacgaagcgtccggtgtgattaccgctgccggtaaaaatgtgaagcacctgaaagtcggcgatcgtgtgtgcatggagccgggcattccggatctgcagtccccgcaatcccgtgccggtatctataaccttgatcctgccgttcgtttctgggcgaccccgccaatcgacggctgcctgcgtgaaagcgtgatccaccctgccgccttcacctttaaactgcctgataacgtttcctttgcccagggcgcaatggttgagccgctggcaatcggtatgcagtcagcgaccaaagccgggatcaaaccgggtgacatcggtctggttatcggtgccgggaccatcggtatcattactgcgctgtgcgcactggccggcggctgttccgatgtcatcatctgtgatgtgtttgatgaaaaactgaaagtggctgagaaatatcagggcctgcacgcggttaacagtaaagaccagcaggcactggcggataaagtccatgaactgaccggcggcgaaggcgtgaacgtcctgtttgagtgcagcggcgcgaaaccggttattgcctccatctctgatcatatcgccccgggcggcaccgcagttctcgtcggcatgcctatcgacccggcaccgctggatatcgtggcggcacaggcgaaagaagtgaccttcaaaactattttccgctacgccaatatgtatccgcgcaccatccgtctgctgagctccggcaaactgaatgtggccccgctgctgtccgcaacctacaagttcaaagacagtgtcgaagcctatgagcgtgcagccgaaggccgtgcgactgatgtgaaaattgtgctggaaatggagtaaaccatgacgctctatgccggtattgactgcggaacacaaagcaccaaggtcattattgccgataaccggaccgcgcgtattctgggtgagggctcagcccctcacccgatgatcagcgaatcagacggaagccgtgaacaggaagccgtctggtggactgatgcgctggaaaccgcgtttgctcaggcgatcaaaaacgccggaattgacgggcgggatatccgcgccctcgctgtttccggtcagcagcacggttttgtgccggtcagtcatgacggtacggtacttgcgcctgccaaactgtggtgtgatacctcgaccagtgcggaaaatcagtggtttattgatgcactgggcggagaacaggccgcgcttgaccgcctgggtgtgttgccgcagaccggctataccgtgtcaaaaattatccgctttaaacagcagcacccggaactgtggaaacagctgcgttatgtgctgctgccgcacgattacctgaatttctggctcaccggacaggcctgtgccgagtacggcgatgcctccgggaccgggctgctcaatatccgcagccgtgagtgggatcaggccgccgctgatcttatcgatccggaaggccgcttatggcaggcgctgccgccgctggtgcgcgcagagcaaatcatcggcacggttcgtccggagatcgcggcgaagctcggtatttccccggaaacccgcgtggcatccggcggcggcgataacatgatggccgccatcggcaccggaaatatccgtccgggcatcactacgatgagcctcggcacctccggtacgctgtttacctttgcggaacaaccggttgtggcggattccgcgatgatcgccgggttctgctcctccagcaacggctggctgccactggtttgcaccatgaatgtcccctccgccaccactacggttcagtcattattaggcatggatattcaggcctttaatgatgcactgaacagcagtaaacccggggcgggcggccttattatgctgccgttctttaatggtgagcgcgtacctcagttacccgaagcccgcgccagccttcacaatatggacggcagcaatctgactccgcagaacctgagcctggctgtggtggaaagtgccacttacgggctgcgcttcggtattgatctgttccgtcagcagggaattaccaccagtgagatccgtctgaccggcggcggtgcccgcagcgtgaaatggcggcagattgttgcggatatcatggcggcaccagtggtgtgcgtcaccaaccaggaagcggcagcactgggtgcggcggttcaggctatctggtgtgacaccctcagcgcagacagcgcaccggaagcacagctggccgctctctgcgaccgctttgtgcaactggatgacagcagccgcacacagccggatccggcgaacgtggcggtttatgagtccctgtatcagaactaccttgctttactgacatcagaatccccggaggtccccgtatgccagccactgtcgctgacaatgaggaattactgcgggttgaaggggtgcgcaaagcctttggtcaggttgttgcactgaagaacgcgcagttttcactgaaaagaggttccattcacgctctgtgcggcgggaatggtgccggtaaatccacgttcctgagcatcctgatgggttttatccgtccggatgccggtgaaatctatgtcaaaggcaaacgctgtgagtttcatcagccgatcgaagccctgcacgccggtatcgccattgttcagcaggaactgagttccattcctgacctgactgtggcggaaaatatctggctggggcgggaaccgcgccgtttcgggtttgtcgattttaaacagctcaaccgccagaccgctgaactgctgaccgacctgcattttgatatctccccgtcagaaaaaatgcgcaatctgagtgtcgcggaacagcaactggtcgaaatcgccaaagccctctcccacgcagatgcggatatcatcattatggatgaaccgacctccgccatcggcgaggaggatgcgcagaaaattttcgatgtcatcacccgcctgacggaaaaaggtaaaggcattatttatgtctcacaccgcctgtccgagatttttcagatagccgataccttcaccattttccgtgacggtacctttatcaccgacggcccgctggcggatatcacccgcgagaagctgattgagctgattatcggccgtgaaatcaaagatgagttcgccaaatttaacgagccgacagatgaaaccattatggaagtccgggatctgtcccgtgatgaccaggtgcaggacatcagcctgacgctgaaaaaaggtgaaattctggggatttacgggctggtcggttccggccgttctgagttcctcgacctgattttcggcatcgaacacgccgataaaggcaccataaaaattggtgaccgcttcctcgacaaacacacaccgaaagattccattaatgccgggatcgcctatgtcactgaagaccgcaaagataccggactgatgctgggccgttccatcaacgaaaacatcaatatcgcctcgtttggtgccatcagcaccggcggctttattcatgaccgcaaagagcgtgcccgcgcggacgacatgatcacactgttcaatgtcaaaaccccggatgcggatcagctggtcgggaacctcagcggcggtaaccagcagaaagtggttctgggacgctgggcgctgatcgagccggatgtgatgctgctcgatgagccgacacgcggcgtggatgtcggtgccaagaaagaaatttataagtttatgtctgagttcgccttacagggaaaaggcattgtgatggtctcttctgagctgtcggagattatcgggatgagtgacaggattattgttttccgtgacggacggatcgccggagagctgaccgccgccactgccacccagactgatttaatgaaacttgcggtgtgatctcacccgccaacgtatgcatgaataaagagaagtgaccatgactacaacaaatactgcacccgcaccaggggtctcatttatcgcccgtaacaagaaaaacatgcacaaatacggcattattctggcgttctttgtgctgtgtctgattgtggcggttgtcggtgaagttcaggtcgcccgcggcgaatggaccaataactactttctgagtcaggacaacatgctgattatcctgcgtcagatttccatcaacggtattctcgccatcgggatgaccttcgtcattatcaccgccggtgttgacctctctgtcggttcggtgctggcactgagcgggattgtggcggcgcggtttgccaccagcaacaccggtctggctatcggtgataccgcgaatgccgtgatgatcccgatgattatcgcactcggcatcggtatcatttgtggtctgctcaacgggaccattctggcgaaattcaaccttcagccgtttatcgtcaccatggggatgctgtctgcggcacgcggtctgactctgctgaccactgacggtaacccggtttcccagctcaacagtgatttccgctggctgggtaacggctatatcctggatatcccggtaccggtggtgatcctggcggttatctttattctggcctggattttactcaataaaaccaccttcggccgctatgtgtatgccgtcggcggcaacccgaaaagcgccagaacctccggtatcagcgtgattaaaattaaagtgctggtttacaccctgtgtggcgcgttagccggtattgccgggctgattctgactgcccgtaccgggtcagcacagaccagtgcaggcagcgcctacgagctggatgcaatcgctgcggtggttatcggcggcaccagtatggccggtggtgtggggacgttagtcggcaccctgttcggcgtgttaattatcggtgtgatgaataacggtctcgacctgctgggcgtgcagtcgtactaccagcagattatcaaaggcgcattaattgttatcgccgtacttttggatccgtcacgtaagcaacgccgtgactgatggcagtaccgcgcggattctttcagcctgccacaggctgaaggatgaagcgtaaaaaagacgaaaacagcaaaaaacaaaagcaaaactaccctacacaatgaaggaatgaccatgaaaaaactgaccaaaatcgctgcactgacagccctgatgatgggcggacaggcatttgcggcacaggacaatccggtaaaaattgccgttctgatgtacggcatgaaagctgaatttgtccagttaatggaaaaatccgcaaaagagcatccggctgtgaaaaacggtgaagcgatcatcacagtttatgatggccgttatgatccgatggttcagaacaaccaggcggaaaccgcaatccagaccaaagccgacgctattattatcaatccgatggattatgaagcgaatatcgacgtggtcaccatggcaaatgacgccaaaatcccggttatcgtcaccaacgcccgtctgaacaccgacaaaatgaccgcagaagtggtgtctgatgacgtcctcggcggttatatggaagccaaagcggttctggaaaaaatgaactgcgaaggtaacgtggttattatcgaagggccgaaaggcggcagcggtgaaattcagcgcggcgaaggtaatgacaaagcgatcgcggaatgtggtccgggtaaagtgaaagtactggagcgcaaaacggctaactggtcacgcgcggaagcgatgccgctgatggaaaactggttacagaaacaccgcggtaaaatcggcggcgttattgcacagaacgacgaaatggcactgggtgcgattgaagcaatcaaatctgccggtctgaatgtcaatgatttctctattgccggtgttgacggcgtatcagatgctatccgctcggttcaggaaggcgaaatggtctccatcctccaggacgcgaatgcacagatgcagggctctatcgacctggcgatgaaagcggtcaaaggtgacaaatacgagccgcagtccaaaatctgggttcagtatgctgaccagctgaaatggaatgacggtaaagacaaacgttacgcgattccgtggactcaggtcaccaaagaaaacgcgcagcagttactggatgcccgtaaataaatacactcccgccgtcttcttatgaaggcggcgtttttttatccgcaatttcccctgttcaggccgttttatacacaattcaaaaaagtcatgtccggaaagcggtatgaaccgctgaatatcccgtaacgccgcattcatccttcccctctgattaattcaccgtatgataggcttatctgccggataaatgtgcgatgtgaaataatggatgacagagaaaaggcggttgaaaaagtcagaaagctgatgtctcttgccgaaaatgccggtaatgagaatgaagccgcgaacgccttttcaaaagcgcggatatttatgaaaaaataccaccttgaactgtctgatatctattccgcagaaccgtctcccccgccaccctctccccgcagaaaagcaccaccgcgcccgctgaccccggaagagcggcaccgcgaaatgacacgcctgaaacagcaggaagaacagcggctgcgggagtttcagaaagtggcggaacagcaacagcaacggaaacggcagagagagcgggagcagcaggcactgcgcgaactggaaaaacgcagggcacagcaatccgcccgcagcacgccggagccctcccctgagccggtaccggaaccggtcagacgcccggtgccgccggtgcgccctgcacaatcaccccgtcgtccggccgccgcgcaggaagagcgtccgcagctcatccgccgcagcccgttactccggccgcagaatatcgtaccggccgtggtcgccgctgtgctgctgctgttcgtggtgtatgtgctgtatctccagtagcggtacggtaaagggaaaaaacaaaccggagtgaataatgaaaaaaaccggcctcatcagcactgtctttttcctgacgggactgaccgtgcaggctgccgctcagccctgtttttcactgtccgaggtgaaagatatccgctctcgcctgcagaccagcccggaacaatttacacagacaacgaaccgctacggctatgtgaatcacactgatgccacgtttctggcgcagttccgtcatccgcaggaacagtatctcatttcagaaagtaccggtttctccggcggcatggggctgcccggcggtgaacaggtatcgtttttaaataaatttccggccgggttatgtatcagccaattaacctttacggttcctgaccactatgtggctgcgtgtgacgattatctgacgcccccggtcaccctgaatttttacaaaactgacaccgcgattgcctgtgttatagattcggctttcaatacaaacacgtgtgttgccggacaactgaaaacgaaaaaaaacgagccggaagatgcctatatcgcttatcactttccggataaaaacgccggcgatccgctgtcaccgtttgcattttcgcagggatcgaccgagccgtttgtcgccggcgccccggacgcgatggccgggaatcagttgcctgtagcgggagaatttaaatacgccgatttctggcgcgcggatgcactggtctggttaacggaaaagcagggtaaaaccggggcatcggtgcatgcgtatatgctttcctggcaaccggggaccgatcagttaatcgccccggcgtcactgagcgccgtgccgctctatacggatacgctggcgtgcccggaggcagaactggcctttgtgtataacggtctgaggatcacgcatttacgggacacggaagcatggctgaaaacccgggctaaatgcgccggaaatacccgctggcagacccgtattatcatgtatgacgggaagcagttacacatcatgtccggcacatccgcagtaccggcagatccgctgttaccggtgaaaggaaaccgtgattttcagtttgataacgcgtttctcaccgcaccgcagccggtgcgggatttcgctgaaaagctgtggttttcagaagattaggttttcagaagattagctttacagaagattaaccatgccatttatcacagtaatataaccgggccgcatatgaaacagaccctccgcatgataattcgtatgacaacaacagcgtcgctgttgtggtacggcgccgcatttgcgcagcctgcggcggataacgttacacattctgcagggattatttatttttccgcgccttatacggcgcaggattataaagtgtgcattttcggtaccggagagaatgcccgcctgagtgatgatcagcagattggttgcgaggatcgctataacccggatgatgaaaacctcagccggcctcttccaccgcctctggcaaatctcattaaacagcattggggagagacagattttttcgccgtgccgtccaattatatttatcagttggaagaatccgtaacaaaccggtccgtttatctctggcctgacggtccgggctggatgacgcccgccggtgatgatcgctgcgctttacggcctttcgcactgatgctgagtaccgttaaccgcaccaccggtgatatccgctcccttcccgtgctcttgtatcagcacaatggcagtcagggcgcgcaatttgcagattacatttatgattttgacctcacccccgcgccggacaaccgcctgacagtgacgatataccgctatcagaacaaaaaacggatgcgcgctgagcagtacgccatcacgccgtccggtcagctgatttctgccgggcgctgaatccccagcgtgtccatcgccagtgcattccacgcacggcaactgcggctctgatccccgccgcgcacaccggccagcgccagatcgtaagaaagcaccgggtcggtcaccggcaacagtaccagaccatccgccgtgcgttcacgccacatgctgtccggcagcagcgtgatccccacccccgccctgaccatcgcgaggatcagatcaaggtgattgctccgccccgccaccaccggttccgtgctgtaaatcccgcaggcgctgcgcaccaggtcgtttatccggaatgcttcggagaaaaatacaaacggctcgcggataatctccgcaaagcttacctgtttttttaccgccagcggatgctgatgattcaccagcagcattagccggtcggtggcgaagcggtgcagatcaaacagctgttcatcaaacggcagcatcaccgcagcggtttccaccgtaccgtcggtcatcgcttcggccatctgtttcgtacccagttcgaaaatcttcagttccacctgcgggtgacgggaagtaaatgccatgataatcccggcaaaccaggtcgaggcgataaccggcggtaatcccacattcaatgtgccggtcagcgggccggatttatcctgtaatgctttgttcatacactgaaactgcaccagaatccgtcgcgcgtgctcatacagaatcgccccttcatctgtcagcgtcactccgccggtatcacggaccagtaacggaaatcccagttcatgctccagcttctgaatactgcggctgatagcgggttgcgtgacaaacaacgcctctgccgcccggctgaatccgttgtactgaaccacctctgtaaagtagcggagtgcgcgtatatccatgtttctgctgccctataacaaaaagttatcacgctgatgattatataccatttccatttataccgcagaaccactagaaatgatcgccatgacacgtggttcgttctgaataaacggtgtgatcggagaagataacaatgacaaaaagcgtaattgagcatgttttaagccgtctggcggatttgggcatcaccgatgttttcggcgtcgcgggggattttgcgttccccattgaagatgcggtctgcgacggtaacacacagcgctggattggtaactgtaacgaactgaacgccgcctatgccgcagatggttatgcgcggatcaaaggcgctgcggcgctttccaccacgttcggcgtgggtgaattaagcgcgatcaacggcatcgccggttcgtatgcggaaaatctgccggtttttcatctggtcggcatgcctgccagtggtgtacaaaagagtggccgcttggtgcatcacaccctgggtgacggtaatttcagcctgttctgtgagctgggacagcgcctttcctgtgcccacgccgttatgaccccggagaactgtgtggcggagacagaacgactgattgctgccgcgctgcgcgagcgccgtccggtctatatgggtttcccgtttgattacgccacacaaccggttcagatgccggaacaccttaccgcaccggcacaaccggtcagtgataaaaccgcgctcactgaagcggttgccgcgatcagagcaaaactcgcggacagcccgtctgcctgcatcctgccgggcatactgaccgcacgctccggactgattgatgacgtacaggcgcttatccatcggacagggctgccgtacgccaccatgtttatggataaagccatcatcagtgaatccgacccgcattacgccgggatgtataacggtcagctgatgaatccgcaggtcagggaatttgttgaaaacagtgactgtgtgctgggtatcggagcggtgatgacagactttaacaccggcagttttaccgctgatatcgccccggaaaagctgatcagcattatggcggatcatgtccgggtcggcgcaaaaatctggcagaatgtgtatatgcgggatctgctgcctgccctggccaccggacttccgcaccgggaatgccatattccggcagcaaccgggctgggtaaaccggtggctgacgcttccggtaatattaccccgccatatctgtatccgcgttttgagcaattgttcagaaaagacgacattatcatcgctgaaaccggtacggtttcgatgggattagggtttgcactgctgccggaaggggcgcaattccataaccagacgttatggggatcaatcggctgggcaacacctgcggccgttggagccgccatcgcagcgcctgatcgcagactaattctgatcaccggggaaggctcacaccagctgaccgcccaggaaatcagtcagtttggccgttttggtctgaaaccgcttattttcgtgctgaataatgacggctatcttattgagcgcctgctgtgcaaagacccggaagccgtttataacgacctgccgcagtggcgttacgcgcaactgccgcaggcgctgggatgcgataactggtattgccgccgcgtcaccacctgcgcggaactggatgaggcaatccgggaagcggaaaccggtgaccgcgccgcatatattgaaatcatcacagagcgctatgccgcgtccgatctggcaaaaaaactcggtgaatcagtagcaacgctgtactcgttttaactctccggtgatccgggtgcagctccggcggcatccggatattaaaacccgtttttctcacataaggctttattggcattcagcgtaaataaaacatggccggggtaatcatcgtaataataatggatttccgccagccctttggcctgcgccagacgcacggtctgtaacgagcacgtacggtaaatcaggtctttctgcatatttttctgatcatcttcccgtgctgccgccggtttattcagccactccgccgacagggaatagtgataaatcacatcactgccttttgcctcaattttttcaatatatacggtgtcatccactttcatacgcggctgcccctgcatccgcgctctgtcactttctgcccccattgccgctatctcattggcactcatcgtatcaatgcgctgtttaaatgcggcgacatacgccggggactgagaataatgttcggcataacgctcacggagttctccgtcactcatcacacagccgctcagaataaaggcggataacagcaaaaactgttttttcatacttgttccctgcaaagtaaaatcagcggatatctgattccggatagtttctgtacgtaacttctttaatttcccggtctccgtcaaaacaaaaaccgagccggcgatcaaaccaggagtaataataacaattgtcatccggggatatctgatagcggtttccgtaggctttaatcatatcctgatatgaatcccctgccgcaattccccgccgggttttataacggttgtttttgaaggttatttccgcaatatacttatcccttcccccggtccgtttttcaataatcacattggtaccggcgacggtaattatcgtatcaccggtatcataacgccataattcaaactcacggaaaaagtcatgcaatggtgctacagagaccttttttttctgctgttccagccagcgggaaactgtattatcactcagtggttttcccagtaaatccgcctctccgtcatccgatgaccagatgaaatcctgataattaaggtcgttattttgttcatccgatttttccagcagtgacagttttatccagccctcaaccactctgtttttgctgttaatataattaacataggcaaaatcaccctgtttgcggtactgcaaaacatggtcaccacggataataaagcgatccgttttacattgttcgtccggctgggagtaaaaccacgtccggccaccggctataatttctttcgtggccggtaatgtaaaggatgccgctgaccatgttgacggattaaccaggcaggatgctgtttcaggtgatgacagaagatacgtaatgcgggttattttttttgctttatctgtttcaaaagtaagacttgtattttccagctgataaataaacgattcgttagtctcagtggcactgaagctgtcatgaataccgtaacgttcaaacatcagaaataccggatcaccgattttaatcccgcggtgtgttttatacttatctgataaaatatctatctggctgataacctcttcatcaaggttatcatttacaccgtctgatatataaacagaaaccgccggatccgggtagttcaccccgagtgtccgtccgtttttactataaccgataaatacggtttcaggctcctgaaaataatatttcaggatatcactgcgcagctgacttaccggctctccgggacggagtatcatcttatcggtcatcagctgataatcctcatccgacaacggattatccgttttctttttcggcttgcggtttacgtaatccacctcttccgcaagcggggatattctgaggttagtttctgtcagctgggataattccagccagccgtcaatcagctcaccttcggtgttaatataaccgccaaacagataatctccggcgatctgataaccgataacggaatcacctttaatcagaaaactgtttttacttttacaacggctgtccggtgcggaataaaaataggcacggccgggagacgatacccggtaaatatggcgttcactctcagcaccctgatttccggcctgacgggcaatattctgacattcatctgatactgccgatgaaattaacggataaaacaataacaggacagataatagtatttttaccattcacacggataccgggaaataaacataataaacttatagcttattatctcttttatttctgcagtatccgtactgttttacactctttttttgttatcccttcaccagaatcacttctgtaccgatccggcgcagaccggtcaggctcgcttccggaataccgtcatccgtaataatggtatcaatacgctgggtatcgattattttatgcagactggaactgttaaatttactggaatccgtcaccaccacaatttgtccggccacttcacacatccgccggttgagccgtgcctcatcttcattatgtgtgctgatgccgcgctccagatcaatcgcatccaccccgagaaacagcatatcaaagtgataattctgcaatgactgctccgcctgatcgccgtaaaaagagagggactgacgccgcagctggccgccggtcatcagcagctccacgcccggtgcttccagaagggcgttcgccacattcatgccgttggtcatcacaatcgtatcctgatggtggcgcagctggcgggcaatctcatacgtcgtggtaccggaatccagaatcacacgcagccccggccggataagatcggcggccaccgccgcaatattgcgtttgatagtggtgtggggggtacttttatcctccagcaacggctcgctgaccggtgaaacaccctcacaaatcagtgcgccgccataggcacgcaccgcgatcccctgtttttcgaggaaagcgaggtcattgcggatagtcactgtggaaacgtgaaactgctgcgacagctcattcacctgaacactgccgtgggtacgcaaaagctggatgatatgctcacgccgcccgctcgttcccatcacccggttatccgtcccggcatccggactgttcatgattttatccttaatattcatttgaaaaatctttcgtttcatttcgtttggcatattaacgcttttctttgtccggaatgcaagcccataaaaagggtgaacaccggatgactcaggaattaatcctttcattatatttcttttgtgatgaagatctggatttcacaacctttcattttgttttcttttttctgtatagcagtatgttattcagacatcgaaacaaaaacaaaccacatccggctgtaaggagaggaaagtgaaacttttaactgatatcgttgcccgtcacaaacagggggagaaaacagggatttatgctgtctgttccgcccatccgtatgttctgaaagcagcggtatgttttgcccgtgaacaacaaacgccgttactggttgaagcaacctccaatcaggtggatcagttcggcggttataccggcatgacaccggctgacttccgtgattttatgtggaagctggctgatgaacatcactttccccgtgaaaatctgatcctcggcggcgaccacctcgggccgaaccgctggcagaatgaaccggctgaagacgctatgacaaaagccgatgagctgatccgcacttatgttgccgccgggttcaaaaagattcacctcgactgcagtatgtcctgtgccggtgatccggtgccgctgacagatgaaatcgtcgcacagcgcgccgcccgcctggcggtgattgccgaggaaacctgtgagaagcatttcggcgtccgcgacctggtgtatgtgattggtacggaagtgccggtgccgggcggggctcacgaagagctgaatgagctggcggtcaccacaccgcaggccgcatccgccactatcgccgcacatcaggacgcatttgcgcggcatcagctcacggatatctggccgcgcattaccgggctggtggtacagccgggggtggaatttgatcataataatgttattgattaccgtccggaaaaagcccgtgccctgagtgagatggtcacgcatcatgaccacctggtgtacgaggcgcactccacggattaccagaccccgcatgcactcagtcaattagttgacgatcactttgcgattctgaaagtcggccccggcctgaccttcgccctgcgtgaggcgctgtatgccctcgccggtatagaggatgagctggttgctccggcggcacgttccgggctgcgtcaggtgctggaagatgtcatgctgaaacaaccgggctactggcagagttattataccggtgatgagcagacccgccgtcttgcccgcagctacagctattccgatcgcatccgctattactggccggatgagaccatcagcgcggcagtgacccgtctgctggaaaacctgacggaaacggcgatcccgctgccgctgatcagccagtatctgccgttacagtatccgctggtacgtgccggaacgatctccgccgcaccggaagaattaatcatcgcacacattcagactgtgctgcgtcactatcacgatgcctgtaaaaccatgcctgccgataagagcgagaaacagccatgccaaatattgtgttaagtcgtattgatgaacggttaatccacggacaggttggtgtccagtgggtgggatttgccggtgccaacctggtgctggtcgccaatgatgaggtggcggaagatccgctgcagcagaacctgatggaaatggtgctgacggaagggattgccgtgcgtttctggccgctgcagaaagtgatcgacaatattcataaagctgctgaccgccagaaaattctgctggtctgcaaaaccccggcagattttctgaccctggtgaaaggcggcgttccggtggaacgcattaacgtcggcaatattcactataccgaaggcaagcgtcagattgccaaaaccgtgtctgtggatgaggcggatatcaccgcattccgcggacttaacgaggccggtgtcgcctgttatatccagggcgtaccgacagaaccggcgcaggatctgtttaaactgctctgaggatacatgtatggaaatcagtctgttacaagctatcgctctcgggctggtagcctttattgccggattggatctgtttaacgggctcacgcacattcaccgtccggtggtgctggggccggtggttggtctgatcctcggtgatctcaataccgggatcctgaccggcgggacactggaactggtctggatgggactcgcgccgctggccggtgcccagccgccgaacgtgattatcggtaccattgtcggtacggcgtttgctatctccaccggggtcaaaccggaagtggcggtcggcgttgcggtaccgtttgccgtggcagtgcagatggggatcaccttcctgttctcggtcatgtccggtgtgatgtcgcgctgtgacaaaatggctgccaatgccgatacccggggaattgaacgcatcaactacctcgcactgctggcgctcggtacgttctattttctctgtgccttcctgccgatctatttcggggcggatcacgccaaaaccctgattgatgtactccctgcacgcttaattgacgggctgggtgtcgcgggcggcattatgcctgccatcgggtttgccgttctgctgaaaatcatgatgaaaaatgcctacattccttatttcattctgggatttgtcggcgcggcctggcttcaactgccggttctggcaatcgccgctgcggcactggcgatggcaatgatcgatttcgtccgcaaaccggcagaaagcgaaccggcacaaccgtcacacgaggaatttgaagatggcatctgaaaaaaatcattcatctgccgcagaagcggaaaccttactgccggcagactgtaaccagaacgtgtatgaagatcagagcaccggcgcggaactgacccgcaaagatatcaaccgggtcgcgtggcgctccctgctgttacaggcctcctttaactatgagcggatgcaggcggcgggctggctgtacggtttactgcccgcactgaaaaaaatccacaccaatccgcgtgatctggcgcgctccatgaaaggccatatggggttcttcaatacccaccctttcctggtgacctttgttatcggcatcatcctggcaatggaacgctccaaacaggatgtaaacagcatccagagcaccaaaattgctgtcggtgcgccgctgggcgggatcggcgacgccatgttctggctgaccctgctgcctatctgcggcggtatcggagccagtctcgcattacagggctcgattctcggtgctgtggtgttcctggtgatgtttaacgttgtccatttcggactgcgttttggcctggcgcactatgcttaccggatgggggttgccgccattccgcttatcaaagccaataccaaaaaagtcggccatgcggcctcgattgtcgggatgaccgtgatcggcgcgctggtggccacttatgtgcggctctcaaccacactggagattaccgccggtgatgcggtggtgaaattgcagagtgatgtgattgataagctgatgcctgctttccttccgctggtatacaccctgtcaatgttctggctggtacgccgtggctggagcccgctgcgcctgattgtactgaccgtggcgctgggtattatcggtaaattcgcccatttcctgtaataagaggagtcactgatgccgggaattattttatgtggtcacgggggctttgcctccggactggaaaaagccatgttacagattatcggggagcaggaggatttcgcggcaattgattttccggcggaatccaccaccgcccgtctgacacaggaactggaagccgcactggcgctgatgtcacactgcgacagtgtgattttcctgaccgatattctcggcggtacgccgttccgcgtggcggccaccctgtcacagggccgggaagaccgcgaagtgatcaccggcaccaatctgcagttgctgctggaaatggcactggagcgggattctctctctccggctgagttccgccgcgaagcactggcctgcggtcaccgcggattaaccagcctgacagacgagttacagcgcgaacgctgctgtgaaactgaggacgaaggcatatgattcagcaaatccgcgcccgccgtgtactgacagaatacggctggcgggaaaaccaggcggtggcggtgtcagacggcatcattaccgccatcacaccgctggcggcaaaagaaacacagtttgatgcggagcagctctgcccggcttacattgatacccatgtccacggcggacaaggtatggatgtgatggatgataatccgcaggcgctgaaaactattgccgctttcaaagcacaacagggcgtcgccgcgtggctcgccaccacggtgaccgccccgctgccggatctgcgcagtaccctcgggcggatcgcccgttactgtcagcagcagaccaccacagagccggtggcggaagtgctcggcagttatctggaagggccgtatttcacgccacagaataaaggcgcacactctccggagttgttccgtgaattacagatcagtgagctcgacacgctgattgccgatgcggcaggcacactgaaagtggtcgcgctggcaccggaaaaaccggaggcgctgaatgccatccgccacctgaaacggcgcgggctgaatgtgatgctcggccacagtgccgccacctatgagcagactctggcggctctcgatgccggggctgacgggctggttcactgtttcaacggcatgaccggtctgcatcaccgcgagccgggcatggcgggagcaggattatctgacccgcgcgcctggctggagcttatcgctgacggacatcatgtccacccggcagtaatgcggattgtctgtcagtgcgccgcacaccgcacggtgctgatcaccgatgccatgcgggcagccgggcagccggatggcatttatgatatctgcggccatgatgtcacgatgaaagcgggtattgtccggactgcctccggtggcctggcgggcagcaccctggcactggatgacgccgtcagccggatgattagtgataccggcacgctgccggaaaccgccatccgcatggcctctctgcaaccggcacaattgctgggaatcaccgcgacacacggcagtatctctgcgggaaaacgggcacatttcaatgacctgaacagtgactggcgggtaacacaaacctggatccacgggcagccggtacgctgatttcctttcattctgaggtgcggatctccccgcacctttcttttccttatgtttatccgctgggtacttttatataactcactaataaacaatagcttaatcatttcacttgtggtgcaaatcacacttttcgttttcttttcattactgcattgatccttcgttttccttcctgtaaattgaaatgaaacctcaaaacgaaaccaaccgaaaggtaatggccgatctggtgaccttttgattcatttcactttcggctgaacgtcatgtaaaggatgaagctatgcacgaccctctttctgccacaccccgctattccacctggacggaaacggagatccgccagcaacctgattgctggatgagtgcattacactcaatcgactcacaacgcgcacagctggatgccttcctcgcgccgctgctggctcaggacaacctgcgcatcattctgaccggtgccggaacttccgcctttatcggtgagatgatttctcccgtactgcgccgcctgaccggtaaaagcgtcactgcgatcccgacaaccgatatcgtcaccaatccggcggattatctgcctgagcagcaaccggtgctgctggtgtcctttgcccgctccggtaacagcccggaaagtgttgccgcgtttgacctcgctaatcagtgtgttgcccgctgctctcatctggtgatcacctgtaataaagaggggcatctgtatcaacgtgtacagggcagtgataacggttttgctctgctgatgccgccgcagaccaatgataaagcctttgccatgaccagcagcatcacctcaatgatgtgcagctgtctcgccgcccttgctccgcagacgttcagcacagaccgttttgccgttgtggcacagcgggcgcgggatattctcgccgcgcatggcagcagcggacagattctgccgggtaatgattcttttaaacgcgtggtttacctcggcagcggcagcttccagggactggcgcgggaatccgctctcaaactgctggaactgaccgccgggcaaatcgccgccttttatgacacgccgaccggcttccgtcacggcccgaaatctctggtcgacggcgacaccctggtggttgtgtacatctcaaaccagccttacacccgtcagtatgatttggatctgctggccgaactgcgccgtgaccggatcgccgggcaggtggtcgcaatagccgatctgccggatgacgccatcagcgccgggacacactgctatctgcctgccggtgacgccctcagcgatacagaactgctgttctgtttcctgccgtatgcacagttatttgccctcagtcagtctgtcagaaccgggatcacaccggataccccgtctgccagcggaaccgttaaccgcgttgttcagggcgtgattattcaccccttcaataaccagaacacaggagcataatcatggggatcatctcaaccaaatatctgctcacacatgcacaggctaacggctacgcagttcctgcgtttaatatccataacgccgaaactattcaggccattctggaagcctgtgcggaactgcgggcaccggtgattctggcgggcacgccgggcacctttaaacacatcagtttcccggaaatttatgcactgtgtgacgcctattcccgctcgttttccatgccggtcgcgctgcatctggaccaccacgaaactcttgacgatatccgcaccaaagtcggccagggtgtgcgcagtgccatgatcgacggcagtcatttcccgtttgaggagaatgtcgcgctggtcaaatccgtggtggatttctgccacagtcaggattgcagcgtggaagcggaactcggccgtctcggcggcgttgaggatgatatggatgtggatgcggaaagcgcctttctgacctccccggatgaagcgcgccgttttgcacaactgaccggcatcgacagcctggcggtggctatcggtactgctcacggcctgtataccagccgcccgaaaattgattttgcccggctggaaaaaatccgcagtattacggatatcccgctggtactgcacggcgcgagtgatgtgccggatgcggatgtccgccgtaccattgagctgggggtgtgcaaagtcaatgtcgccaccgagctgaaaatcgcctttgccggagcggtccgcgcctggtttgcagagaatccggacggcaatgatccgcgctattacatgcgggtcggtatggatgccatgaaagtggtggtccgcgataaaatcagggtctgtggtgcggaaggtcagcttctgtaacccgtcaggcggcactgtgttcccccgcagtgccgcctttttcatctgcgaaaaaataataaaaaaagaacaataaaaaatactgtcccgtaacaccccttaaccaataaattataaagaagctgaggagtactctacgatgtcgcaggaaaagtcgtttaaatccaaactctgggaattttttcaaagtctcgggaaaacctttatgtttcccgtctcattactggcattcatggggctattactcgggataggcagttcggtcaccagtccttccgctatcagcagttttccgtttctcggtaatgaatttgtccagctgaccttcggctttatggcgatggtcggcggctttgcctttacctatctgccggtgatgtttgcgatggctattccgttcggactggcaaaccgtaacaaagcggtcggcgcctttgccgggtttgtcggctatatgctgatgaacatgagcatcaactattacctgaccgttacccaccagcttgccgacccggcgatgatgaagcaggtcgggcagtcggtggtgctggggatccagaccctcgaaatgggcgtgctgggcgggattgtggtcggtgttataacctatttcctgcatgagcggttccaggatacggtgctgcatgatgctttcgcgtttttcggcggcatccgttttgtgccgattatcaccgcgctgacgctgtcactggtcggcctcgcgatcccgtttctgtggaaatatgtcgccatgggcattgccgggatcggccatattattcagagcacagatgttttcggcccgttcctgtacggagtcggcgtgctgctgctcaagccgttcggtctgcatcatattctgctggcgatggtgcgttttaccccggccgggggcacggaatttgttgacggttatgaagtcgccggggcactgaatattttctatgccgaactgaaagccggtctgccgttcagcccgcatgtcaccgcgttcctgtcacagggctttatgccgacctttatctttggtctgcctgcggtcgcttatgctatctaccgcaccgcgaaaccggagaaccgtccggtgatcaaagggttattactgtccggggtactggtttccgtcgtgaccgggatttccgagccgattgagttcctgttcctgtttattgcaccggtgctctatatcttccacattattatgtccggtcttgccctgctggtgatggcactgctcggcgtgactatcggtaacactgacggcgggattctcgatctgctgatcttcggcatcatgcagggaacggccaccaaatggtatctggtgttcccggtcgggattatctggttcgctatctacttctttgtcttccgctggtacattctgaagcatgatgtcaaaacgccgggccgtgaagatgccgctgacggcgctgaacaggcagtgaaagccaatacaaaagcacgcggcaaagccaaatacgatcacaacctgatcctcactgcgctcggcggcaaagagaatattgattcgctggataactgtatcacccgtctgcgtctggtggtgaaagatatggacaaggtggatcagaagaccctgaaagaagccggtgccctctctgtggtggtactggatgcccacagtgtgcaggtgattatcggcccgcaggtgcagagtgtgaaatccggcattgaagctttaatttaacaggaactgagcatgtacgattttgatgaaataattgagcgcaaaagtgaccgctgccggaaatgggatcatcagtatgtctgttcccgcttcggggaggtcccgcaggatttcattccgctgtggatagcggatatggatttcaaatccccgccggcggtgattgagcggttcacgcaggtggcacagcacggtaccttcggctacacctggtgctttgatgaattttacgatgcggtggtccgcttccaggcagagcgccatcaggtcacggttcagcgggaatgggtaacactcagctacggcacggtttccaccctgcactatctggtacaggcattctgtcagccgggcgactgtgtgatgatgaacacgccggtgtatgatccgttcgcccatgcagtgacccggcagaatgttaccgtgctgaccaatccgctggtggcgcgggataaccgctatcaccttgattttgaccatattgaggcgcagatgcgcgaacaccggccgaaagtctggctgttctgctcgccgcacaatccgtccggtcgtatctggacagcggcggagataaaacaggtctcggatttgtgtctgcaatacggtgtgctgctggtgattgatgaagtgcatgcggaacatgtgctgtacggcagcttcaccggctgtctgcgcccgggatgtgcagcgccggagaatctgatcctcctgacctcaccgaacaaagcctttaacctcggcgggctgaaaacctcgtacagcatcattcccgacccggcactgcgggcacagttccgccgtcagctggagaaaaactccattacctcacctaatctgttcggggtatggggcattattgaggcttacaacaacagcacggactggctggatgagctgaacaactacctgagaggcaatgcggattatctgacacaggccgttgcggagcatttcccggactggcagatgatgcagccggaatcctcttacctcgcctgggtgaatatcagcgccaccggacgcacagcgacggaactgacactggattatgcccggcagaccggcgtggtggttgaggacggcagtcattatgtggcggatggtgaacagtatctgcggattaacttcggtacgccgcgcgcactgctggcggaagcggtaaatcgtctgaaaaacgcccggtaacagaaaaaaattggcgaccttgctgtattccgtcaacagggtcgccataattaccgatgttttaccttgtactgacaacacttaactgctctgatttgtcatgcgcactgcagtgaaagtccgttttcatcagagcatcggggcatgacacctgtccgctcttacttccttgtaacggtaaattccttttaccgtccccttcccggggtaaatccttttattacctgtgatgataaaacacaggctccctgataatacatccgtgtggtaagtccgtttacaccgggcaaccttgtccggtaacatccgtttatgtccctgtgggatatatccgttatcccgctaaatcattaaaaaacaattcctttattttttaagataataacgagtcagtcaggttatattcgcatccttgcgggcatattaacttataacactccggttataagaaacatctgtaataactgcattttttaatattttcattgatatatctgaagattaatttacagttcacgccaaacgtgaattataaaacaacatctcgatacttaattaaaactgagaataataacgtgaacacaatttcaatttacatttaaaaaatacaaagaccaataagaaaatgctcagtttaaaacaaggaacatatttaccagaaagaaaacaaacataactcagtcccttattaaggttaaagattatcatcataaaatatatcgtcaataagaaatggattagctttatgcgtaaatagcttgatttttcaccttcattccttttattagtatttcttcttcttttgtttatgacataaaaaaatgatgaactatgcaaatacacaataaaacaccacgttattgatacaaacagacaaaaaatccggacgagcatgtcatatgattattttgataaaatttaaggccaaatttttttatatgatactgctgtatttttaggataatactcatctcatgcataacccatggtttcatcaaaatacacttaatgcattgattataaaaataatatctacagcctgactgtaccggaattatttaccatgaacaataatatgctgacgatataacaaaaaaacaacatgaaaacattaatttgtataattaatatcagtaaaataccgtaatccacttttacctttgccggtttatttaagataattgcacattcttaattggtattcataatttaataaaccagtttctaatataattccattaacaaaaaatggaaatatcttatttaaataaaatttaattaacgcgatagtcactccgcagagcatctgcacccccttacggcgtaaggttccggagggataccattatcactgccgtttcattatcaaaatgagatgatatcattctcatactgcataaaccctgttcactctgcttttctcccgcccggctgaccggtacggaaagcccttcgcaaatccccggtgacacgtttcacaaatcgcagatgatttaagatatctctcacatttttatttctttgtcgcgccgctggttcagttattgctttattccctgtaccaaacgatccgctgaggccgacgtatgacctctcattccatttattataaaggagagaaggatgtcagatctcaatcatccaacctctgatctaatctatcagctggacgacaagcccccgtttttccaggcccttcttggtgcggtaacccatttattggccctgtttgttccgatggtgatgcctgccctgattgttggcaaagccctggatttatccgccgataccacagcttatctggtttctatggtcatgattgcctccggcatcggcacctggatacaggttaaccgctacgggccgatgggctccggcctgttatccatccagtccgtcaacttctcatttgtgactgccatgattgccatcggcaccaccatgcgcagtgacgggatccacgaagaactgattttgtcctctttgctcggcgtttctttcgccggtgctttcctggttgtcggttcctcttttgtgctgccctatctgcgccggataattaccccgactgtcagcggcgtagtggtgctgatgatcggcctgagccttatcaaggtcgggattatcgacttcggcggcggtttttccgccaaatcagccggcacatacggcaactatgaaaatatcggtgtgggattactggtcctgctggtggtaatcggatttaactgctgcaagagcccgctgctgcggatgggcgggatcgccattgccctggtggcgggctacattgcctccctgttcctcggactggtggatttcagcacctatcagaacaccgcgtttattacggtaccggtgccgtttaaattcggcttctcatttaatttcacccatttcctggtggtcgccattatttatatcctcagcgtgctggaagcggtaggcaacctgacagccacagccatggtgtccaatcagccgattaaaggtgaggtgtaccagaaccggctgaaaggcggtgtgatggcggatggtgtggtgtccgttatcgcgtcagctctcggctcgctgccgctgaccacctttgcccagaacaacggtgtgatccagatgaccggtgtggcctccagttatatcgggcgctttattgctgtgatcctggtgttcctcggcctgttcccgagtatcggctggttctttaccaccattccggcaccggtactgggcggggcaatgacactgatgttctccatgatnnnnnnnnnnnnnnnnnnntggcaacatccctgggtctcggactgggtgtttcttatgatccgcagatcttcagcatcctgccgccgtctttatatattcttgccgagaacccgatttgcgtcggcggtctgacggcgattatcctgaatctgctgatccctgtcggacaaccgcgtggtgcggccaatgaggaagaaccggacatgctggctgacgagctggaagccatgctggatatcccggatgcagagcgtgatctgccggatatggccatgagtgcggagaacaaacgcgttatctgacccctctgatttctgcccgtaaaaaaaccgcgataatcattatcgcggttttgtttttactgccctctgttatgcgttactgaccatagcctgcggtgactgtgcctgttcatcgaacatactcagcatctcgcgagcggcctgacgaccggcagccatagcagttaccaccagatccgcgccgtgcaccgcatcaccggaagcgaagattttcgggttggtggtctggttgctcatgcggccgttgccgccggttttaatttgtccccatttatccagctggacattatgaccactgagccacggcatcggatgagactggaagccgaacgccataatcagcacatccgcatcaaggataaattcagacccttccaccggtttcggacgacggcggccatccggccccggttcaccgagttgtgtgcggataagcccgataccgctgacggctccctgctcagtgcggtcaataaactgcggctgtacgttatagaggaattccaccccctcttcgcgggcgttgatcacctctttcttcgagcccggcatactggcctcgtcacggcggtaggcgcagataacactctcagcaccacggcggacagcagtacggacacagtccatcgcggtatcaccaccaccgagcaccaccacttttttcccttccacatcaacccacgggtattcatccgccatcggcagccccatcacttcgcgggtactggcgatcaggaacggcagtgcctgcaccacgcccggggaatcctcgtgctccagtccggctttcatcatgccgtaggtgccgactcccagcagtactgcgtcatactcactcatcaggcggctgaacgggatatctttgccgacttcacagttcagatggaaggtgatccccatgtccgtgaaaatctgccgccgctgtgccatcagctgtttgtccagcttgaacggcgggatcccgaaggtcagcagcccgccgatttccggatggcgctcaaacacctcagctttcactccggcacgggtcagcacatccgcacagcccagtccggcaggcccggcaccgataatcgcgacacgttccgggcgcggaaccacatcttccgccacggacggacgccagcccatctcaaaggcggtatctgtgatatagcgttcgatgttcccgacagtgaccgcgccgccgtggttacgcagcgtacagcggctttcgcacaatctgtcctgcgggcagacacggccgcagatttccggcagcgagctggtggagttactcagctccgccgcctcaataattttgccttcacgcaccagacggacgaaatccggaatagagttatgcagcgggcatgacaggttacacatcgccttttgtgagcagtacaggcagcgctcactttcataaccggcacactgttcattcagcccgatatagatttcgccgaaatgatttttacgcagggccgcactctgtttctttgtaccttcacgcggcggacgtttgaggatctcaaaacggatttccgactgacgcgcctggttgtatgcgccggtggctgcccgcatcaggcggtcattgcgcaggatcaccagtttgtgttcatccaggatgctgagtgcgttggtcgggcagttagccacacacgcgggtgacccgccggtggtatcacataaatcgcatttctgcgccagttcgtgcgagtgatcgaacgtcatcaccatttccatcgccccgaacgggcagaccagcacacagcttttacagccgatacatttttcctgatccagtttgactatattgtccgccacatacagggcatccaccgggcaggcagcggcacaaggggagtcttcacactggcggcaggtgacagcgaggctgtcactctctttgaacatgacacggatacggggggcgtaatcacggctgtcatgtggccagtggtgatcattatgcgcgacaacgcaggcaatttcgcaggcgtgacacccgatgcatttttggctgtccgcaactatacatttgttcatgttcacctatcgctttccgggttttcggtattggtaaccatgcaataaccgggcacattcgtcccttctttgtcggttttatggtcattttgcggggcgggtcaaattctgcggatgcaggaaggtaataacacacgcgcaacagggctaccggattttttttactttaacggggagcgggatttgtttttttgacctgacgcggtcttaagcggaataaaaaaaattgaatcgtatcagctggtaacagccgcttcctttataaagaagcggctgcagataccggacattcatctgaaccggtcagacacccggtgctacggccaggccgataaacaatccggcaatggtggcactcatcaggttggataaggtcgccgccagcagtgcgcggatcccgacacgggcgatatctgatgcccgctccggcgcaaccgcactgaacgccccgaccaccaccgcaatcgagccgaagttggcaaaaccgcataaggcaaaggagatcacggcaatcgttttggcatccagtgtgccgtcgtgtaaatgcggggagaaatccacataggccacgaactcgttgatcgccagtttttcgccgatcaggctgcctgccagcgcaatatgctcactgctcacgcccatcagatatgccagcggtgagaaaatatagccgaacaggctttgcagactgacgccctcaaaacccataacgccgccgaggccgccaatcaggccgttaatcagggcaatcagtgccacaaacgccagcaccaccgttgccacgccgacagcaatcttcagcccgagcatcgcaccgcctgccgccgcctcaataatgctggccggccgtttttcactgaaggagatttcggtaaattccacggtggattcctgtgtcgccgggcttaacatccgtgcaaacaggatcccgccggggatcgccatcagagacgccgccagcagatattcaatcggtacgcccagtccggcgtaacccaccagcattgacccggcaatggaggccatgccgctgcatattacggtgaataattcattgttattcatccggctgacaaagggtttcagtaccgccggtaactcattctgaccgaggaaaatggtggttactgccgcaaaggattcgatcttgctgattttcatggtcttctggaagacatacgccagaacgttgatcacccagcgcataatgccgaggtaatacaaaatcgcgatcagagaagtgataaagataatggccggtaaaacgcggaatgcgaagataaacccggctccgtcaaataacacgtccattttcggaccgaccaggctgccgaaaataaaggaactgcccgcgtcactgtaggcaataacgttgttcacacccgacgcgatggtctgaataaaccatttccccgccgggatatacagcatgatggcaccgagtgccacctgtaacagcagtgccgcgccgacagtgcgcagactgattttccgtttattcaccgaaaaaagaaatgctatcagtaataaaacgccgatccccgccaaactccgtaataaatccataatccggccccgtagttattatactcatcagttgtatgctgcaatgcccggtaaaggctgattgtgagatcagcaccttaccgggtctggtatttcattcgttgttatgaccggtaaccggtcagccgcttacagttgctgataagcggaagcgatacgggcagccagtttcgcgttattgaacaccagctcaatattggaattaacactgttaccgccggtcagttccgccacacgggccagcaggaacggtgtgcttgctttgccgttaatgccctgctcatccgcttcgcgtactgcctgtgcgatcgcgctgttgatggtttcttccggcatcgcaaactcatgcgggatcgggttggcaattaccatgccgccgttcagaccggtcgcccacttggcatgcagtgcttttgccacagtttccggggtttccatacggatggtgaccgggaattcgctttcacggcagaagaatgccggtaatttatccgtctggtaaccgacaaccggcacaccataagtttccagatattctgtggtcagccccagatccagaatggatttggcccccgcgcagacaaccgccacattggtttgtgccagttcctgtaaatccgctgagatatcaaaggtgtgttccgcaccacggtgcacaccgccgatcccgccggtggcaaaaacagcaatcccggccatttccgcgataatcatggtggaggcaacggtcgtcgcaccgtggatgccctgagcgatcacaaacggcaggtcgcggcggctcactttcatcaccttgtggccttctttgccgagcatctcaatctcatcatgagacagacccgctttcatgcggccgttaatcaccgcaatcgttgccgggatcgcgccgttatcgcggatacgctgttcaacttccagtgccattttcacgttgtccggatacggcataccgtgagaaataatggtggattccagtgccacaaccggctttttctccgcgagcgcctgtgcaacctcaggggaaatgtccagatattctgcgttcagttgttgagttttcatgcttgtgattccattagtttgtgaacactgtcttttgacagaccgggattatttgtcagctcgctggcgagcgtcagggcggaacagccctgggaaaaacggatactctgtgacagcggttcgccttcgagccagcagcgggcaaggcctgccatcatggcgtcaccggcaccggtcacattgacaatgtggacactgaacggcttcgaccagccgttttcaccgcccgcctcgctgtaataaacaccttcgccgcccatactcagggcaatgcgctgtaccccctgctcatgcagggcattggcggcacgcaccacatcctgtttattctccactttgataccggtgagaatttccgcctcaaagcggttcggtttcagggtgtgtatatggctgagccacggcttgattttgtttgctttgaacgcggaaacggtatcgacaaagaccggtacattgcccgcattggtaaacagccactccagcgcgccttctgacagattgcagtccgccaccagcacaccggcgtgccggatcaggtcgcgggaggtcgccagtaacgcaggggtcagtttttccaggatgcgcatgtcattgatcgcggtgatcatttcaccctgcggatccagcagtgacaggtaggtggaggtggtttccccgtgcagacggtgcagattactgacattcacaccggccagttttgcctgctcatacagggtgttaccgtagaaatcatcaccgataacggagataaaatgagactcacagcccagcagggcaatattctgggcgatattgcgcccgactccgccgggtgaacatttaatgtgaccgggattagaatcttcatacaccagattcaggtcagaataaccacaaacatccatattggctgaaccgacagtcaccacatagcggtgctcggagaggatgtatcccttacccttgatgtagcctttattcatcagattcatgatatgtccggccaccgcagagcggctgatacctaatacgccggccagttcctgctgcggaatgagcgggtcacgccggaggatctgaaggatttgtttttctcgactggtcataagcggacacttgttggttattaaacatgtgcttgttttattttttgtccgcaacaaagtaaagcgctgaaataaagatttcgccggaatttaagggatgatcgtaaaatgagatgagtgggttttcagcaaaaaaacctgagggagatcatgttttttatatcttcaaaaataaaataaaaaacacaaaataataaccttcaaaaaaagaggatttaattaaaaataattttcatatctatcaatctgttatgttacggttgttatataagcaaacatgtgtttgttttcatgatcttagaatgataatgctgaaatgtgctttttatcgttacataaatactgtgactgatatcaaataaataagtctgaaataaaaacaaaaaagacctgatatttattacggtaaatctgtttaaactggcttgctgaatcgcttattcttattttattttgaactgacacgattaatcaagttttatattcatctgttaatgaaataacaaaacagcccggaaacagagattacttccgggctgccggttttatattgctgtgcagctttactgtcagtggtgcagcatttcgtgaacgatatcttttccgctcatcgtataagggtaataggtcggccagttatccagctgagtcaggagtgcctcctgggactcattgcccatatacaggtggaaatgacctgctttttccggtgcaatgatatggtcgctgaactggatatatttcggtgcatgactgtttttatctttgcactcaaacagataacgggcccctttcttaccggaggtgtaattcaggatccggtaaccggcatactgatactcacactgatccactttatccccgcgatggaattcgatgatattattttcaataccaatcatatccacatcagttttatatcccttcgtataataagcgcgatactcttctgccgttttatcgccgttcttcgcggctttcgcctgcatcaccgggtccagctcgccgctggccaggtaaggctcaacagactgccagacgccatcccagtcgctcagttgccggtctttgacatccttgtcagcaaaaatcccttctgctgccttgcgctgtgcttctgtctgcggtttgtcgtgatggtgtccgtgtgctgccgccgcaccgctgaataatcccgccagtaacagtaacgggagaactgatttagctgtcataatcacccctgtacggctttaaaacgcggattggacttacaaatcacatagatacggccgcggcggcggacaattttacagtccggatgacgctgtttcgcacttttcagtgaacttaatacctgcatcggtttttcctcttcttttaatgtacaaaacgcccgaagcgcttggcaaaacgggccacattcccttcctgagagtgtgttttctgtttgccggtatagaacgggtgagagtgggatgaaacatccagagtgacataaggataagtctgcccttcaaactcaatggttctttccgttctgatagtggatccgactttgaaatacacgtctgctgcggtgtcgtggaagatgactgtccggtaatccggatgaatatcgggtttcatggtcgcctcattttgttatgttataatataacaataatgatttttatcgtggttgaccactgttttttaaccctgatttttatacggaaaaggagtgcgatcgcagaaagaaaggaaatgtaaatcagatcaacaggatataaaaacgggcagccaccggtgaatacgggagctgcccgggagaaacacaacgatcagaaatcagctctctgccagaaagtccttatcctccagaacccgcagcggctcaatatcactctctttcttgataaccagagacggatccgaacgcagacagacaccaccgtagtgaccgccgacagtaaaagcgcacatctggatatagcggcctgccactttcggtaaacaccagagctgctgatagacgttttcctgctcaccgaaacggccgcaggtttcatccagcacttcgtcgcggtgatccaccagcccgatattactgccgcagcgtccggcgatcggtttaaccgcataaccggtccggcgcagttcatcgctgagttcaaattcggtatccagcagataaggatgatgcgggaacagcgaccacaggatcggcagaatcgctttgttgcccgggatcaccgtccacagtggttcaaatacacggatttccgggcgcagcagcacatcaatcagccgcacatcattttcatgacgcggatggccggtacggataggcagcgcggagtatgtccggtcgttttcactttcctgacgcagttgttccagcgccgtttcccacgcccaggttttccagacacatttgagcacgcgcccttcgccgtcgatgacctgtccgctttcgttccagctcagttcatccagcccgtgaatgacccggtatccgtaccctgccgccgtgatggcccgcgccatattgagggcgtggtaatcctcctcactgtccttatcctgcataatgtggataaacggcttggccgaggtgtgtttccagatatcggccagcatttctgacaggcgttcccccggatcccagccttcggtcagtccgccctgtttcgcccatttattaataatcaccccggtttccgcatggcaggaggctgaatccgcattatattcatacactttcagcccgcgctcatccatgcagaaatccagtctgccggtcaccatatcgtgacgccggttttgccaggagagccgcagtctcggccagaggatttccgggatattgaataatttcagcagattatcatctttcagcactttttctgtggcgtgcaggtacatcagatggacttcgttagtcgcctgcatcagcgcattttcggcagtctccgaaatggtgaaatattcatgcggatccgcattcagattgtggccgtgattagctttgacgtaggctttttccatcggatccgactcatccagccatttaccggtgaaatcggctttctcatccagacgggcggcgtgcagtgtcatcaacgcaggatccaccgccggctctgtccacgcatattcatcatcaattgtctggatcatccagccgaggatctgcgtatccgtgaaagtatctgacagtgtgtaataaccgtctttgacatgcatcggcagctcgcgggtccactgctggccgcgcggcagtttatggtggatgacgttctgttccacaatccggactttatccgcacacacctgggttatcaccgccacatgaccggtgcgtttaaactcgcccccttcctgccagataagcaatgcccccgctaccggcgcctgctggcagccgtttttaaacgcccgcagcggcagaatgctgtcatccaccacatgacgcagaaaacgcagtgaaaaaatctcgtacgccataccgacatcggtaaacaccacaccgtaattgagatacaggaagcggcgggcaaattccacacactgccatttgtatcccatatattcatttccgatataactgcggaaggaaatatcatcctctttctctgcgtccgtgatggtatcgtagtcagaggaatagatagccacaccgccgggcgcatagcccagtaatgtgccgaaaggttcatgctccgtgatgattccactcatagtacggccttactgatatgatttaagttgccaataattgtgcttactgataattcagtatacgcccgtccataaaaaaacaccgatgcttttctgcatcggtgtcaatcaccattcagggttatgcttagtgattcatatcacgttgccggactttcctttttcggatgataaccgttaaaaaacaggttcaggatcactgcactgaccgtggccagcaggatcccgctgtgcagcagcggctgtaagaacatcggcagtttggcgaagaaattaccggagagtgtcggcgtcagcccgacccccagacttatcgccacaatatagagattgtaattattgccgctgtaatcaacacgggacagaatgcggatccccgtcgccagtaccatgccgaacatcaccagccccgccccgccgagcacaaactgcggaatagaggcaatcaccaccgccattttcggcagcagaccaaagatgatcaggataaatccggagaccacacacacccagcggctgtggacttttgtcacgcccaccaggccgacgttctgggaaaatgaagtatgcgggaaactgttgaacagaccgccgataatcgtccctatcccgtccacccgcagcccgcgcacaatatcatcttttccgaccgggcggccgacgatttccccgagcgccaggaacatccccatcgattcaataaagacaatcagcagaaccacactgagggtaataatggaaatcggctcaaacgtcggtgttcccagcgccatcggggtaaccagtttaaaccagggggcatccgcatagccgtcaaaactgacctcattgcacatcagcgacaacacaaaaccaaagataatccccagtaataccgagatattacagagaaaacccttacagaatttggtgataaacaggatagacagcagaaccgcaaatgagataccgaggtagagcgggtgaccatattccgggttacctttgccgccggctgcccagtcaatccccacctgcatgatactcagtccgatagaagtgatcacaataccggtgaccatattagggaaaagcggcatcagttttcccatcagcgggactatcagcgttgtcagtacccccgctgcaatggtggccccgaaaatccccatcaggccgatatccgggttggcaccgatagccagcatcggcgtcaccgccgcgaacgtcacagacataatcaccggcagacggataccggcaaatttcccgataccgatacactgcagcagtgtcacgataccacagcaaaacagatccgaactgataagcagtgtcaccacttccttgctcagccccagccggtcaccgataaccagcggtaccgccactgcaccggcatacatcaccagtacatgctgtaatcccagcatcatcagttttcccgcaggtaatatttcttcaacttcgtcaataacgggcttaaccggttcctgtgcttgatccacactatgattgctcatgaaacagactcccttacaaccgggactccccggcttcgattcgaagatctcggaaaatgacccctggcgtcagggtgtctcactatgatgacgaacccggcccgggtatctgttcatcatttaaacgattgagcaaaattcagaccagcgtaattttctgtcagcataaatgctgcgtttcgtgaccggattccggttttttgacgcatttcaccgttgaaaacgagatacccgcctcattttcattacccccgtgaaatgtaatttttcagggctcacggcgtgacaatcgattgccttctcaatttaataatcccggttatcacattgatagccgtgtatcaccgtgtttttgcaggaccgtaaaaataaaacgggccgccggtcatagtgaccggcagcccgctttcagactgttcagcagatcagaacagtgtggtctgagtttccgttaatgatgccagctcaggatgcaccatctcatgcgcggtaaattccgcagacggttgcagataatccggtgtgctgaccgctgcattgtggctttctgccggggtatcctgctccggtaactgactcagcagtttatccagatttacagagccgtcatgaccggagagcagcccggtggcagccagtgcaaccgcatcttcagatcccggcagtgcaggcatatctgttccttcgtgctggccggtggtgtcatagtgaatgctgaacggatcggactccgcaccacgcacaccattaccttcaacatgcgcagtgtaatggtaagtctgtccctgctcaaagtcgccggtggtatcattgaaggtccatttaccgtcattctccactgtggcataacccaccacattaccgtcacgggagataaccaccacctgtccttccgtcagaacgctgtcaagatgtccggttaataccggtgtcatcgctgacaggttttcaggatcaaactctgcggaatccgcaacatcatcaattgcggcaatcgcagtaatatcagccggaacatccgtatttccctgatcatccggaactgtatcatcattatcattcgtgccggtattgttgttgccctgctcacccggaccggtgttactgttaccgccagtctctgtcccggtgttttctgttccggtattaccgttacctttatcgtctgtacccgtgttgccgttaccgctgttttctgttccggcgttgctgttacctttatcatccgtaccggcattgccgttgccggtatcatcggtaccggtatttccgttatctttctcaccggcattggtattgccgttatctttattatcaccggacgaatcattatttttatgatcatcgtccgaatcatttttcgcgatcactgccgcagttccgccggcgacggccagacccaggaaggtcagcagttcccaactgaggccggtcgattcccaggtaatcggtgccagcagtttgtcccccggctgctgaaccgccgcctgtttatccgccatactgccgatattgtcatgctccaccgcagattgcggcgtatagtcatgcacctgtttatcagcggattcaccgataatctgaccgggaaccagataataatcctcaatcaccacagacggatcttcttcacccatcagaaataatttcagattattaccgtcgcggatcatgatcactttctgtggcgcagcaccggtttgtttatcgatcagcacataatccactcccggaacggctttcagcacattaaccccgtctttgactgaggttgaggctttttttgtcacgcgcgttgctttatcaacaacaccgataacgataggcatattacataactcctgtatataaaatgaagcaggtgctcaccgaatctatttcagaacaataaattctgcttaatccctgattcagaaattaccctgcatcatcatccggaaataaaaaatgaacataaaatgagataaataccggatacctgacgacgatttactgaaataatagcgttaatattacaggcaatataacgtgaattgaataatgttttactccttgaacattccgattattcttaaatgtaaaaaccaacatttttatgaatgaaaataatattttcattaacaataaaaaacaacattaacgggcaacaggaatgacgctttataccattaacagatatttccggaacataataccattgataaaaaacagtttgcactttaaaaatataatgccatcaggacttatcttataatccggccaccttccggaagggatttttattctctccgatatagtgatagcattctgaataataaatttctgaacagaaatcccattaccctctgaatatccgggcgacaacattatggaaaataaagcattacctgaatttgatatctgtacaacccgtggtaaccaccgttttttgctgacttccggccctgattacatcagtggtgtattacgcggaggagagctctggaatgccacctcaatcaatatcagtcagcggctgctggaatttgtggcagcaccggttatttatgatattggtgcaaaccttggctcctggacaatcccggtaggaaattattttcagcaccgtaatggcattgtctattcttttgagccgcagcgtcaggtatataatcagctctgcggcaatatctatctgaataaactcaaaaactgttatacctttaacagcgctatcggcgattatgatggtgaaaccgatgttccggtgccggatccgtacaccgataataatctgggggccgtctccctggataaagccatttttctggagcaacgctgcggttcagaatttccctcagaaaaagggacaatcaatatgctggacacactgaatatgccgcatgccagcctgctgaaaatagatgttcagggtatggaactggaagttctgaaaggcggcaaaaaatggatacaggcatccggttacccttatattattttcaccacatggggcgactatatgaaatccacgatagagaaaaataaacaacttttttctttattacaggatgagatggggtatgaattgcttcagatagataatttctttgttgctcagcataaaagtaatgaaggcggaaaactggtgatgacgccaaacggttatattgtaaaacgtgagacatcacagtttggtatggatttcttaagcttctgatataaattgaaaaataaaaaggaagctgatgcttcctttttatttcagcggtaactcagactgacctgctgggtttccatatcataagaacctttgatacgcagatccagcggataaggatcccagtaaatcagtgttcttatttcaaaaacaataatgccatattgcgcatactgatcttttcctgccagcggcgtaatcaccagagaatccggaataatccggctttcaaaacgcagaatagcccggcgtaatttttcttcgacctgttcccagcccagttgtctggcatacgcgccggttaacggcgcgataccataattaatcactgagtcaacaaccggtgacttactgtaacgatgcaattcaccttccgtattttcagtactgaaaatcgtcaggagatcacgcaatatcacctcacgcattttacgtgaatcgaagtaaaatttatcaacaggctcacgccgctctttcggatgatcatcaatcagccggtcaagcaatgcaggcatatattgctttttattatcctgcatgttcagtttcagcgccggccattgtcatggtaactttattcagttcagatagcggatattctccctgatcagtaatgaccatttttccgcctttccctgtcaggaaatattctgatacctgctcccactgcgtttcaaaacccagcttaattttatcgctgtcggtatcgcggacaggataacgggccgggatataaccgtagaaaatatcattttttactttaacctgagcatggatccagatcagatccagcaagtcgcgcggtttaacaatattaatggtttcaatatccgcaaacggtacccagcggtaaccaccggcaacaataaactcacagataggccccagccggctgtcattatcagccatccaggtgaaatcaccgattttttcaccactgccgccggcagccggtgcattttcaaatgcctgtaaacgcagtgcttctgatttatccggcttattttcaatcagtaatttattggcttcccagaccgatttcatccactccggtaattcctgctgtaatgtcatcggttcgcgtttccctttcaggatttcttcacgcagaatttcactgaataccaggtttttatacaactcaagctgccggtcatcatcatgaccatcaattaatgaccaggtttccagctgaaccatcgctttttcccagtaacctttcaggcaacacaatttaaataaagtctcacgaataactaagtcattcggtttttgttttaccttattaagagtctcatcaaaaaattcatccagcgatgagttggcaagaatatcggagagtttttgtgttgtggccatttcaaaatccttaattgattataaacggctgtctaagcctaatttatagagttccttcgaaacaagtgaggaaacagaatccttcgcatacggaataattccgtccggtgccagcattctcagaatgtcatagtcctcatgctcatcctgtgttaaatcaacttcttccatcgtggacaactcacgccagacacgatccataaatgccgacgtttcaaaaatacactctgtcaggttcagatcttttatctgctcacagagtgaatcaaaactgccgtcgtcatctgcagcagataattttgcctcttcagcgaccgcataattttcagcctgcggggaatcaatttccccccataacagaaattttttatattcaacttccagtttttttaattcatcaccgtttttccggctctcttctgctgcatattccatcgaaataaaacccgcaccctgcggtaatatttcattaatctcaaggttcgtgaaatcaatttttgtcggtgccagttccgttaacgcttcaatgacagaggctgactggttattttcagctgcgacaaatgacagtgaaaaatgaccaatctgaataacagagccgtatatcagccggacttttgaaccatatgcgaccagctgtttattgacaacacagaccaattcccggcagttattctgtaaaacaggaccggtattggtgtaataaaacagaacatcagtatcccgcgctgcaccggaatgtgatatcacatccgcagtaaacgcattaaccgccaccggattatcaatggtattttgttctgtcagtttgaccgaccctttacgggtcggccagttaaagtgcagtaacatggtcaatggccgataaacacgttacatgagccggtaaccactttcgtgacacatccgccgcaatccccggcacgggcagccgggatattattgacgaataccgtacatgaagacgtgcatatacagcttttaacgtgaatggaacaacataccggcgcgcccagaaaggtttgcgggatattgttggtaaacacgttacatgaacccagttccacacatccgcaatggcaggctaagtcgcccattcttgctgctggtaacatgttgtctccttatatctgcaggccggtacagcccccggaggggctgataacatcagaacggtatagttgctgttgctgttcttgtcggtgttaccggtgttgacggcgttgccggtgttaccggtgtcgtcggcgttaccggcgttgtcggcgtcgttggtg

SEQ ID NO: 12 - DNA, 30847 bp, unknown
  Altogen 322075 strain
ttccgttatcgacggtgttgtcggcgatgttggtggtgacggtgtggtaaatgtaggcggcgtaattgtcggtaccggaatattcataaagaagaagaatcccggtaatcccggcatggccggagcaccaacagctaccggactgcccggctgagtaccgaatccgcgggcgtgcgcgttatcacccgggttaaggtaggtgtttgccccgtcgacaatcagaccattttttgctttgatcttgatatgatccgcagtaatcaccagcttgccaagacagccgattgccagttcaccgccggaagtcagtgcaaacgcaccaccgaccccgacctgcatcgcaccaccgaccgcaatcgagtgataacccccgacgttagtggaatgagccccgccgacgttgatagcataagcaccaccgacgttatacgaactggcggccgcgatattcatggaatagccggcaccgtagatcccgctgaacgctccgccgatgataatggaatccgacagaccgacaatacgggaggccataccaaccacatcctgggagaagttagcccccacaacctggctgctgttggcacctaccatactgctcttgtttaccccgaccgtttcgctgcggttaaccccgatagtggaatccgagttcaccccgatagtctgggaaaagttgaccccgataagctgggtttcgttcagtttggtcacacgggacatatttcgttccgcctgctcccaatactcttcgagccccggtttatcatcaaaacggataccgttatagttggttttgccgccgccgatggtacggctgattaaaccactctgtgtccggtttgccggtaaatcccacggcggcggcgtcacgttattgtacagactgccgataatcatcggacgatccgggtcgccgtgcaggaaatccacaatggcttcctggccgacacgcgggatgtagatcccgccgtagttatccccggcccacgactgaccgacccggatccagcaggaatccgcatcagtattctgaccatagcgatcccacaggaaacggactttgacccgtccgtactcatcagtccagactgtttcaccttccggtccgacaaccagcgcggtttgcgggccgcgggtgaacggcttagcaatagtctgcggcggccggtacaccttcgttgtcggctgcaccacaaaactggtgtagatactgaagtcatcactgtcagactgctggttgatttctgttgcacgcaactgatttgaaatcaccagatactcgcggtttgctttggattgcgggtaatttgtcagtgtaaaggttgtaccacagactacagaacggatttcaccggagccggcagcacgggaacccaggcatccctgttcctcactgcggatacgcgccaggaattcccccacctgcggatcatcataatctcccggccactggtactgttcatattcgttaaagttggttttacgcggctttttgtccagcgcagaaatatcagcacgggatttcttaaagtcataatccgaggtaaaccaacgtcctgaagtgaccgtttcctgagcaccaaactgatcgatatattcctgaccatctttcggtttatctgactcataccgtaatgtatggtatgccggactgaatgtgcgcttatgcgcgccgacatggtcaacaagcaccagacgattcttcagatccgaatgctcatagaaccagtagatcccccactcttccatcaggcgctggacgaaatcaaagtcggtttccccatactgcacctgataatcaagcggcggataaactgcagacagacgcttttcgatcgggaagtggtaatcagttaaaacttcgtcaagaatatccacgaccgacttctgctggaaaattttatagtcagaggtcagtgtggtgagattcagccacggacgtatgataaattcatacatcgcctggttttcatcccggccgacaaaacgggcgcgctcaacaagccccgtaacctctctgcgtcccttaccggaaccacgtccgacttccagcccgttaccatccagctcgataataacggtcatctgctgcccgataaattttttcagatcaaggtttgccgcaacctgccacggaatggccgggtttgcgggtgttttcgcaaccaccttatactgatacaacgctgacagggcttcctcgccctccagcgttgatattgccaggcccggctcaccggctagttccggcattgccgagcaatacaaagttattgttcgaggcatattcacacctatggtttgatacaaatcaaatttgtattaagtacataattaaacggagacatccgtgtttctgatatctgtcttaattgagtctaaaatgtttccctgccgattcagacgccatagccaggcagagtcaaaagacttaatacaatgaggccaattcatccatggcatcgcgctaactcctccattatcattgatattacaatccgtgtacgtcatttcagatatcagaacgtccgaattgttcttaaactgaaaccggggtttcaggagaactgattcccacagcggagagtaatatcgttgcagcgacgtaacccagtttcttaatttcttttcatcaatcacacaattttcattttcaatatgaaatgcaattatccgggaacaccagaaaataacatttgataccgtactcaggtgtctgattgtccatttatccgcagcctttgtgtacagaaccacacatttatcatcactgaggaaactgaaagcaccgagataaaatgcatctttcttttctgataccggtacaacaaagcaccacgggaattgttctgtaatcactctgctgttaagcgattgattgatatttaattggctgcactggcggataacacgctgaattacgtgattacccttaattctgtttcttcctgaactatttcccaatcctgagaaaattgtctttattttcataataagcagccatttatcaatataaggaaatcgctctgataattaataggaaaagtccacaattaaataagtaacgaatattcttacttataaatacctattatttaaatattagccggacacttaaagttcttcagcattttattaaccggctttcctttataatttaatccattgatatttatactgaccttttgatcccccagccggtaaatcagagtctgtttggccgctgatgtatttttttgttcacccgccatatccatccagtgtaacagtgcccattcgcccataagaacgcgttcttcggtgttatctgaattatcggcggaaactgcattcattgtgatggtattttccgtgtcctgctccggccatttaaatgatttcggccagaccggcccgtgtttgtaagtcagtgctgttccgttaatattaatcccaaactgcaaaatccgcggcgataatgccgggatacttgcggtaaaactgaaagaaacattctcactcatcccgttacgaaaaaaggcttttttgatctcccgggcctgttcgaaaaaacgcagcacctcccggtcttcatttccgcgcagatcttcccgtttataacgccatggtgacacactggtatccaccagtttttccaggttctctttatagtaagcatccactatgccgttgggaccgaaaaacacctcaaattcctcaaggctgacctcctcttcgctgtccgcaaaggggtagttaccctgaaaagaggcgacacacatgtcgcctaattccattttgaccgcttcattactttgcagcgtgaactgctgactgagctttacggagatccctcccagcaacggcataatgatcgctttgagcggtgccggccagagccgggactccgctttcagacgtttttccgcctctgacgggtaaggcagcgcgctgccgtcctccattgctgattccgtgatcaccagatagttatgctgatcccccagcatactgacgattttattcagtccgttatccccgccctgtcctgccggcattttccggttccccggctgaggtgaggtatccagattgattaagcggtgcagtgaagagaaacggcgatccacattgtcatacaggattttggtttcccgctgtgacaatgcatcttttactgtctgaatatccttcaggttacgggtgaccgaccccagacgcccggttgtcaggttccggccggcctgggttttggacagatccggcagttccgattcctgtttggcaaaatcgacggataacgcggtttcatggccgatttgtgtgatcatatcaatcagcggtgaatccggcgcactgaggatttgcagggcgtacatatcaaatgtggtatcgtttcccaccgccgcatccggcacgattttcttcagctgaatgccggtgaggaactgattccagactgtcacatattcctgaagatagagtttcagtaccgcttcttctgtctccgtcatataaaagccgtccagctgtttgatatcgaccggccgggcttcacttttctgcccggtgatccaactgtcctcactctggatattcttcacgtactccgtcagtttttttttaaaaacctgatgatacccggcattggtaaaaatgccggggataccgttcagtgccagtgattcatcactgatttccagaatactgcccagttggtcaccggccagcttgttcagtgttatattttcaggcgcctccgtcatcgcctgttctttaactttctggtacaggcgagaggctaacggctttttttgcagaaccacacgtgcggcagccacaaggcggtcattaatctcagggttgtactgattccactgcggatcgttaaacagctcttccaggtgagaaacaaagacgatggtctgaccgtagttttcgatcatccggtttgcctgggcttcttccgtcagcgttttaatcaggtaatctttatcaaatttaccttcaccgtgcagcatcaggtacgttttcagtttgtcgtaaatggtgtctgaatcatctgcagtcacggcatcaaacagggatttctcagccatccgctcgagtgagaacagcatccagcgctgcaggaaatactgataaatcttgtctgattcttcgcggatatcaaagccgacatacaggccgtaacggtaagacagacgcggatctttaaagtcaaacacgcccagcaccggaatatcctgcgtcagcgagagcatcttcgccagcaggccgtcactgttattttccagatactcatccagcaccgttgatacctgctccactttcaccgtcgcatcatccagatagttccggttgttgtgataactgatcaccagtgcataacagagccagaccgtcagcaggattgtcagcagatgtcctgccagtgtctggaagcggtacttggctgtcagcgccaggttataacgcaccaggttgcggtcacggataaagttctcaaacagctgcttcaggaagaagtgcttaccgttgacagtttcctgaaccagacgatcttccgtatcttctgctctgtcagtaaccacgtctcccaggctgtttgccatatcccgccatttctgaacaatggtgttcgggttaagcagagactgcatggttgactgtgtgctgctggcaaagtagataccgcgcagagaggtaaatttctgcgtatcgtcataacgggacggcgagaagacattctgaccaaactcggtaatagagtctgccagtaaccggaaatcctgcggcaactgatacatacgtttacgcgtgatgacatcatattcatccagcatacgcgcggtcatgtctttatcgagacggctctccagcgcggataactcattgcgcagcacatcgcggatctcgacaatcgcatcggattttttctttttctcaccaaacggcagtgtaaagccccagatctggtcacgctcttccacggtcagcgagcggaagtattcatcaaaaccggacaccatatccatcttggtgatcatcacatacaccgggaaacgcacccctaattcatggcgcagcatatccagttgtgttctgaattttgatgataatgcgtacagctctttcttatctttgcccatcaggtcagtcaccggaatggtgaccaccacgccgttgagtgatttcagcggacggtttttcttaatcgccttaaccagcgcttcccattcacccgcgttttcatctgattcatcaatgtatttaccggaagtatcaacaaagatagcttcgttggtaaaccagcattcacagtttgcggtgggtgtactttcacgggaaacgcgcagcaattgttcaggtaacggaaattcctgaccggatgacagcaccgcagtggttttaccggagtccttcggacccagcatcatgtaccacggcagatcgtaaaccacctttttcggacgccagaaatggctccagcgggaaatcttacgaccggtatgcgccacataacgggctgcattattgataaccgcgaccacttcccggtaatgctcggtggtacggaccggatcaatcttgcttttcttaaaaaagcgatccagtttttccgggttgtaacgcagcatggagatcagcagccagacacaatacagcagtgtcaccagcgtaatgaccccgataacaatcaggcgtggtgtggtttcctcaaacggataggtatccccgagcagcagatagggcgagaagacccagaatgtcacgcagagcgtcagtaccgcgagcagaaaacagggaacacggcaccagagtccgataaaaataacggccagcagaacaatgaagatgatccgcggtaccgcgtcttccagcgggcggatctcaccatagccgaatgtcggtcccaggtaccatatgatggcggctgctaataaaaagaagagaaatatcagaaatctttttaaaaaccgcagtgcaaatgttcgattccagaatgacattttataactcacagataggtaacataaacgacaacgcgacggttaagcgcacgcccttgttcatctttattactgctgatcggtagtgaagcccccatgccttttgtctcaatgccctgcgcagggatccccgctttcacaaagaagtcccccacagcttcagcacgtttcagcgagagctcctcgttactggcaaacttagcccgtccgataggcacgttatccgtgtgtccggcaatcaccaccttaccgtcaacacgcttcacttcatccgccacacgggtgagaattttatccatttcaggtttgacttctttgcggccggaaaggaacatcgcatcaccacggaacgtcacaatactttgcggaccggtttcatccacctcaaccaaccctttggcaatttcatctttgagcaggatagccagacgcaaccgcggcacactgatggccagttgggtatgtttcagctcgccatgcttcagtgccgcaaccttgtcattaaattccccgagatcaacggagagccagtatttaaagacggaaaacagactgatgagaataaatgcacagataatcagggaaatacgcaccggcagatatatccggcgcacttcgttatcttcctgggtcactatcgcatttggcgataacgccgccggcacagagtcacgggtactctgttgtaacgacagcagacgctggcggattttattcagctggcggtcgccgttttcgatgatactgtagcggccttcaaacccgagcccgagaatacgggacagaatatccagcacatcggtatattcctgcgggttcatggacaaacggccgatcagcaggaagaatttgttccccccgtcgttatccccttcaaagtggttcagcaggttactctgcgaccagccggaagccagtccccaggctttggagtgaatagattcatcgattgcggtacaaacggcataacggataatggccattttctgccacggaatactcactgcgtcacacacggcggtaaacgtggcaatttcgtttttcagactctttttgaggatctccacctgtttcaggtctgcgacctgttccggcagttcactcagagcccgcagcaacggctgcaccgcctcaagtaacggatcttccgcccggctgacacgctggatccgggcctggatactttcgcttttaattgcaagatcacggtaatcgatttcatctttggccagcggatcactgtccagcggcgcaaaaaaactgccgtcatcatgcagaaaagcccccattgactggggtgattgctcttcatgatgatccgtcaatgcgccgtcaggaccttttttgtcctgatcgtcatcaccaccgtaattgtcattgaacaggttcattaatccctcacgccccaaagctcaagccgtatccccgggaagtcccctgcaacgtgaagggcgagcgagccgctgttgagaatattttcccagtaaggcccctgcttcatcagttcaaagtacagatatccggaggtataaggtatttgtctcggcggaaccggcagattgcgtaaaatcagacccggaaggtgggaacggaccagttcctgaagtttatgcggcgagctgattttggtctgtgccacaaactgatgctgcataacatcctgcggcaactgcgatgatgcggcgagcaccaggttggagaacccgcgcagttcgctcggaataaccgacgccgtccagacaccgtgctcctggcgcaccagcggaatgctctgaccggaacgcaccagcatctggttcagcagaccgtgcacttcatccaccagcggccggatagacgcatacagatttgcgtgatcatagcccggcgccgcattcggccggcgtgtcttcgcccgcaggaatgtggataattcaccggcaaacttcgccagttcctcataaatcacaatcggcgcagtttccggaatatgacgcagatggtttaagatcggctcatatttgttgaagatctgcagtaacagataatcaaccacttccgcactggcactggctttaccgtcgctggacgccagacgggatgccagcatatccgcccgcatttttaccagtccgtttaagtgggtgatccactccatcagcagatagttggcggcataaccggtaaccggcgggatatgatcctcaaaatgcagcagcacactgccgtccggctgaatagctttgactttcgccagcgagataccaatccatgattctgtcatttccgtttccggcatcaggcgcaaacgcatacgcgccagctggatcggtttcggtccctggcgcacggcgttggtatcattgatttcttcttcatacgaagagaaacgggctaatgaactggtatcaaattcatcaaaaatcgtttcatcgctgttatcaagacgcagcggtacagccagataaatcatctttccgagatgctcggctgtaatggttaaaggttcaggctgctcatcatggcccgggatcccgaatggtgtaccatcagggaaaaccccctgccctgaacgtaagaccagcttgccataagacaatgcctcacgatcaatctcgtattgtgcaaaaccccagaagaacggactaatggtcgctgcacgtttatgagcaatatattcaaaataacgttcttgctgttggaatagctgagggcgcaggaacaatccctcactccatacgactttatttgttctcacaactcatccattctctttgattgacacaactgaatttgaaaataagactttaatttcatgttcaggctcggtaaataaaatgtacttttcagtccatgttgcgccgcgcaaatttgataacggatatacggcactccatttggcgttactgatatctttataagctgcgattaccccgatatagggaaattctgaattaattttgtaatcgataatttttgtttcgcccggcctgataatatattccagaataagcatttcattttcaggattaggctggtttttatataaatatgttaagtaatccgtacttaaaaacgattgctttgatttaacagcataaacaaatatgttcagtggtgatggcagttggtttttacttttattgatttcagcgctggccaccaaactaatttttagttctgatgcagacttagcttcagacggggttgattttgaagtactaaaaaaactgcacccggttatcagaaaggatattaccagggcacacaggatattcgttaccttaaacagggtatgatttttttctgtattatcggacatataaccatgcctggcattatgaaaatgcttatatgtataaacaactaagaataattaataatattgtccgccaccataaattgcaaacaattaaatatgtataaaaataattatcggggataaaaacctgctgtccgaaaacagcaggttttattccgacataaaatgttatcagctgataaggttagctttaacatcgtaggtagctgcgatagtacctgctttgttaccttcagcgttctggataacatattcctgagtcatcttggtgaaagagaatttaaccacttcacgcggacggctttcgtcttcgatagaaccctgcattgcaacatcagtgacgataacgtcagtgaatttaatgatcaggtattccagcggagtaccacccgctttacggacagtaaactggatgtctttgatgtgtttaccggataagcagtagctcagcaggttcgggcttgctttgtcggtatagtgaacaaatgtgaaatcttccacagttgctttaccggaaccaccgcctgaaccgctgtgcatgttggactgctggtttacaccccagcgccatgacagaacttcaatttcatccttgtgtgaatgatcctgtgcttcaccatcgatgcctgcgattcttaaaaacatatcttgagccatctgtatttcctcttgttaatgcattaatcaaatcactttgacaggtaaccacgccctgtggttaccacttttgttttgccgggtatcggacctgatatccttatggttctcaccggcaatgcgctgctattccctttgtgaagcgagagaatattgtttcaggacgcgattacgcagcacctttcagtgacggtaatttagcgaccatacgtaaagaaacagtcagaccttccagctggaagtgcggacgcaggaagaatttcgcctggtagtaacccgggttcccttccacatcctcaaccaccacttctgcggcagccagcggacggcgtgctttcgtttcctgggaagagttagccggatccccgtcaacgtagttcatcagccagtcgttcagccatttctgcatgtcatcacgctctttgaatgaaccgatcttgtcacggacgatacatttcagataatgcgcgaaacgggagcaggcaaacatgtacggcagacgtgctgacaggttggcgttagccgttgcatccggatcataatattccgcaggtttctgcagagactgcgcaccgataaacgccgcatagtctgtgtttttacggtgaattaacggaatgaaaccgtttttggacagttccgcttcacggcggtcagaaatcgcaatttctgtcggacatttcatgtccacaccgccgtcatcactcgggaaggtatggcacggcaggttttccaccacaccaccactttccacaccgcggataagcgtacaccagccaaaatgtttgaatgagcggttgatgttcacagccatggcatatgccgcgtttgaccatgaatatttgctgtgatcagaaccgtcagtggtttcttcaaagtcaaactcgtcaaccgggttggtacggataccgtacggcagacgcgccaggaagcgcggcatagccagaccgatataacgggcatcatcagactggcgcagtgagttccatgctgcgtattccaggttctgggtaaagattttggtcaggtcacgcgggttggacagctcctgccaggaatccatctgcataacagacggagatgcaccggtgataaacggtacgtgtgcagatgcagccactttcgcgatagaccccagcagatcaacatccggcggagtatgatcgaaatagtagtcagcaaccaggcagccgtacggctcgccacctaactggccatattcttcttcataaacctgtttgaacagcgggctctgatcccatgccacgcctttgtagcgtttcatgttacgacgcagttcatccttggagatatccatgaaacgtaatttcagtttctcgtcggtttcggtgttattgaccaggtaatgcaggccgcgccatgcactttccagctgctggaactctttatgatgcagaatcaggttaatctgttctgacatcttcagatcgatttccgcaataatggactcgatatttttatacgcgtcataagaaatcgtaatagagttcgccagtgcctgttcagccagcgttttcactgcattctgaaccgccgtttttgactgttcagtttttgatttaaactcctgcgcaagcagggagctgaaatcacttttttcctgcgtctgcgtcgctttcgcgtccgcatttttctgagtattttgagctaacatagttctgccacctacaattcttaatcgtcctgagacggatctgaaactttgtcttcacgcttcggtgcagacgccagggttttcagcagttctttatcctgcaggatttgcatgatcagaccttccgcccctgccttaccatccatgtaggtttgcaggttagttaactgagtgcgtgcttccagcagctcagccaatggctcgattttgcgggcaatcgcatccggcgcaaaatcatccatgctttcaaacgtgatatcgaccatcagctgaccgtcaccggttaaggtattcggtacagcaaaagccacgcgcggcttcatgctcttcatgcggtcatcgaaattatcaatatcgatgctcaggaattttcggtcagtaacaggcgggagcggctctaacggcttaccggataaatccgctaacacacccatcacgaatggcaattcgatttttttctcactaccgtaaatttcgacatcatattcaatctgcacgcggggagcgcggtttcttgctatgaacttctgagcactaccgttattaattctcataccgtgtttctctttttttgtttaatttgattagtaaaattactaatattacttcactcaaattagccgctttcattagccaaaaaattaataccagaccgatgagcaaaggcgtgattacatattaaacattattactgaatataaactgagataaatccgcttatcgtgaacatattatgtttaaatgaacttttcagattatttatagacaacttccagcaatgacttagcccttacattcccgggagaaacaacgttatcaccagaaaaataagagacataatattttctttttaccgatgaattttcatcggtgataggataaaccaatcctgaagatggattgtctattttaatatgattaaacttatcatcccgcaacctgagttcaacgtttgcagctaatcctgcaccggtatcattcttcagattttccgttaccggacttaaattaccaccggagcttttaaaaaaaagcagtacttcaaaacttgtcgggcaattattcagagcaactgtaaattcggtagttcctgcttctttcccggcaactgataatgttttatatgacaaagttggtaatattactgtttcttcggatgatgcgccatttattgaaatggcacaggtatcttcctgatagacccctttaaatttaacatccacaccaaccaaactacaatctttatcattatcacacagagcttcagcattagcgtatgtaaatattcctaaaagcataaataatgatattgcaccggaagataataatattccgcaatttttgataatattcatcagatacattttacctccacctgaaccacagtgtctgctgcagcagatattttttgtgcaatacccggctccggattaatcacacattcacccgctgatcctgatttgacggataatgcaccgctgctgccatcccagccccgcagatacgccatcccggcctgaccgacaatagtctgatactcaccgctgccgttataaatattggtaccgattggtaaaaattcgccgtttttgtctttaacaatcaggacaaccggtttaccgacattggttttaaccttcacagcaagaatggcgccatcacgcggaaccaccactgccaggtcatcaaccaggtcaacgtcctgactgactttactgggatcaagccccaccgggttttctctgtatgaattcagataaggtacgattgcgtatcctctgccatcaactttactgccgctgccgctcaggacagcggctccctctgcaccttcagcctcaataatggcaaaaggagcatcaccgacaggagggcccagtgttaccccgccggcgtgtgcaacaatactgccgtttgcggaaacagaaccctggcggcttgacctgttgtccattgatgcggtaacaccataggttcccagccttgttcttacgcttgctgagccgttcaggctgtcactgacttcggagtgtgagtttgctgttgcaccaataccgtagctgaactcattctgctcaccctgtgatcctgatgcagatgtctgaaatgccgtattaccatccgcattacgggttgcagtcagtgccaggttattgaatgccggctgatagttatacccgcgatggagcggaatattgacgctgaccacataggtattgtcataactattatcatttgttttcgcacgctgataagccaggctgtatgaaaaatactccagactctgctgataagacattgtccactgggatgacggattcctctcattccagtaatcatagtagttccccatcacagagacagagctgttaccccataaacgctgattaaatgtcagcgcatactggtttttggctctgactgccagataactgttaattatccggccgttttcatccgttttgcgctcatcataattttcaccgcgttcccggatcattgtcgcatcacggaaattcagataaccattatttgagtaacggtaactggataccaccacgttactgcctgtgtcctcaaacaagcggctgtaactgatacggaaagactcaccggattgtgatgtatttttcagatcactgttggcatgtgtcatgtcgacagaaatacccccaagcggggtattcagcgcattaccgatagcaacagactgataattttctgataactgaaaaccggtataccaggttaagaagttattgatcccctggaggaattcaccttccaccaccacaggtgacgcacctgcggagccatctctcagttcaccggctgaaatcgcatactgaatagtatccggatgtaacatcataggtggtgcagagaaaacgatatcctgaactttttcacgtccgtcagcttcaataatcaccagttgtaaagtaccgttatttcccagagcgccataattgcgcagctcaaacggcccgggtgtgaccgttgtttcataaatagtgtaatcattctgacgtaataaaacgcgggcattactgtcagctataccggtaatgaccggtataaagttattgagggagtccggccgcatttttgtattggtaccaagaatcgcccccctgataccataagaatcaaaaatacggccactggtaaaggtttcacccagcgttaaccggctttcccagggggtaatatctgtttccgcgtaaagctgaatatttttattgctgaaattgttatcttttgaccatacagagttactgcggtttctgaagcgccagccaccgtagttaaagcccgcaatccagttaatattggtattgtagttagtatctttactattcccgtttttattgctggataaataactgttcagattataatcaacaaacagtgctgtaacccctgcatcccagcgggacgggtcaatataatccgaatatccctgtcccaggcttgcctgaggaacggtaatattcagtgtcaaatctgctgtgttataataaacctttgcataactgacaaaaaacgaaagcggatgacaggttcctgtttcaccgtcatcgctgtttttgccagtcccgagttcactatcagggataataccgaattctttaatctgctccagagtaaaacacgcttccgcctgcttattattttttatatttttgaaagggatactgcgctttcctctgttgttgctgttaattatcacatctgttgtgtaggtgccttcaggaacaggattaccataactgtaatcactgacatcaacattaatgccctgaatgaaactggcgttatattccattttaccattgtcagcatctgcttcatccgtcgatggagtagtattaccgaatgatacggccggaaataaaaaagaacagagcattaatctccattgacattgtctcatactaatactcctgttatcggcagttacattccctgtgaactgcctgaattaaatccctttaaacagtattattttgctacagcaaatccggctcctgacttaacaacctttgttgcaacctgcccgccaaagtcattcagaataacgaaagtaaactcagatatagttccgtttaatttctgagagtctccggtttgagtgtatacagctgaggacatcggcggaatcatatcgccatccagaacaactggttttccgttaatttttgtatttaccgcagcaaccgaaatataaagtggtgacgggttttctgctttcaggccggtaccttttcccgggacatccacgacactccatttcactttaaccgcttcatctgatactgataatttacgaagagattccggacgatataaaagcttaattcttgttttaaatgcgacatccagacgctgtgctgcatttttacttgcttcagtttcctgcggaatttcgaggacattaaaataaaaagccgattctttatcctgtggcagcgtcataccattataaacaattctgatactctggcctttacccggttcaatacgggttattggcggggtaatgacaaaaggaatcttcggattatttatattattaacattaataccatcatcagcccatacctgaataagtgcaggcatagtttcgtctttgttattaatccgggcaacctgctctttttttccgccatcaaatataatgcgtgttccttccacaacaaccgcactataggcgaagccggaaaaaaaacaaaaaatcagcagtgtttttactgagtttaaaagcataataacctctgataattaaaagacagagccatatccggctctgtctttcgtaacaattacttatacattaaagagtacatcactgttgctttaactaaaccgacagatgtctgaccagctgcggcatagccaccaacataagtgaaagagaatttgccgttacctgttggttctatcatagtccctgttgtaccaattttctgatgagtccggatgccaccggtagtatcataaattttaatttccacattaccggctgcgtcagcacctgttaatttgtttttcaggttacctgtacttgtattccagtcagttgtgtcagggatcggttcaaaatgaataccgacagttttaacaggctgagtatttggatcggcagccggatcaacgacacccggctgaattggtaccggacattcaacatcaatctggaatggttcaaaaccagcttcctcacccactttagtcagcgttttaatagacgccgctttcaggtaaactgtctgctctttttgactggtgattttacaggtttcatcaatcaaacggccttcaaagtgaacaagaccctgtccttccggtgcatacgctgaagcagaggtgcttacacctgcaaccaaagcaccagcaactaataatgctaacttcattttgttcatatctatatccttaatatatgatttatatacttcactgctttccataaaacggttaccgcttcttactccgaagttacggtaaatccattttggttatcacattccagaatgaccttctgaattgcggattccgtgttccggtttaaaatatgtaaaccgattttcggtaaaatattttgttcgataaaacgaatcaggattcgtgcaccggtttcagccacggaacactggctgataattgaattcaccacatcgtcgccgtattcaaacgccgcgctgtgctgtgcagacagacgatgaccaattctgtcgaggtggatacgcacgatccggcccagcgattcatcctgtaacggatagtacggcactacactcaggcgtccgaggaacgcagccgggaacgttttcagcagttccggctgtaatgcggtgcgcattccgttcagatccgggatggtatccgggtccgcactcaggcttgaaatcaaatcactgccggtattactggtcagtaaaatgatggtgtttttaaagtcgatgacacggccttcaccatcttccatgcggcctttatcaaagacctggaagaacagttcgtgaacatccgggtgcgctttttccacttcatccagcagcacgacgctgtatggttttctgcggacagcttctgtcagcacaccgccctcaccgtagccgacatagcccggaggtgaacctttcagggacgataccgtgtgagcttcctggtattcactcatgttgatggtaataacgttctgctcaccgccgtacagctgttcagcaatggccagcgcagtttcggttttaccgacaccggacggcccgaccagcataaagacgccgattggtttacgcggatccgacaatccggcacgcgaggtctggatagattcactgataatatccagcgcatgctgctgtccgataacccgctcagccaggtgattcggtaattccagaacagcgttcagttcatctttcatcatccggccgaccggaatcccggtccagtccgcgacaatcgatgccacaaccgctgcgttgacttccgcctgaataaccgcatcttcacgcagattcagacgaatggtctcaagctctttttccagctctgccagttgcttttgcagctcagccagctgttctttgtcactgagtaccactgtttcagtgatagtttcagcttcagccacagcgacatcaccatcttccgctgctgctgcgcgtggttcttcagtggccggtgcaggaacatcagccggtttctcaccactgattaaggcctgaatctgaccgcggatttccacaatcgccgcaaccgttgttttctctttcagccagcgggcttccatttcttccgccagtgctgcctgagccttaatatcatcctgtaaggcattcagtgtgctgctgtcttcacggccgaaatgcagggctttttctgccagagacaattctgaagaagcagtctgtgttttgtatttcagctcctgcagatctttcggcgggatattctgggcaaccgcaacacgggcgcaggctgtatccagcaggctgatcgctttatccggcagctgacgcgcaggaatataacggtgagataaccgcaccgctgactgaagagcctcttccatgatccagacgctgtggtgtttctccagcatcggcaccaggccgcgtaacatggccacgctcttctcttccgaaggctcttcgacctgtaacacctggaaacggcgggtcagtgcagggtctttctcgatatgacgtttaaactcactccaggtggtggcgccgatggttctcagcttgccgcgagccagagcaggttttaataagtttgccgcatcaccggttccgctgttaccgcccgcaccgaccagcgtatggacttcatccacaaacaggatgaccggattcggcgaagcgaccgcttcttccagaaccgatttcaggcgtgactcaaactcccctttcatgctggcacccgcagagagtgcaacaatgtcaaggttcagcaggcggactttcaccagcggcggcggcacatcaccggcagcaatcgccagcgccataccttccaccagcgccgttttacccaccccggcttcaccggtcagtaacgggttgttctggcggcggcgcaacaggatatcaatcatggtgttgatttcctgctcacggccgataaccgggtcaattttgccttcacgggccagtgctgtcaggtcagtggtgtactgcgccagggttgctttaccctgctcaccggccatcgcattgctggcttcccccggcaggctgtttttgccgccgagatcactgttgtccgtggcattctgttctgcttccggtgaatctttggtgatgaatgccagatccgatgccaggatatccagcgggatcttgtcaaacaccggtgaaatagcggataacgcccggcgcaactcggttgttgtcaggcaggcaagtaataaatggccgctgcggatggcgctctctgaatattccagactcgcacatacccacgcacgctcaatagccatttcaatatgataggagaaatcagaaatcgagctggcgcctgacggtaaccgcagcagtgcctgctccattcctttttccattaactggatgtcgagttgaaagtgacggacaatttgtctcaggtcactttgttcctgttgccacagctgaaccatccagtggacaagctcaacgtatgggttgccttttaatttgcatagtgtcgttgcactttcgatactccggaataaagtcgtatcgagtttgccgaataaactctgtctgctgaaagccacaattattacctaatcaagtgttgtttatactaataattcacccttagcaggtgcacgatttattaaacacattatgtcctgaatatgacgttcattaatccgcacaaataactaactttttagataactttatattcatagacataagagtgtccgttcctttatacatacagaaacgcattcacatgataagaacagatattgtcactaacaataagacttttgcttaagtttattcttaagaccaggtctttatctttaacacccgtctttatatgcactacactatcctgaggttcacttcgcgtcttttagaagaagactattacgcagaacaagaaaaaacaactgtaagcatacataaatttacgattttggataattcttagcatataatacagaatatactgaaaaccatttttatagacaataaaaatacttataaatcaaataattgaacaaaaacaaaacaaataagtcattcataccggtgatgaacatttaataggtgattactgcaatcaaatatcacaaggcaatataataaaaccatgttgacctctttctttttaaaagaaaacacctgatagtcaataataatgatgtgttatttaatcgaccatgaattacgtattattaccctcccttcagcaaccatacctccggagctgattttgcaaaagacaacaactgcattatgatacaaatgataagcacgaatattttatgttcatatttttatcttttaatgttcatatttatcccccttgtttttcttatcacacaattgctttgcaacaaggtaataacacggtaatacagacttatccgatatcggtattaacgcatgacatttattttgaacagaggtttattcagcgtctttttatatattgatctttataattttttgtaaggctgatagttgccttcataacccatttcttttcagaggtatatccgtggatcagaaatttcttgatttttacaatcgggaacttacgtttatgaaagaaatgtccggtgaatttgcggaaaaacatccgaaaattgccggtcgtctgggcatgaatggtattgaggtcgcggatccttatgtcgaaaggctgattgaagctttctgttttatttcggcacgctcccaggtaaaactggatgcggagttcccgaaatttacccagcgttttctggatgtcatttaccccaattataatgcccagactccgtcgatgggtgtggtgcagctgcatcccaataccaaagaaggtgatctgtcgaacggctatcacgtaccgaagaacagccagatgtttacccggttattgcccggtgaacagtcacgctgtgagttccgcagcagccaggatctgacattatggccggttgagattgaagatgtccggctgacatcaatcccgccggatatttccagcctggaaaaataccggataccatattcacgcctgaaaggcgcactgcggatcaagctgaaacttgatggcgataacctgttctctcagctggaaaatctcgacaaactgccattttatatcgatggtgacgaacgcgttgtttcccatatttttgaactgatccacgcccattatgtcgccatgattgtccggaccggcggcaatgagaaaaaagataccacgattgttaacggtggtgtttctttcgaaggtttgcagcccgatcaggcgttattaccggttcagtggaatatgttccacggtcataacctggttcaggaatactttgcctgccgccagcgcttttatttctttacgctcaaccatctgcgtgaagcattacataagaatgaaaccaacgaagcagaaattattattctgctggatcggttccctcaggatcttatcagtcacattgataaagaccgttttctgctgttctgcacgccggtcattaacctgttcccgaaacgaatcgataaaatcgaaattaaccgcgcgctgaatgatttccatgttgtgccggatcgcagccggccgctggactatgaggtcttttctgtcagtaaagtgatggggcaacaggcagaaaacagcagtgaggtggtgttcaacccgatttatcagacccgccacagtgattccggcaacttcggccgctatttctcactgcgccgggaaacccgtgccagcggcagtgcccgccgcaaatatgaaacactgacgccgtatatcggcacagaagtctttatttccctggtcgatcagcaggaagccccgtttgatgatgatatccgttatctgtctgtggaagctctcgtcaccaaccgtgacctgccccgcctgatagaccggagcaatgactatgatttaacactgtcagattccgtccctgtgtacggcgctaatttcctgtcacagccaagcccgccgcatccgccgtttgcccgcggagagtctgcctggcggcttatccgtcagctcagttttaactatctgccgctgcacgatatggatcacagccggggcggggaatcactgcgtaatctgctgcgcctgtttgtcagcccggctgatcaggaatccatgacacaaatcgacagcctggtcggcagtaaaaccaaaccggttatccgccggttacctggtaatgaactgctggtctacggccggggcgttcagtgtgttctgactgtggatgaagccggattttccgggttaagtccttatttattcggattagtgatggagaactatttatcccgccacgcggcagttaacgtctttaccgagacagaactgcactcaatgcagcgcggtctggtggccaaatgggcaccacgtccgggcaagcgcgggaatttataatgagccatctgcatcacaacatgttaagcgacctgtcgcactggtatgacgaaaacgagccgtggaaaagcggctttatcagtctgatgcgggcagtcgcggcaaaatatcccgatatgccgcctgtcgggacggcatcacgtccgcggcaggaaccttaccggctgggacagacgccgaatatggcgtttgccccgcgtgagatagcagatatctctcacgacggtaacttgtgccacatcgacctctacagtctggggatctgggggccgcagggtgcgatgccggtcaattttaccgaacaggcctttatccgcctggagcatcaggacacgctgctgcgcgattttgtgaatatctttcaccaccgcgcattgtcactgttttaccggaactggtttgtttcacaggatgtggctacgctcgatcgcaaagatgatgagcggttctcgttttatatcggcgcactcatcggcctggtgccggatgagatctgcaattccgtgctgccgacgcacgcccgcctgtcctccgcctctcacctgatccgtgaggcacggaatccggagggactggccggcgcgctggagtattactttggtatccgggtggaactgcgggaattcaccaaacagtggattttcctggaaaccgccgatcagacccggatgggggatctgaattcctcattactgttatcggaaggcgccattctcggcaataccgtccaggacagacagcataaattcagtctggttctgggtccgttaacactggaacaatatatgcgcttcagtttgtggggggaggatctgccgatccttaaagagtgggtccgcagttttgtcggctttgaatacgcctgggatgtacagctggtgctggccccggatgcggtaccgaaagccaatctcgacggcagtcatcaactgggttatgccgcctggctgccgcgggagaaacaggacgaaccgatatccggtatgagttttgatcctgaaactcacctgaactgaaccgtcatgattaacagataatggaataataaccgtgagcgaagaactgcattctacttttcagtccgatttttacacagagatcctgacgccgctggaagggaaattcgtctgcggcgaaagtattgaatatgacccgttatacatcacgttacaatcaaaaatggcaccgaaaatgggtgcggaatacggtgattttgtcgaaacaacagaaccggtcaactggcgtgaaattgaaagtgactgcctggaactgctgaagaaaagcaaacatatccgcctgattgttctgttaatccgtgcccgcagccgccagattggcctgttcgctctggaagaagggcttatcgccctgtatcagctgctgaaagactttccgaatgaaattcatcctcagctgtatgacgaaggtgaatttgaaccgtttatgcgggccaatgccatttccgaactggaagatactgacggctttatgctcgatttccgtcagatgacactgccgaaaatcaacgggctgcagctgacaatcaaagaagtagagcgtgcctttgccattccgaaggaagaaaatgcccttgcggaagagagtgtcaccggaattctgaatgaatggcgtctgaacggtgataagaccctggcttccctgaataatgcagcactgattgtggatgccatcaaaaagctgacccgtgaaacactggaaaatgaaacaccggcactcccggcactgactcagttgctgtccttattcaataaggatttaaccgctaacggcaaaaaaccggcaacgggcgtctcccctgctgaagatgccgatttaatctctgaattagtctttgccggtgatgaaccggcggatgaaacccgcagtcagtcagcggattctgtcagcagtacaacagaaaccgtggttgacggcgacaccacaacagtgacaaccgaacgggttgtctatcgtgacaaagtaattaacacccggcaggatgccctcgaaaggatccgtgaaacgcgcgcatggtttcagcaaaccgaacccggtaacccgattattttactgctgagatatgccgaagaagcggcgggaaaaaatttcctccagctcagtaaattattccctgctgacatgcttgcaattttggatatcaataaggatatgtcatgaaaataaaattactggcggcactggccgctctgggaatgtccggtaatgcgctggctgtagtatgtactccaaaggaccctaagggatttcagacagaaacgctgtccgctgattctaaagtaattaaattacgggctgatgctgccgtttcaacaggcccaactgattatatcggacgcgctaattcaccatcactcagcgttaaagtaatgtatagctgccagggagaccttatctacggttctcgtccattagatgccgcagttgttccttacgacaattacaacaatatgtacagaaccaacattgagggaattggtgttaaatttgttgcaacgcctccgggcggtgatgcaggagcagagctgccaatgttaccgtatcttgccggaagcgatcccggtgcaaccttaacagatgtaacagtaaatcagggacgatttgttgcttatttttataagttaagtaatgacataaaattaaataaacccaatatgagcgataacctgctctataccaaaaagaacatcggttataacaaagtagaagatacaacagtcgctatatatgctatagagaatatatacattgttggtgttcctgtatgtactattgatagacctttaccagtcgacttcaatacagtcaatgcatctgatgtccggagcggagtggatagaccctttgagtttggtataaactgtaaaacagattacggaaactatgatgttgttgcatccatcagagctgataacagaactgatgatgataattatataaaagtaactgataacaataataaagatgactccttagttatagaaatcactgatggtaacaacaatcgaattaaagttaatggcaatacagaattgcgtgccagtaatatttccagtggacaaaaagctgctttcaagtggcatgcaaaacttaaaaaaccaaatggtcagccgtatccggcacaggggccatttcatgctgaagctgtaattaccttaaatataaaataacagaagagattatgaaaaatacaatcttcgtcagcatagccagttatcgggatccggaactgatacccactatcaaaaatatgatagctcatgctgctgctcctgagaaaattgttatatccgtatgctggcaggtagaagagaaaaatatttctgtatttacagacattggtgctacggagatagaatccggttcagataacccagatgtatttcgtcttaattatcagggcgcaatactgcatatccattatatcaatatttatcaggcacggggtgcctgctgggcgcgttattgtgcagaattggcatttaaccatgaagattactttttacaaatagattcacattgtcgtttcatcgaaaactgggatagtgaaatcattaattactatctcaaactcagtgaggaagtcgaaaaaccagtcattaccggataccctccatcatatacaccagcgactgaggataaagaagaaattttaactaccggaacatgtcgtattgtttttaacgaatttaatgatacagatattccggcatttaaacctattgcaattactgataccagtaattatgagcgcggcagttatatcgccggcgggtttgctttttctgccggtaattttactgttgacgtcccgaatgaccccaacctgttttttttgggagaagagatttcaatgtctgccagagctttcacccggggatataatgtcgtttatccggaaaagatctttgtctggcattattataccagagaagagtgtaataaaatctggggagaccttaatcaggaatctgttgaaaaaaaactggtgaaaaagggctggtgggaatgggatttaatatccaaacagcgagtcagatacctgttaggcataaaaattgatgaggacgttgacctcggtaaatattgtctcgggaatgtccgtactctggaacaatttgaatatctgaccggaatttattttcgtgaacagttagttgtcccggagctgattaaagatccaaaacctgccatgtttgacgacattccggaatcacgggatgcctggctgacccggctttattctccgttttatcaggcagtcactattgataaatcagagcttgctgctaatgatgacaatgttgattactggtcactaggtgtatttaccgaagataaccaactaattgctatgcaacgcctgactactgaagaaatggctgaacaggtatctgatgataatcaggaaagttataaacttgaaattaagctgaaagataaatcctgtctgattcctaaaaaactgaggttagcccccttctttaccgactgtggctggggagaaacggtggaaaaagtatggtaaacagtcaggatgtctttaataaaataatgtgcattgatgcacttattgacttggaggctattatcccctctttatctgaactgcagatgaatttatccactgctgttcagcagttccgcgactgtctggaactggaagatccttattttgaacattctgaaagtttctgccggctgctctgtatttatctggataaaattatcctgaaatatacagacagccagcagctttcctgggcaccttatttactggaaaactatttttacggatttgatcgtgaaccttttgatgttgcagaacaactgaccttcttttcatccgtaaaacgtaatgctgtttttttacctgcttatcagatggcgctgcggctgtccggattaccggaatataaaactgtactgaaaccggtgatcccgctgtttgaaaaacggctgccaacgctgcctgtggctgaaccggtgaaaccgccggtaccggaaatacctgaagcagcagaatatccgccaccggtaagttaccggacagtcaatatgccgcttatttttgccgcagagatcctttgcctgatatcgattctgatttttgtctggctctatattcgtgacacactggataccctgatttaaatgaaaaattttgctgctgtaaaaaaatggctgattattttattcactctccttgtgcttatccaggcagggctggctgtttatgatagaactcatctgtttatctggctgagcggattatgtatctcgcttttcatcatagcggttatttctgctgtccgtctcagagaacataccggtgtcactgttcatgatgaagatgagccggacagcgcaacggcaccggaaatcgtttttattctcggcccttatgccagagcctggttcagccggcaaaatgaagatgacaccctccggtttgataacagaatcatctggatgctgatcaataaaccggatgatattcataaacagattgaagcaatcagccgtaaacaccgccattatcagattagtgctatctttccggtattaccggacggcaatgattccgataccctgttgctgaataaattgcagggctggaaaaactccttttcccgtaatcaatttgaacaggaaattccctgcacattaattatttattcacgcctgagcagccagcggtttgctcatgatcctgataatgctaactggatcgggcaatttaatctttatgatacaaaatcccggttgttacgcgatgaaataaccgtgctgcgcaaagaactgaataccgtttatctgcaaccgcatgccgtcgcagctcagcaccgcaatgcactggcactctccacgctgaactggctggacgaagccggcctgatgacagagatagaatccctgttttcggagagtgtgctcagttttaccaatctgatgttttctgattacggaaacggcccgacccgccacggcgcctggtcccgctggatccagaaaaaatttacgctgctgccgcggatatcctcttatctcacgcttccgccattaccggtcaataccggggaaccgccaccgcatatcagaaaacaatcggttgaaatgacgccggttccttatcagaaactgcgctactcattgctgtttattccggtactgatagccggtgcaatcgcaggcagtctgctctggtcactggattttaatattcagcgcaccacaaccgtcaataacctgatcgcggaattcgatgcaactccacccaatgcgctacagcagcgtgttgccattattcagcagatgaaaaaattatctgatgcgattgcacatcatgataaaccgtatttctttatcatcgaactgacaccatccggtatatttatcagtaaacttgataaatcaattacggagttttcccgtagcccgctctatgtggcacatgataaaaatattgtctttgatatcggcagttcgcagttaaagaaagaaagtacagaatatctgatgccggtactgacatttattaagcaaaatccggatgtaaaaattttaattgaaggttataccgacaataccggcagtgataaaattaatattaatttatcactgaatcgtgctgaacaggtaaaacactggttacaggaatcctcaggatttcctgatactcactttgttaccaggggcttaggtgcccaaaatccgattgcagataatgattctcaggatggcagagaacaaaaccgccgtgttgaaatcaaaatttatcaggaaaatcagtaattatatattttgagggtgattatttatgaataagaataacgagtacattattcctgaaggcagttttattacatcaacgcctgaccttgataatacaatcaacattctgatttaccgtgatcctacgctgaatgaatacaatattattgttcaccgtgcatttctggatcaggatgaaacggttgaagaattttgtgaaaatgaagtcacgaattttacccgtgatttacccggttttcaggaagagggtaaaatgatcacccatgaactggggccgatgaaaatgaaagtggt

SEQ ID NO: 13 - DNA, 14352 bp, unknown
  Altogen 322075 strain
  misc_feature (210)..(240): n is a, c, g, or t
  misc_feature (328)..(356): n is a, c, g, or t
  misc_feature (432)..(476): n is a, c, g, or t
ccggtgatatcgtagtcataaaaactgttcacaccccacatccagccgtcttcatactgacggtaacccagaccgaggttggtggtagtgcgttcttcgttggcacgaagcccgacctgtgtgaataacaggctgttcggattatcgattaatggtaccagtacgtccgcgtcgccggttttattgctgccgaactgaatgcgggcgtgnnnnnnnnnnnnnnnnnnnnnnnnnnnnnnngccgagagaagcgtcaacggcatcttcactggagaggatctgccccgcctgtgaagcattgcctgcccagcgggcttcattctttgcnnnnnnnnnnnnnnnnnnnnnnnnnnnnnaacatcatctgtccgcacggtattatcgcgcggtgcagggtttgccgggtccggcagcgtgctgacactcatcggnnnnnnnnnnnnnnnnnnnnnnnnnnnnnnnnnnnnnnnnnnnnnttcaacggtaaatccctcaccgctgaaagaactgccggaggtagtttttccgccctgagaattcggaggcggttccggggatgtatccatcagtgcattaagtccgtcaaatgtctctgacataattaatgcgtcattttgttctgccgcgtaagcaacagataatgttgccgtcgacaccggaaaaaataactgcaaaaagagcaacagatatgccgttaccctctttgtttttgagtaatacgaagtaacaggcatgaatacatccccgaaatgagattaaaaaactataaaaaattaaatgtcagaaagtgcttttattttatccttcacaccaatgaaacctgcgtactgaactttggtacataaagtgtccagttttttgttcagcgtcatggataacacttcacgggagtctttatccataatttctttattgacgtttaagaaggtatagttctgattaatacgtccgtagcttgatgagaaatcattaaattcagcctggtttacacctttaaggaaattaaatccgtccacacaggcgttattggtggatgcaataacaatcccctgagatgctaattgtttacttcccacatacgcctgtgccgcgttattaccggtcacattaggtgtagcggaacgggtttgctgttttaccggcggatttttaactgctgccgtgtttttctttgccggtgatgttgagcaggcagaaataaccagtgaaagcccggctacaacgagtgcttttttgttaatcatcattttcattcattcctatttataaaattaactcttacagagagaaattacaggtttaataaaaacacctgtctgctgatgatatgaagttaatgcaacatattattaacagcattcagatgtcatcagacagaaaaaggttggtgatattaaatacacgcgtaaagggagagtcataacagttggatagtcagcattacgggttatcagtatcatctgtctcttccgatccggaaataacagactgataatgggtgctgataatggagaaaagttcgctgatctcacgctccgtcattcccagcgccgcacaatacctgagcatgacatccggactgagcaccgacagcccgcgttcatagcgggatatctgctgctgactgatattcagtttctcagccacttccgaacctgttaatccctgactttttcgccttctttttaagaaaaaaccaacttctttcaatagagatatattattatcacacatagcaaaacctgatttacccgggatatttaactccttttaggtttatccggaataattaacgatagtaataaacataaaaatcccgttattacgcactatatccaccggagaatcagaccggaaaggtaacgatccctgttaattactgcatcctttatcggaaaagaagccagccactgccttttattttcagttgatattattcagctaaatacaaattaagtgagtttaatcccggttattcagcagcaataaaatcactgataacaaaataataccgataaatcatcactatcagatcgggtaaagaataagtgaatccggagcagtcatgcaaataatcattcctctttcgttgccttaagaacaattggtgaaatctatctgtgagtaaccacaaatagtaataacagggaaaatagtcatgtaatttcagttcattatataaaaacaaacaggatgggtaatgatggcgtgagaagaaggatatttgagataactccctgtatgattaaacctgtatcactttgttacagtttttatcctctttttgttcatctgataataataaaaagaattttattatgatttattaaatataactccaataacttgtattttcgcctgccaaaataaaaacaccggcctgtcggaagaggccggtgtaatacggatgcaatatagcattaagaaaaacgattttcgtccctgtatattgcagggttatccgttatcagcatccccactccccagtccgcataatgcgcgaccagctccggataattcggtgtatagcaaaagacctgataaccggcctttctcagcgatttcaccgtttcttcccgcagaaacagccagtcacaatgcacactgaacgcgtcaatctcctgaagcagtgccagaggctgcggcggaattttttcccagagctgtccgcgccggatatgcggcatccgtttgtgcatatggcggagtgtgcgggtatcaaagccggaaaacagaatccgctctgccgggaaattctgcatttcaagtaccgcggcggtggcttcacacagctgagctatcgcgtggtcgctgtctgtcagctctgttttcagttccaggttcagatgcagcccggattcttccgccagcgccagcaggtcagtcagcagcggaattttttcgccccggtacacctcccccgcccataacccggcatccagtgcccgcagttcgcgtaaggtcagatctgtcactttcccgctgccgttggtggtacggttcacggtttcatcgtggatcagcaccggcacgccgtcggcgctgagctgaacatcggtttcaatccacagacagccaaactccgcagcctgccggaatgccgccatggtgttttccggtgcacgggcggcaaagccgcggtgtgctgcaataatcataatctgttcctttatacagagaccggacaaagaataatgcggacattatttgttttgcaacacccatactgctgcttccacccgtgattttaccttcatctttttcatcaggtttttcacatgcacttttaccgtgctttcagtgatatccagtttacgggcgatcattttattcggctgcccctgagcaatcagtttcagtatatcgcgctcacgcggggtaaggctgttgatatccggctcatcatcactgcgcacctcacgcagcgcccctgccagcacttcggtcagtgccggggaaacccccattttacccgccgctgcctgacgcagtgccaccagcagctcttccggctccatatctttgagcagatagccgtccgccccgcggcgcagtgccgtaatcaggtcttcccggtagttggacacactgaacaccaccacccggccggagagcggtttgcgccgcagaatatccagggtctcaaagccgttcatttccggcatattcagatccagcagaatcagatccggatcgagagattccgccagcgcaataccgtcgcggccgttcccggcttcaccggccacggtcagtgacggctccatgctgattaattgcctgacgccattacgcagcatcgggtgatcgtctatcagcaggatcgtggagggagaggccgggtcagcggcttcatccggatcactgagtataatctctccggccgaaagtattctgttcgtcattgtttaccttgctcctgaatcgtcttcatttattcttatagttgtattggcgggaaagcttatcagcacctgagtgccgccctgttcccgtgtggttatccggcaggttccgtgcagtgtggctgcccgttcccgcatgatggataacccgtaatggttatttttttccggatgttccgggataccttccccgttatcttccacgctgatataaatcatctggtcttctgaccggcacaccacctgcgccctcgatgcattggcatgctggaggatgttgctcagtgcctcgcggacaatctgcaccacatgaatggtctgatgcgcagagacctggcgcccggagagctgaaaatcaaaaccgatgcggtaacccatccgctgctcaaactcctccagtgtgctctgtaacgcggcaagcagcccgggctcagtcagtttcaggcggaaagtggtcagaagctcacgcagctgatgataagcaccgttcacttcctggcgcatttcagtcagcagtgtctgacagttttccgggatctgcgcggaatgcatctgtaaatagcttatctgaattttcaggcaggataatgactgcgcgatagaatcgtgaagttcgcgggcaatcactgagcgctcatccatcagaatcagctgttgctgctgctcatgctgatacgccagcgcaaaagcagagataatttgtttgctcagcatctgcatcatattctgctgctcactgttcagctgctgtccggccggtaacaggagcgtcaataccccgtaacggttaatcggcccgctcagattccaggtcagctgttcctgtgtctgtgacggcacgcagccacagtcaccgatttcagtaaaacgggtggcgttattatcctcaaaaatccgcaggcacagtgcgccttccggcatgatctgatgcagatcacgcagaatatccgtcagctgagtggtcaggttattggtgttattcagtcgctgcccgctcttatataagaaggccagcatctggtttttttcctgtaaatcctgtgttttgaccgccacccgcgattccagctccccgtagagcgcagacagttcctctgccgtgcggttgagggtattgccgatcatggtgatttcgtcgcggtggtcataatccgcaaagcgcggctgaaaattaccctgccccatcgcatctgcctgcgccagcagccgctgccacggatgaaggatccggcggcggaaatgccgcgccgataacaacagcagtaaaatcatcagcgcgataaagaccagctgaatggccgccaccagccggatggtggattcagtctggtgatcgatagccgacaccaggctgtcaatctgactgacaaacgcagccaccagcgcacgggcgtcttccggctgttttgccgcttccagtgccggacgcagcttttgccgccaggtttgttccacggatcggaactgctgctgtattttggccggactgactgctttcatcccggcaagcagggttaaatcggattcgaaatcatcaagatactgctgtgaatgcgcggtcagggggatttcagacaggaaacggtaactctgcatccgcaatgtgccggatttattaatcgcgtgcgcattgccctgcacactttccgtgatctgattggtcagacccatgccgatcaccgcaaagacggtaagcagcaccataaaaccggtgatttgggtaagaatggatgtgtgtttcagcatgcactgatgctcctctgaactgaccggttattctctccgatttctccgaaaaaacacttaccaccaaagtagtaccccttaaaaccttgagggattagccgctataacccacactaatcatactgatactaaccgattgattttacgtattttcatcagattaacaaccgtacccctaaagtagaatgacggttttgcgcttaaaaatcaatcggttcaccctttgattaagatcagtatcagcaccttataacccacgtaaaacgcctttaatttcagcataattttgaggtgtattatggctcagatctccgaaggcaaggcatcagcgggcgtcattaccgactggcgcccggaagatgaaaaattctgggcagagagcgggcaccgggttgcatcacgcaacctgtggatctccgttccctgcctgttactggcattctgtgtatggatgctgttcagtgccgttgccgtcaatctcccgaaagtcggctttaactttaccaccgatcagctgtttatgctgaccgcgctgccgtctgtttccggggcactcctgcgggttccttactcctttgtgattccgattttcggcggccgccgctggactgcattcagtaccctgatcctgattgtgccgtgtgtgtggctcgggtttgcagtacagaatccgtcaacgccgtatgcggtgtttgtgattatcgccctgctgtgcggctttgccggggcaaactttgcctccagtatggggaatatcagcttcttcttcccgaaagcgaaacagggcggagctctgggtatcaacggcgggctgggtaacctcggcgtgagtgtgatgcagctggtcgcaccatttattgtgacattcggtgtgttcagctttatgggcggcaccggcgtgacccagccggacggctctgagctgtggttacagaatgccgcgtggatctgggtaccgttcctgctgctgttcaccgccgccgcctggctggggatgaacgacctttctgccaacaaagcctcgttaaaagagcagttaccggttctgaaacgcaaacatctgtggatcctgagcttcctctatctctccacgttcggctcatttatcggattttccgccgggtttgccatgctgtcgaaaacccagttcccggatatcgttatcctgaaattcgccttcttcggcccgttactgggtgcgctggcccgtccgctgggcggcttcctctccgataaattcggcggcatccgcgtgacctttattaactttgtggtgatggcggtattcgcattcctgctgttcttcacactgccgggcaaaaatgatgccggttcatttgccgctttcttcggcgtctttatggtgctgtttttcactgccggtctcggcagcggctctactttccagatgattgcggtggtgttccgcaaaatcaccactgaacgcgtgctggcacagggcggtaccgaaaaagaagcccagcatgaagctatcaccgaaagtgctgccgcactcggttttatctctgccatcggcgctatcggcgggttctttatcccgaatgcctttggtatttcactgacactgaccggctcgcctgccggtgcaatgaaagtgttcgttgtcttttatgtggtctgcattctgaccacatggctggtatacggccgtaaaaaataattaattcaattctgataatcagagcaatgtgagcgcccggcgcttatcgggggattaccgaatgagcaagtttttagacagattccgttattttaagcagcgcggggaaaccttctccggcgaccacggacaagagctgaacgtcaaccgcgactgggaagatggttaccgcagccgctggcagcatgacaaagttgtccgttccacccacggcgtgaactgtaccggttcatgcagttggaaaatctatgtgaaaaacgggctggtgacctgggagacgcagcagacggactacccgcgtacccgtcctgatctgcctgaccacgagccacgcggctgtccgcgtggtgccagctattcctggtatctgtacagcgcaaaccgcgtgaaatatccgatggtgcgcaagcgcctgatcaaactgtggcgtgaagccaaagcgcagtacgcggatccggtggatgcgtgggcgtccattattaatgatgaggcgaaagccaaaagctacaaacaggcacgcggccgcggcggatttgtccgctccgactggcaggaagtgaatgaaatgattgcggcagccaatattgtgactgccaaacagttcggccctgaccgtattatcggcttctcgccgatcccggcgatgtcgatggtctcctatgcctccggtgcccgttatttatccctgatcggcggtgcctgcctgagtttctatgactggtactgtgacttaccgccggcctccccgcaaacctggggtgagcagactgacgtgccggaatccgcagactggtataactcctcttatctgattgcctggggttccaacgtcccgcagacccgtaccccggatgcgcacttcttcaccgaagttcgttataaaggtaccaaaacggtcgcgatcacgcccgattatgctgaaatcgccaaactgtgtgaccagtggctgaacccgaaacagggtacagacagcgccgttgcactggcgatggggcatgtgatcctcaatgagttccacgcgaagcgtcaggcggaatacttcaccaattatgtccgcacttacagcgatatgccgatgctggtaatgctggatccgcgtgcggaaggcggctatgtgccgggccgtatgctgcgggcatctgatctggtggattctctcggcgagaaagaaaatgctgagtggaaaaccatcgctattgatgaaaacagccagcagctggttgcaccacagggctctatcgggttccgctgggacaaatcccgcaaatggaacctggagccgcgtgacggcaagagtggtgatgagatcaccatgcaactgagcctgctggataaacacgatgaagttgccgatgtcgcgttcccgtatttcggcggcattgaaaatgaattctttgaaggtgtggcactggatgaagtgctgatgcacaaactgccggtgaaagtggtacgtctggcagacggcagtgaagtccgtgtggcgagtgttttcgatttaaccctcgccaactacggtatcgatcgcggtctgaacgatgtgaactgcgcagcggattacagtgaaatcaaggcctataccccggcctgggcagagaaagtaaccggcgtcagccagcatcacatctcccgcattgcccgtgagtttgccgataacgccgagaaaacccacggccgttcaatggtgatcgtcggtgccggtatcaaccactggtatcacatggacatgacctaccgcggcatcatcaatatgctggtgttctgcggctgcgtcggccagagcggcggcggctggtcacactatgtgggccaggaaaaactgcgtccgcagaccggctggttaccgctggcgttcgggctggactggtcacgtccgccgcgtcatatgaacagcacctctttcttctataaccactcaagccagtggcgttatgaaactgttcagccgcaggagcttctctccccgctggcggacaaatcccgcttcagcggcagcctgctggacttcaacatccgcgctgagcgcatgggctggctgccgtccgcaccgcagctgaacgtgaacccgctgactatcgcggcgagagcaaaagaagccggtcaggatccgcaggcttacaccacagaagccctgaagagtggcgcaatccgctttgcggcggaacagccggataatccgcagaacttcccgcgtaacctgtttatctggcgttccaacctgctcggctccgccggtaaaggccatgagtatctgctgaaatacctgctcggcaccgagaacggtctgctgggtaaagatctcggcgaacagggcagcgtgaaaccggaagaagcggaatgggtggataatgccccggaagggaaagtggatctggtggtgacactcgatttccgcatgtccagcacctgcctgttctccgatatcgtgctgccgaccgccacctggtatgaaaaagatgatatgaacacctcggatatgcatccgttcattcatccgctgactgcagcagttgatccggcctgggaatccaaaaccgactgggagatctacaaagggatcgccaaatccttctctgaactctgcccgggccacctgggtaaagagacagatattgttaccctgccaatccagcatgactccgccgccgaaatggcgcagccgtttgatgtgaaggactggaaaaaaggcgaatgtgacctgatcccggggaaaaccgcaccgcacctgatggtggtggagcgcgattatccgaacacctacgcccgctttacctcgctggggccgctgatggataaactcggcaacggcggcaaaggtatcagctggaatactcaggaagaagtcgatttcctgaaaaaacttaaccgcacccgcactgagggcgcagcggaaggccgtccggcgattgaaaccgcgattgatgcggcagaagtcgtgctgtcactggcaccggaaaccaacggccatgtggcggtgaaagcctgggatgcgctcggtaaagtgaccggccgcgaccatacgcatcttgccatccataaagaagatgaaaaaatccgcttccgcgatatcgtggcgcagccgcgcaaaattatctccagcccgacctggtccggcctcgaagatgagcatgtctcttataacgcgggttacaccaacgttcacgagatgatcccgtggcgcaccctgagcggccgtcagcagttgtatcaggatcatgaatggatgcgtgcatttggtgaggcacttgtggtgtaccgtccgccggtggatacccgtgcggcacaaccgctgctgggtgcgaaaccgaacggttatccggagaaagccctgaacttcctgaccccgcaccagaaatgggggattcactccacctacagcgacaaccagctgatgctgaccctcggccgtggtggtccggtggtgtggctgagtgaagacgatgcccgttcgctgggcattgaggataacgactggatcgaagctttcaacagcaacggcgcactgactgcccgtgcgattgtcagccagcgtatcccggacggcatgatctttatgtatcacgcccaggagcgtcagataaacctgccgggctcggaagtgaccggtatgcgcggcggtattcataactccgtcacccgtgtctgcccgaaaccgactcatatgatcggcggctacagccacctggcatacagctttaactattacggcactgtcggctccaaccgcgacgagtttgtggtggtccgcaaaatgaaaaatgtggactggctcgacggtgagcaggatggttatcaacagaccctgagcgggcaggagaaagcataatgaagatacgttcccaagtcggcatggtattgaacctggataaatgtatcggttgccatacctgctctgtcacctgtaaaaacgtctggaccagccgcgaaggtgtggaatacgcgtggttcaacaacgtcgaaaccaaacccggcctgggttacccgcataactgggaagaccaggaaaaatggaaaggcggctggatcaaaaacatccgcggcaaactggtgccgcgtatgggtaacaaaatcggcctgctgtcaaaaatcttcgccaaccccgaccagccggagctggatgattattatgagccgttcacttacgactatgatcatctgaaaaatgccccggaaggcaatctgccgaccgcccgtccgcgctcactgatcaccggtcagcgcatgacaaaaatcgaaaacggcccgaactgggaagatgacctcggcggtgagttcagccgccgcagcgcggacaaaaacttcgccgacatgcagaaagagatgtacggccagtttgagcagacttttatgatgtatctgccgcgtctgtgtgaacactgtctgaacccggcctgtgtcgcgacctgtccgagcggcgctatctacaaacgtgcggaagacggcatcgtccttatcgatcaggacaaatgccgcggctggcgtatgtgcctgaccggctgtccgtacaaaaaaatctacttcaactggaaaagtggcaaatccgagaaatgtattttctgctatccgcgtatcgaagccggtcagccgaccgtctgttcggaaacctgtgtgggccgtatccgttacctcggtgtgctgctctatgatgcggatcgcattgaagaagcggccagcgcggataacgaaaaagatctgtatgagcgtcagctcgggatcttcctcgacccgaacgaccctgaagtgatccgccaggcgcagaaagacggcattccgctgagtgtgattgacgcggcacagaaatcgccggtctacaaaatggcaatggagtggaaacttgctctgccgctgcacccggaataccgcaccctgcctatggtctggtatgtgccgcctctgtcaccgattcagtctgtcagcgatgcgggtatgctgccgcacagcggcgtactgccggatgtggaaagtctgcgcatcccggttcagtacctcgccaacctgctgaccgccggggataccgcgccggtactgcgtgccctgaaacggatgctggccatgcgtcactacaaacgcgcggaaaccgtggataaaacccgcgatatcagtgcgctggaagaagtgggtctgacagaagcccaggcacaggaaatgtaccgctatctggctatcgccaactatgaagatcgctttgtgatcccgtcatcacaccgtgaactggcccgcgaggcattccctgagcgcaacggctgcggattcagcttcggtgacggctgccacggcagcgataccaaatttaacctgtttaacagccgccgtatcgatgccattgatatcacgcagaaaacaccggcagatgcaccaatctcagagaggcattcatcatgatcagcttaaaaattatcggctgcctgctggattacccgaatgaggagctctggggacaccgcgacgaactgattgcagagattgaacaggcgcacgagctgcgcctgactcaggccgccgcactgatgtacttcgtcgctgaactgaccgctgagccgctgctcgacagccaggcacgctacagtgaactgtttgatcgcggcagggccacctctctgctgctgtttgaacacgtttacggtgagtcacgcgatcgcggccaggcaatggtgtccctgctggagcagtatgagcaggccgggatcaccctcagcagccgcgaactgccggattacctgccggtttatctggaatatctctctgttatgccgccggaacaggcctgtcaggggctgaaagacatcgcgccgatcctcgccctgctcggtgagcggctgcgtcagcgcgaaagtcattaccatgaactgttcagcctgctgctggccatggcggacagcgacctgacactcagctcactgacccgtcaggtggacggtgaagcccgtgatgacaccccggctgcactggatgcggtctgggaagaagaacaggtgacattcctggccgataaaggctgtgacaattctgttctgacacagcatgagcgtcgtttttcacagagtgtcgccccgaattacattcaggtgggtgacgcgccggttccccctgcggcgaaaggagtaactccatgaatttcctgaatacgtttttctttgatatctatccgtatatcgcgggcgcggtgtttatcatcggcagctggctgcgttatgactacggacaatacacctggcgtgccggttccagtcagatgctggataaaaaagggatgcgtctggcttccaacctgttccacgtcgggatcctcggtatcttcttcgggcatttcgtcggcatgctgaccccgcactggatgtatgagccgtttatcactgtggcacagaaacagatgctggcgatggtggcgggcggtgcctgcggggtaatgacgctgatcggcggcggtctgctgctcaaacgccgtctgaccaacccgcgtgtccgtgcaacatcgtctgcgggcgatattctgatcatcaccctgctggtgatccaggtaattctgggcctgggcaccattccgttctccgcgcagcacactgacggcagcgagatgatgaaactggtcggctgggcacagtctgtcgtgacatttcaggggggtgcatcagagcatctggaaggggttgcctttatcttccgcatgcacctggtgctgggtatgacactgttcctgatcttcccgttctgccgtctggtgcatatctggagtgcgccggttgaatacattacgcgccgctaccagttagtgcgcaaccgccattaattaacaacaacagtctcatcctttaaatgcacagttttgggtggctccggccacctctttttttatcaccgtgttattctttcaaaaaaagttgaaacagataaccgcttcagaggcaaaacaaccggtttctctgccgctgtaacgtatcactaacattttcaatatctttccgctgattaaaaaaacctgctaaatcaattcagtaaatcacaaccagcagaaacacactgttt

SEQ ID NO: 14 - DNA, 224045 bp, unknown
  Altogen 322075 strain
  misc_feature (31227)..(31227): n is a, c, g, or t
  misc_feature (48372)..(48462): n is a, c, g, or t
  misc_feature (91867)..(91959): n is a, c, g, or t
  misc_feature (100717)..(100732): n is a, c, g, or t
  misc_feature (177563)..(177563): n is a, c, g, or t
  misc_feature (209633)..(209633): n is a, c, g, or t
  misc_feature (221832)..(221955): n is a, c, g, or t
aaaaagcgccttaaaggcgctttttttatgtccgcagttttttcaccagataatcaataaacaccatcatgtgcggcggctgataacgcgacggcggatacaacagccaggcatccccgctgtaacgggttttaaacgtccagtccggcagaacctgcacaatctccccgctctccagcgagttacgcgccgtaaacaccggcagcccgccaatcccgagatgtgatttcaccccgccgagccgcaccccgctgtggtttgatgaataacgcccgtgcacattcacagacaccactttattcccctgctgaaaacgccagcgggtatctgccgcttcctcactgaggaacaggcagctgtgatccttcagctcctgcggatgagagggggtaccgtgctccgccagatactgcggcgtggcacataaaatgtgactgaccgtaaacagccgcttgccgataagtcccggcgggggttcattggtaatacggatggcaaggtcgatttcctcatcaatcagatccatataacgatcttccaggcgcagcatcacattcacaccggaattcgttgcgaggaattcattgataagcggatgcaccataaaatagcccagtgctttcggggcgcccagacgcaccagcccggaaggtgtttcactgaactgcccgctggcactcatcaccgctcccgcagaattgaccagcgcctgacagtgctgatataccgccttgccgctctcattcagacgcagtttgcgggtcgtgcgctgcaataaccgggtattcagtgcacgctccagccgcgagactgcacgactgatcgcggacggtgtcgcgcccagttgccgggcggcttccgagaaactgccggtttccaccactttggcaaataccgccatttcctcgagtaatgcgagggtttcatttgtgatcacagggaataaatcctttgcatttttgctgtattatcatatgacagtgcctgcaatacaatgtcagacaacacgacacaataataatgaggcacacatcaccatgacagaaaaatgctatctgcccagccgcgccttacagggcaccaccactgtcctggaatgccgtccggcagaggacgggcgctatgcggttatcctcgataaaaccctgtttcatccgcagggcggcgggcaaccgggagacaccggcacgctcggtgatgccactgttattcacaccgcttttatgccggaaggtatcattcattacaccgatataccggtcgcccccggtgaagttcagatgaatgtcgatgcagagaaacgtcagttgcactcgcggctgcataccggcgggcacctgctctctcatgtgatggaaactttcggctggaagccgaccaaaggacatcactggccggatgaaggacggatccagtatattcctgccggttccccggtgatcgtggatccggaagatgtccgccgccactgtcaggcgctgatcgacgcggatcacacctgccatcactatcaggatgaggacggcttgtttcagatccgttttgcggattttgaaccttactcctgcggcggcacgcatgtgcagtcactcggcaagatcggcacactggtgctgaaatccgtgaaaaccaaaaagggcgttttgtccgttcagtacgacgtcatctgacggagcctgtctctctgcggcggcactcccgccgcccctgctaatctgctgaggttatgatgaatctgttcaaccagagtgaatttctggcgcttgcgctcgtccattttttcattgttgtctccccgggaccggactttgccgtgacgctgcgccagagtatttatcacggacgcaaagccgggctgatgaccgcactcggtatcggtgccgggatttccgtgcatgtggtgtacacactggctggtgtgacagccctgatgcaggccacgccgtggctgatggataccgcgaaatacattggtgcggcttatcttatctggctgggcattcagtttctgcgcagtaaaggcgcaagtgcgactatcacaccggagagcccggatagcgccccggcacaaacagccggcaaggcattctggatgggatttctgaccaacgccaccaacccgaaagcgatgctgtttttcctggcgatgttcaccacactggtcagtccgtccacgccggtgacggtgaaactgttctacggcgtgtggatgtgcggcgtgaatgcggcctggtttatggccgtctccgttctgttctcacaccagcgtatccgcgagcggttcctcgcgcacagccggttgttcgacaatgtcatcggcactgttctgctgctgtttgccgggcggcttttgctggcggtataacggcagggcaaccgccggtattatcagacagactctgaaattacaggcagaaaatcaaaagataaccgtccgccaatggcgtctgcataacgaatcaatgttcccagttgcgggtcatagtcccctttttccaggcgggaaatattctgtttttgcgttgccattttttcagccacttcagcctgggtaattttccgggcttttcttgctgcctttaatgtatccagcaatactttccgtgcctgaatttcatccagtgcatcgataacttcaggatctttaagtaatgtatttttcagctcttcaaaagggactaaatcataatcatcattacgactcatttcagcctccttatcacttctttcattctctcatgtgctaactctagcacctgctttggtgttttctgcgtttttttctgaaagacatgcacaataattatatggtttccctcatccttcatcccaatgttttcttttcagtttatcgtcagcaccaaatgtaatcaaatatgattactgtataccataactctattcaatatgacaaaaaaataaatttggtaattaatgctgccttttgcagttatagccaaattcattgccacgttaatagtttgatatggtaatgtttaaggacgttaataaatacgtgcagttacgttctcatgtatttacgccttgttgtcccgatgaggccgttccggcgctcatcagtcacccggacagaacggagaaaataatgattaaactgaaagatatagaacaggctttgcgtcctcagccatcctacaaaatgctgattaacggccagtgggtcgaaagcagtgatcacgccaaaagccagacatttaaccccgcaaccggtgaattactggcagattatccggccggtaccgcgcaggatgtcaacactgcggttgctgccgccaaaaagaccttcgaaacctggcgccatacctctcctgctgagcgtcagcagctgttactgaaaattgccgaccgcctggaagccgaaaaagagcgcttcgccaccctggaatccctcgataacggtaagccgtataatgaggccatttccatcgatttaccggccgcgattgaccatttccgctactttgcaggagctatccgcgcccattccgaccaggccgatgtgctggatgaaaacaccctgagtctggtgatccgtgagccactgggcgttgtcggtcagattatcccgtggaacttcccgctgctgatggccgcctggaaactggcgccggtcattgccgccggagataccgtggtgataaacccggccagcctgaccccgctgaccctgctggaactgggccgcatcctgaatgatgtgctgcctgccggggtgataaatattgtcaccggtcgcggctctgtggtcggccaggcgattcttgaccatccggatgtggataaagtggcgttcaccggctccaccagcgtgggttacactgttgctgccgctgccgcgaaaaaactgatcccggccactctggagctgggcggtaaatcggcgaatatcgtgttcccggatgccaatatggaaaaagccgtcaaatatgcggctatcgcgatcctgatgaaccagggtcaggcctgtgaatccggttcacgcctgttcctgcacaaagatattcacgatgaattcctgaaaaaactgaaagcccgttttgaatccgtcaaagtcggtgatccgatggcgaaagacactcagatgggcagccaggtcagtcagggacagctcgataccatcctcagctatgtggaactggcgaaaaaagagggtgccaccatcctcaccggcggcgaacgcctgaccagtgacgggctggatgccgggttctttatgaagccgacgattatcaccaatgtcaccaaccagatgcgggttgcccgcgaagagattttcgggccggtactggtggtgatcccgttcagtgatgaggatgaagttgtcgcgatggcaaatgattccgagtacgggctgggtggtgcggtctggacacaggatatcaaccgcgcactgcgtgtggcgaaagcggtcagaaccggccgtatgtgggtgaatacctatcatgagctgccggctcatgccccgttcggcggttataaaaactccgggctgggacgggaaacccataaaatgatgctggatgcttataccgaagtgaaaaacatctatatcagcaccaaagagtcataattcataatgcaaatgcccggtacaaccgggcatttttttacttatttatttattgcttttcgcttcaggtggcgggtttttcccggcagatcgcgcaatactgtacatctgctgcatcatcatctgatccgcagtttccgccacaataatcacatagcgccgttctttctgatcatagcggaaataggtgcattccggcttaccccagcggttgtaatagatcgcaccgttctcttcctgatagataatacctttctgctgattcagccattcatcaaaacgccagcggtatttcgggactttcaccagatgaatgataccttctgcgtcactgagcggatcacggaagcggtaaatctccgtattatcatcatcgctttcaatatgaaggccgccgatatcgcggacataatcaccgccctcctgttttttcaggtcgatggccattgtttccggcagggtgactgagatattttctgtcattctgatggtgtcaccgggaaccggcgggaagccgttctctttataaaactgacgctgcgtctccagataagcttcataggaggcggctctgacatcagacaccgctttcattccggccagtttttcggaagtgtgatcggcgcgggaaagggtcattttcagggtacagttaaagaagccacacgccccctctttttccgtggtcagatagacggtttgtccgctgtccggtgatgtccaggtcgtctgtatattattcagatcaaaggtatcgccatgaatatcactgtcaaaacggttaccgctgttatccacagtgactctgcccggctcaaaccagaagaatgtggtgtctttcaggctgaccatggtgtcgcggatggcggctttgacatttttttccggatcactgttctccgacgcattatccgccgggttatcatacgtgacagtaatatcatcaatcacataatatccgtccggtgcaggcggcggggtttccttacatccggccagcaatgcaatcaccacagataaaaatacgccccttttcatgacccatcctttatttaatcaccggaaacccgttgtgatcatagcgcaaaaaatgagaaatcctgaccggaattatccttaagtgtatttatccgtccgccatggggtatgataactcccctgtttgttccggcccggggaaaggacaatggctattatcacaacactgatcacaggcgccttaaccgggctgattatcagcaccaccggtgtcggcggcggagtgatagtgctgccaatcctgacgtatctctacggtatgaatgccctgatggccgtcgccaccgctaatcttctctccatgctgatgaaggtcgcctcctcctggctgcattataaactcggcaatattccgctccggcgcgccatgattgtgctggggattatgctgcccgccaccttcggcgccagtctgctggtgacatggcttgcctcggtaccggcctggcaggcgatcacagaaaagagtattaatctgctggtcgtcgccgcgatcctgttttcactgtggctgtttattcagcggatgtttttcccgcctccgttaccggcagatacgactgaaacccccatgtcagtaagggaactgctgctgccggggatcaccgccggtatagtgctgggcgcaacgggtgtcggcggcgggattgtggtactgccgatgctgctgcgctatgcaaagatggatatccgtcaggcgatcggcacctctatttttgttaccaccctgctctccggctcttccgctgttgcctatatgcaggacggacacacggatgttcgtctcgcgttgtggctgtttgccgggtccctgctcagtatgccgctgacaaagattctgctcacgcggatgccggatcgcgcttttcagtacgcaacgctgatccttatcctgtgcagcaccgtgatgatgacactgaatctgttctaaaccgtggccacgccctgagcctgtaacgcctccgcgaggcggcggatgccatcggtgagtttctctgccggataggcggcaaacccgaacaacaccccttcctgcggtgcatccgggcggcagtaacgggccagcggctgcatacccatgccgcactgccgtcccgcctgaatcaccgtctgtgccggaacaccgtttttcatccggcacagcagatggatgcccgaatcactcggcacaatatccagcagaatgggaagataacggttgatcgcatccgtcaccgcctgccgccgctcataacaggctttgcgcacccggcgcacatgccgtgcatagtgcccttcgttaataaaccgggtcagcgtggcctgctccagatagccgcagccggtatcggcataatattttgtcacctcaaaggcagggatcagcgccttcggtacgacgagaaatcccagccggaaggcgggatagagcattttggaaaatgttcccgcataaatcacccgctgatgcctgtccagcccctgcaatgcctgaagcggacggtcggcataacggaactccccgttgtaatcatcctcgaggatccagacatggtgctttgccgcccaggagagcagcgctgaacgccgggccaggctgagtgtaccgccgcccggaaactgatgtgacggcgcggtgaacaccagtttcgcgtccggccagcggcgcaggccgtcatacacatccatgccctcttcatccgcccgtaccggacgcactgtcagccgctgtgataaaaacgccccgcgcgcaccgtcataccccggatcatccagccagacttcatccccgggctgtaacagcgtctgcaccgtcaggttaatcgcctgctgggtgccgttgacaatcaggatctgatcctcatcgcactgcaatccgcgggtggcacggacataatgacagattgcccggcgcagcgacgggtaaccgtgcggctcactgtgcgtatgcagcgcataacgggactgacgccagacacggccgagcagccgcccccagacatcatgcggaaacagatccacacatccggtgccgaccataaacagtgcatcggacggcgcaccggatgcaacgcgctgcgacagcaatgtttctgccagcgggctgatattggcggtcacctgttccccggcctcatccgccggggatgcaaccggtccgctgatggcgtgatccggcagattatccgccacaaaggtacccgcgccgcgccgggtgatgagataaccctcatcctgcaaccgctcaaacccggcaatcaccgagttacgggagatacccatcatctccgccagcgcccgtccggacggcactttgctgcccgcatgcaggcgcccgctgaggatcgcttcacgcaaagcgtgatacacctgatctttgatgatcccgttacctgtcagtaattcgggaaacgctgccgcaccggattttcgcatagtgacctgccggaaaagtggatctgttaaaaatataaaaagtgtatcttataaagaaccaaaataacacgtactcttcacatcacggaaaacgcgcgttttcttcacaacagcagaatgcagaataatgagggaaacaccatgaataatacaatgacatcatccgtactggatctggtgacagtggcgcctgccacacagaatgattatgcgggctggctgccgcactggctggcctatcaggaattttataaagtcagctttccggaagaggtcacactgaccagctggtcacgtttctttgatgaaaaagaaccggtgttctgcgccgtggcgcggatgaatggcaaagtcatcgggttcgtgcattatctctatcaccgctccacctgggcggaaaaagagttttgttacctggaagacctgtatgtggatccgtctgtgcgcggccagcatatcggcaaacaactgattgagtttgtacagcagcaggcactggcacgtccgtgcggccgtctctactggcacacccataaagacaatacccgtggtcagcgtctgtatgactgggtggcaaataaatccggtgctatcgaatatattatgccgctgaaatgatggcagtaatgcccggcgaaaaaagacccgcaaagggtcttttttagttttcttgattttctgtccggctgcccggcgcttttccgctgatttccgtgaccgcccggatattgataacaaacggtttaaacgcgaattttttataacgctgcaatacataccagatgcggaaaaaccgggaatcacggtaccgtttcatatctgcggtactcagcccgaaatgcccctgaagctgataactcagctgtgcggtgaagtgattacttttgatgtgaagagagtccagggtgatttctgtcgcccaggtatcattgagcatcaccggcgttccttttttcagatcctgccagcgggtataggccggaaacagtgttttattcagcccttcccggagcaggtgctgcaagtcagcctcttcgcggatcttcacgccctgccagtcaatctgcgcggcaatgatttttttcactgctgcctgtaacggattcagtgcatcctgagccaggatattatcccggaaagcataatccagcgcgcggtcacgatacggcctgccattggcactctgcatatgggtaatgagctttttcagcacgcccggataaccgccggaccagctgaattgtgaggatagctgccgcatctcatcaaacagtatccggctgaccgctttcggcccgaggttaaaaacctgcggcgtgtagtcacgtcccatcagcagcagatgactgtccgcttccggtttctgcatggtccagggatccacctgcgcggagacatcatgcagccgcaacagatcacggagctgaagtaagtcagaatcaccgctgcgcatatcatccggacggtaatcatcccggcggcgctgcgactgacagattaataacggaaatgataatgttgtcattctttccctgaataatcgccgcatcttatttatgcagtgattattttatcatcagccgccggaaagatccctgccgtcagtctgaaagcggaaaagataaaaaaggcccgtttccgggccttcagggggatgatcagttcttaaaggaactgataaacgagaggtactcttctttactcatcagcggcttatattccgccatcagggcttccgcaccggcggcatcatcaaacagcaaatcaataattgtcattgccatcatctgagccggacggatataggccatatcgtcatcaaaaacgacataatctttgccgtgcagcccgccgcgcactgaaccaatccacggatgactgaccggcatgatgtgggacagatccccagtgtcagtactgccggtcatatgctcggcaacccagacattttcatcaccaatcagaccttccgcattctgctgtaacagatcattcagtacgtcattgttgtacaacggcagatagcccggtaaatctttcacttccacttcggcgccgacagacatggcgccggccaccagcgcacgggtaatacgctcgttggcatcgatcatcgccggcacgtttgaggcacggacataactttccatgcgcacatcactcggggtcacgttcaccagatcaccgccctgggtgatgatcgggtggaaacggatataatccttctcctgaaaggtttcacggatagcattcacacccatgatacccatcattgccgcattcagggcgttaatccccatatgcggtgccgccgcagcatgtgccggtttgcctttgtaattaatcagcttgccgataaagccgttggtggtggtggagatttcaataaatccgttgtcacgctccggtttgacgctggtcaggtggatctgcatcgccatatccacatcatcaaactcaccgagggaaatcagctccggcttaccgccgatataactgattttgccctgttcgataagcttgttgcggtacgcgagttccacatattcctcagccggaacggcgaagggcaccacgtcccccgccagatattccatcgccccggaatccaccagccccatggtgaccgccatcatattagcaatctgcgcattgtgaccacagcagtgtgccgcgccggtctggtcatccgcatcagggtgttcagcacagataatggcatccagctcaccgattaccgcaacactgcgtttactgccttttccgcctttcaggcgggctttgaccccggtgagcgccagctgattacggtagctgacccccagagaatcaaatgccgcttcgaccttcttcgctgtgcgggtctctttataacccagctcaggctctgcccagatattctctgccagttttttaatgtcacccttgcgggcggcaatcgcttcgcagactttggctttcagttgttctttggtcattgtcatgctgaatattcccctctgatcagataacgccactccatgagagcgtcagttggccgataagtgcggcaaataagaatgtcccggagaataccgccagtgacaccgggataatgcgccatgaaatcgctttgaacttatcgatatctttacccagtgaaagacccgcgaaggccagtactgtggtactgataaccgcgatagagactttaccggtcatggcaatcatttctttgtcatacgggaacagcggtgaacacagaccggcggcgatcagggaaacccagaagatcaccggcagtttgcctaacggcggggtcatcgcgatcaggtatgccgcgaaggacataccgcccagcagtgtcatcgccagcagtgtatcgctgaacacctgtccgaactcaccacggccgtacattgacccgccgactgcatcgccgagcgcggtaaagaacaccaccagaaccaggattatggctatttctgtcatctttttcatgattagttatccttattcagtatccgcagacgccgttgcacgttttcttttcagtttgttgtacagataagacgcaaacggtaaggagaagaaaatatagatgtacagacctaacacagaagacatcaggtttgcggaagacgagaacgcctgaatatccgcagcctggtcaggatagagttccagcagaggggcaaccgccgccgccagcatcgagccgctgccgacacccgcacccattgccagggcaagcggactgagaatgtccagaccggcgatcacactcgcgaggatccccatccagacagcaccgtacagcgtaccgcagatatacattgccatgacaccgcggccttccggcgaacttaagccgtatttggcttcgatgatggcgatgttcggctcacggccgacagaataggtggcaccgaccgcttcacgacccatacctaacataatcgccagcggcagacccagcatgatggtaccgataaagtggcccacttcctgcagaaccagcgcaccaccggcctgaatgattttttcccaggaggccccgacggaagtactcagcttggcgatcaggatcaccagtgccacactcatgatagaggtcgcatgcgccatgttcttttcgttgaggattttaaatttcggaaagctgataataccacccatcagcatggagtagagcatcggaaaaaccatcaccagactgattttaatttgccctatcgcttccgcaagaagaatgataaataagctaaccaaaagcaacttactatcttttaatatatccatagtgttacctttataggaattgttattgagaattactcatgtgtatttatataaaaaacgtaccctttccatattcatactacccgcgcgactgttttcctgacaatattccgaaaattcctcagccatgccttttgggcatgccataaattaataaattaatatttattgattaaccctgtctcatctacttatttcgggttaccaattaatagataatgttttgaatttcagtgagatacaaaatgctataattttgtgaaaaacattattcgataagtgatattggttttgattaaaataaaaagagtaatattcaaataagccaataatgtgaagcggctcctgtttttttaattttccggcccgctgattttaatgagaatgattttatataatgatggaaaccccgttttaatactgaatttattcaggtgctaccgggatgaacatcttattacaccttccaatcaccgttatggcaaaatatttcactggcagtaaaaaatcgccactgtaacggataacatgaataaatcagatgcagatcacattattttatcaatatggacacaggtcacaatattgactattaatccggtcctcagcacagaaatccggaaaaccgcgttgtactgaacaggtttcatccgccggtatacctccggcaggctgtttttcacacaaacgcaggaaacccgggtaaacacagcagaattgatcgctgagtgtcttattgcgttgcttaattgttaccggattgtggatttctttttctgcccgtaaatctgtttcatcaggtctcagaaatattttgcatttgctcacgcataattacttaaaaaacacatcggtatcagagtatacccgcatgtaaacactacggataataaataaatttctcttaactgtgatatgaactgtaatatcaaaaactacagataatgccttacatcataagatgatgcatgtcatgtgacagacatcgcagtcatcataattataaataaaattacatcttttattttcggccataatccattcctctccctgattaattattacggtaaaactaaacaataaaactaatcacttttgtatatgattaaaatcaaacactttttgtaaatagtggctacctccggatatgaacatattacgattaacactatcagctaaaagtacgtcacaataccaactatgtatatttaaccgctattaatatcacttaatgtaacacatggggtgggtgattggtttttgataccaaacaaactgcttttttttagtcgctgccatgaaaaaaacatgttcatcttcactatataatttcacctccccccactgtcataatatttaaatttaaatgttatcacgatataaaaaaaagcagttttctccggataattgacactccaacaaacaattatgataatactccggcattcaaagaatattgctcacaattattattaattcatcccagcattagcatggtgggatttctattttaataataaaaataaaacagattattcttaaatattgacgaatatccctgataaaggaaataacatgaaacttcagaaagtattactctcagttgttctgggatctttatttgctgcgggtactgctatggcagaagatcctgtgcaaccaccagaagtaaaaagcggtctcggtactgtacatttcaaaggcttcattaataacgtgccttgctctatcgacagtaaattcctggatcagacagtggatttcggtgaaatcagccgtaacgaactgactaccggtacttaccgtacagatagcaaaacattcaatatcgaactgaaaaactgtgataccaccacgtataaaactgcgcagattcaattcactgcacctacagttgaactgaaagacggtactgcaacatccaaatatgttggtctgggttcaatccagaatgccggtatcgcactgacagacagcggcggtaaagctatcgagctgggttcacgtttccctgctgaaaaatacaccctgaacggtggccgtgatcaaatcactccgctgaactttgcagcgtatgtgaaaggtaaccagtctaccgttgccggtgaacaggctactaccggtcacttcgataccccggttaacttccagattttctatcaataacaggatagttactgaatagttctttttaatatatgcagtggtctgcaaggacagctcccgccactgcataataaattagcggtggctggcatatctcatgaagctcagaacaacaattaaaatatttacagcttctgtggttgcagctattcagataaataccgcatttgctgaagaagccgttaactttaatacatcatttttagactcagatagtcaggaaattgatttttccaaattcagccgggctaattatgttatgccgggcacttatcttctggcaactaaacttaataataatgttattaccagtgatgagaatatccttttttatatccctgaatatgatcctgaaataacagtcccctgtattacccctgaattatttgcacagcttgccatgaaagaagagtggcagaataaagtcagctggacagcacaggataaattgcagtgccttgatatccgtaccattcctgatatgcaggcaacaggtgatatcgcgggtaataaactcaatatccagatcccccaggcctatatggcttacagcgatccgtcatgggatccgccggagcgctgggatgacggtatcgccggatttttattcgactataacgccaccgccactcacagcaaataccagccgggcagtgataacgataaaagcagcaagacagatgttgtcagctacggtgataccggcgtcaacctcggtgcatggcgtgtgcgtgcggaatggcaggcgaccggcggcgacagcgcggaacactcaaaacgctggcgctggaaccagatctacgcttaccgggcactccgggatctcagcgcccgtctgatgttcggtgaacagtatctgacctcagaactgtttgaaagcttccgctacatcggtatgagcatggaaaccgatgaaaatatgttcccgccgctgctgcgcggttatgcgccggaagttgccggggttgcccgcaccaacgccaccgtcatcatccgccagggtgaacgtatcatttatcaggagcaggtcagtaaaggaccgttccgtatccgtgatatgaactacatcggtgacggtacgctgaatgtcaccattaaagagcaggacggcagcgaacagcatttcaccattgaaacatcccgcctgtcgatgctgacccgccccggccagttcctgtttaaactggcggcaggtaaaccgctgtcagacgatcacaaaaccgaaggcccggaattcggtacagggagtttctcctgggggatgagcaacaacaccacgctgttcggcggcgtgctggcggcgacggattaccagaacgtatctgtcgggataggccgggatatcgcaccgttcggggtattttccgcgaaagtctcctattcccgggcaaatatgggggattttgcagacaaacagaataaaaccggcggctcttacagcatcacctattccaaagaattcgatgccattaacagtcagctgaccttcgccggttaccgtttctcggagcgggattacatgaccatgaaccagtttgtcgatctgcgttaccgcggcggtaataccgacaacagcaaagagatgtataacatcatctttaacaaggtgttcccgtctctgcgtatgaacgtctatctgaactacagccatcagacattctggaataaagcgagcatcaataactacagtatgaccctctcccgcaactttgactggggagagaaaaagaacctcagcatgagcatgtcagcctaccggacagaatcggattcaacaaaagataacggcgtctacgccagcctctctgttccgcttaatgataataaaggtatgttcagctacagcggcagttacaataagaactctcacagtaataacgttaactattacaccgatattgataactcgagtaactattcactgtctgccggtgaaggcgacggcaaagtcaacctcgccggtttctataccaatgaaggggggaataactacctttcactgagcggaacctatattcaggataacgttcttacggtatccggccagtcacgcggcggctttaccctgacccgtgaaggtgcggcattccaccgcagcggcaacagtatggcaccgcgcattctggtggataccagcggaacagcggatattgacgtgcgcggtaccggtaaagcggtgcggaccaacgccttcgggaaagccattatcccgaccgcgacagcctactcacgcggccagttgtctcttgatctcgatgccatgccggataatgccgaagccctgacatctgtgcagcaggcaacactgacctccggtgcgatcggttaccggaaatttaatgttgtcgaaggctataaaatcatgggtattattgctatgaatgataatactcatccgccattcggcgcctctgtcatgaatgacaaaaatgcggagatcggcattgttgccgataacggatcggcttatctgaccgggatacaatcgggccagaagctgactgtggcctggaacggacaaacacaatgtactgtccggatcccggaaataaaggatgataacgttcagtttaatatgctgctgccatgccagtaaatccggcggcaccggcgtgtattttacagaattaacagatgaatccgtaaggaaccttaacatgagaaaagtgaccaccttattctgcgccgcactgaccaccctggccgccattccggtaaccgccggagctgccatcgcactcgacagaacccgtgttatttataacgaaggtgataaagctgtgccgctgacggtcaccaatgagcacctcagcaaaccgtatctggcgcaatcctggattgagaacagcaccggacagaaaatcacatcaccggtatttgttactccgccggtgcagcggattgagcctaacagcaaaagccagattaaagtgcagctctctccggaagccgcctcattaccggctgaccgcgaatcggtcttttatctgaacgtccgtgagattccgccggccgttgagaaaagtaacgtgctgcaaattgccctgcaaaccaagatcaaactgttctaccgcccgaaagcgattcaggttcaggagcggatggaaaaaatcgccggtgcggatggcatccgtctgtcgcagaacggcgggcagtacaccattgaaaacaccacgccgtaccatctgtcagtcacccgtctggatgccaccggcggaaaagaagtgaaatttgagccggtaatggtatcaccaaaagcctctgcgtccttcagtgctccggcgctgggtaatgcgccggttgtttattacgtcaatgactacggtgataccaaaccactgaaattcagctgtgccggcagcagctgtaccgtgcagtcagacagtaaataattaacaggaggaaccgccgatgacactgaccatgcttttccgtaccggctgcgcggctctgttgtgcctgccgctgatggtctccggcggttcttacacttatatcgatgtgtatgtccggggggagatatttatcgcaccctgcaaaattaatcagggcaataatatcctgattgatttcaaagatgtcaccaccacccggatagacaacgataattaccgtgaaaaactggattaccggatcgagtgtcaggataaccgcgcccgtgccatgaagctgtatatcaccggcacctcttcctccgtcgattcgcgctatctttccaccagcgtcagtgacctcgcggtgaaattcctggcggataacaaactgatgccgctgaatgaaaagatgaccattcagtatccggtacaacccgaaatcatggtgattctggcaaaaaaaccggcggtgaaactgcctgccggtgaattcaatgccacggccactatccatatcgattatgaataaggaattgtgatgcgacatttaatcacagctctgatgctgtcctgtcttgctctgccggtgtatgccggcacaggggtagcacacagttccgccaatatccggatcaccggaaggcttcagccgccaccgccctgtaaagtgaataataacgaggaaattctggtcgattttcagcgcatccagataaaaacgctggaaaaatcagatatccgcaaagatgtggatatcccctttgtctgtgagcaggactcggagaatttcaaatatttcctcaccgttgacggaccgcgggcgcagtttaataacaaactggtgaaaaccaaccagaataacctgggatttaatattgaactcgccggggtaagactggatttgggcaaagcgcagctggtgaacagccgccatctgacattaaccattgtgctgaccaaaaacccgaacggggaagtcacgcccggctccttcagcggcaccggcactgtgacaatggagtatttctgatgaaccgccctgctgctttcagcctgttattcagcgccgcactgacattctccgccgcctttattccggcggggcatgccgccgataacctgcgggtgatcggcgagctgtacaacgatccctgcacgctgctgccggaaaataaagatctggtggtggatttcagtgatgtttcactgccggatttgtatgagggggttgaggtccgtaaatcattctctctggtcctgtctgactgtgatatcacggatatgaaccggtttaagattaaattcaccggggccggcaccccggatatgccgtcctatctggcgctggatccgtccagtgacgcaggcggcttttctatcggtgtacggacagataatattccgctgatcccgctgaatcagttttccaacgccattaccatcgccggaaatggtgagaacaaaatccgttttaccgcttttctgcaggttgatccgaaagcaaaagccgataaaaccattaagtacggtgcgtttaattccaccgcgtttctgactatcgactatttctgaggcctgtatgaccaagatcctccgttatctcactgtgctgaccactctccttttatttgtgctgcctgcacaggcaacactgtacagctatattacccgctctgaaggtaaaccggcagatatcgattattactaccggattactgcctggactccgccgccggcgggcagcgtgcatccttgtgtgaaagtcggtctgacaaaaaaatgctacgccaatattaatcaccgccacacaaacgcagaccggggtggggtatcctcccgtaataacagcgaatttgaggggcgctgccggaatatgaacctgatgacactgccggatgccacagctgtttataactatatttataataactgtttcggcggactgccgtttgaggggcagaccaatcacaaaggtgacgctatccgtaacgaatgtgtgaccctctttttaaccagcagcccgaccggtggtaacggttatatgtatccggattctgtctgcggcgtagctcccccgccgggcggaatttgcagctttactgctgactatccgagcgccattctcgatcatggccggataccggataatgaaattaacggcaatcaggccagtcagtatctgagaatgaaatgcagcaaagatgccactgtccggatctactccgtgagtgatacggaatcccggctgagactgaaaaacaatctctacagcagactgacactgaacggctatccgctgaactcatccggcggtggtgtaccggtttatgtacgcggggattatgaagcaaacgcactgctgaaaagcacactggaaagcaccgggccggtggaagccgggccctttatcggcaatatttccattatcatgaccattgactgactctgcttgtgcgctggtgcctctgtaccggcgcttttcctcccgccgcccttttcgtgtagaatagccgtacttttcgccaccaccgcagggcttccatgaagaatgtcgattataaatcactgagattgctggatctgattatcaaagagcagggattcgagaaagcctcagcgaaactctttatcacgcagtctgcggtgtcccagcgggtaaaacagctggaaaatcaggtgggttccctgctgctgacccgcaccgtgccgccgaaaccgaccgagctcgggcaaaagctgctgggcctgctgtaccacgttgatttaattgaacatgatgcctttgataatgaaagcggcaaccacgtggtcaccatcccgatctccattaacgccgactccctcgcgacctggtttttatccgcgatcaagccgatactggatgaccgcgccattcgtctggatattaaggtggatgatgagagccggacactcgactacctgctcaaaggggaggcggtcggcgcgatcagtatgcagccgctgcctgctgtcggcggaacctgtgattatctgggggcgatggattatatttttgtctcgagcccggcctttgcggaaaaatatttcagcaaaggggtgaccaaagagaccctgctgcgggcaccggtggtatcatttaaccactcgtcagatatgcaccatatttttttacaggagtatttccgtttaacgccgggaagcctgaacagccatattgtgccgtcatcagaggcctatattcagctggtactgcaaaactccgcctgctgtatgattgcggaacatcagattaaacatgagcttgaatccgggcggatgatcaatctggtaccggaactggtgcagcaaaaacagctttactggcaccgttaccagccggaatccggcacattacagcggatttcagaagccattattaataatgccaaagattatctgacccaatccccggtgaccgcctgagcggcggccaccacagagtctgacgggattacagagactgcccggcagagccgaacagacgcatccgctcttccacccgctccgcgaccggctgcaatcctttcataatcactttgcgcgggtcgttgatatcatgcgcgccctgctgctcaaactgctctttcacggacaggcaccacgcatacatattttccgtattaacgttgatcttcgctgtaccgagtgaaatggctttcttcatatcctcgtctgaaataccggtgccgccgtgcagtaccagcggcactttcaccagttgcgcgatatgctgcatttccgcaaagccgagcttcgccttgcctttatacagcccgtgagtcgagccgagcgccgccgccagacaatccaccccggtttcttccaccagcttctgacactctgccgggtccgcataaatgacgtgagaattcacaataccgtcctcactgcccgcgatagtgcccagttctgcttccacagacacaccacggcggtgcgcgtaagtcaccaggcgtttggtgattgccaggttttcggcaaacggcatatgtgaaccgtcgaacatcacggagctgaaaccggctttaattgccgcctcacaggcttcataagactggccgtgatccagatgcagtgccaccggcacatctatttccagaaactccatcgcattcaccacaatatcgtgaatacatttcagcccgagcatatgttttatggttccgccggagacacctaaaataaccggggaacgcagttgctgtgcaacttttaataccgttccggtccactccaggttattaatattaaactgaccgacggcgtactggcgtgcaaaggcacgattgagcatattctccatcgaaactaacatcggatttccccttgttggcgtataactggaatttaatcaaaaaccagaattaatcaaaatcagaatttaatcaaaatagtgtttcagatttctttcgtatttattcaccgcattatggacatctgccaaatccggcattgattcgcgcaccccttttttctcaattgagatggctgctgacagactggcaaataaaataatattctcaatatgccagttataatgaaccccgtacgtaaatgcgccgtggaatatatcaccggctccggttgtatcaatcgcattacagataaatgccggtgatattgtcagcattccgttttgcagatatgcacagcctttctcacccagcgtaataaatgcctcaccccgggccagtttattcaattccgttaatgctgtttttaactgaatatcggtggtgaatttatcaatctcaatcagatcacgggcaaagttttcactggcgaccagataatcggtatatttcgccagatttaaattgctttcccgcagtgaccccgcgtccatcacgacgcgggcatcaggcagacgggtcagaatatattcactcagctccggttcatgaccatcaattaataccgtgatgacttcccctttatcctcctgtgtcaggcgggtaatcagctcatcaattttcagtttctcttcaaatgtcatacgcggcggagagaccagtttgcgcgtaataattgtccgggaaccatttaactgattcactaatacagatgccagcggtgtgatcatttcatcgttaaaaataacgtaatcggtattcacacccacatcatgaaactcatcaataattttctgaccgtagatatcgtggttgaggtgtccggtaaaataaatatcctctccccacaatcccagtaaccatgccgcattggcacagggtccgccgccgctttcaataaaatcgccggagaaatttttggtattctcctccggccagcggttaagaaagaagaactggtcgaagcaggataaaccgacagaaattactgccataacaactccttaaaacctttcgtcagtatcatgtttacttatgtgcgcggtctttttccattaattcgtcatagctcagggtatcacccaccactttgactgatttaaaggcaaacggcgccagtaatgccagaaccagaacaaaacaaatcaggtaaatcgcaatctgaccgaagtgggtaaaggcttcaccgataacaatgccccacaccgcgaagtcaaagtctgcaaaggtactgttttcgaagcccaggttgcccagcgccggtaacagcatggccggtaagaaggcgaggaaaataccgccgataaaggaggcgataatacagccctttttgccgcccagtttgtccgcaaatacaccggatgtaccgccgcagaagaagtgcggcaccatgcccgggataataagtgccatacccagaccgcccagcatcagcatgccgacaaggccgccgataaaggagctgataaaaccaatcaccaccgcagtcgggctgaaggtaaagaagacagcacagtcaaccgccggaatcgagttcgggatcagtttctgactgataccctggaacgcaggcaccaggtcacccaggattaaacgcacaccgctgtagacaatcgccacacccaccgcgaactgcagaccggtcaggatggagaagatcaccatattctgttcagtgatggtgctgatataagcggaaccggcaacgatgctgcacaccagataaatcacgaccatcacaataccggttgttactgtggtatcgcgcaggaagccccatttttcggagatttcagtatccgcaaatgagttttctgctttaccgactttcgccgcaatccaggcagacaggtaataaccgagggaaccaaagtgccccatggcaataccgccgtcttcagtaacacgcttggtataacgctgtccgattgccggtgaaatagctgaccaggcacccagcaggaaaccgccgataataaccatctcccagcctttgaaattcgcggcctgtaatactgccgagaataaacaggctaaaaagaaagaatggtgaccggttaaaaagatatatttatatttggtgaaacgggcaatcgccaggttgaaaataaagccgagtaataaaatactcattgtttccacacccagtaatttttgggcaacagaaacaatcgcttcgttattcggaataacaccccggatattaaaaccggcttcaataataccgccgagcggattcaggtttgccacgataacaccggcacctgcactcagcattaaataaccgaggatcggttttaatgtcccggttaataatttattgaccggtgaccgtaatgccagtaaccccaccagggagataatccccataagaaaggcaggctgactgaatatctcagtcaggaatgagagaatataagccataatttaattcctgtaaaaagaatgaactatcaggactgactcagtttcagtaaagcgtctttaatatcttccgcaattttggctttatgcacataactgcggatcacggcaacttcacactgcgacggaaattgtgatgccagctctttaatcgtgacatacagatccgctttctcacccacggcatttgcaaaatccactgaagccacatcggcttttatgcccatctcctcacaaattttcttcacgttattggcggccattaatgagctgccgataccattgccgcacactgttcttattttaatcatgctgtcctctctatcgacgtccggataaactgtaaaatctgttctttgttattctcttttacaaactcagtaatattattttcaatcagatcagccacggtctgaatcagatgaatatgggtatctgaatctgtcgcgctgatagcaataatgacattgaccggatcaaactcctcgtgatgaaacaccagtggtgtaccggtcaccaccacggaaaacgcggtttttaatgcccctttttccggtctcgcatggggcatcgccaccccggtatccagcacaatcaccgggccgaactcatgatatacgcggatcatttcctcaatataatcaggggtacaggcacctgatttttgcagtaactcaccggcatagcggatgccctcttccggagatgcaaaatcctgattcagggataacagcccgctctcaaaatgaatatccaaaaccgaactcctgatgtgattttttcttattttaaagatggcttatttacgcctaaataaatagcgacgaagatcacattccggttttaagaatgtgaaaccgatctcgtttgcctgaaataacgctttatcgtgtaaagcaaaaaataatccagttaattcatgggattactttttactgaaaatttcgctgtttttatttcccgggctgaatatgtggcctgagtcatattttcactgatgaaaataagatgttcatcacatttttgagggcgttgagtcgccactttgcggggcggatcaaattgaggggcaaaattgatttatttttaaccggtgataaaaaaagaagcccgccaacactgttttctgtgccgggcttctgtgctgtttctgctgataaacggataattactgcatcgtcacccagaacgttccggctccgctgatcgccgtaaaccgctgatggaatgacaccatttccgcctgcggattcaggtcactgaatgcctgcggatggaaaaacgcggccagtgcttcggcggcaaaaatattcagcgggctgttgtagaaattatggtaaaccgccatcacgcgctgtgatttcaccgcttccagcgaggctaatccctggcggttcatcagcgcattcatctctttgtgcgccggttctgccggtgcgccgtacccgagcgtgaccgcctctgaacggcggttatactgtttccagtccgcaccggtcagcacatagaactgcgggttgagatgcaggatattttcaatgctgctttccgcgccgtttgccggcatcgtgtcgcgcaccaggttatcaccacccgcaatctccgccagttcgccgaatccggtacgtccgtataaacggcagcagtcattgccgaataacccggcgttgctttcaatcagtacagacggcttttgttccggcagacgctgacgcagtgcggccagtttaagccggtagtattccgaaaactccccggcgcgcccttcggtttcaaacagcgtgccgataagctgaatacttttcggggtgttttctgtcatgtcactgcggaaatcgataaaaatcaccgggatgcccgcggcttccagttgcggcagcaggttcgtacttttcatcagcccgtaggatgacttgtgcatcagtaccgcatccggtgacagcgccagcaggttttctgttgtaaaagtaccgtctttgcttttcggcagaaccggtaaccgcgccagctccggcgcggcctccagatatgctgcttccagatccggcgcataatgcgccagggtatcactccatccgctgagagaggaaaaatgggttttccccgccgcaatatccaccgccagaatgtcacgggcatccgcaagaaacagccgtttgaccggcgtattcaccgctacggaccgtccctgtaaatcggtgacaatttgcgtctgagcacggactcccgtgctcagcagcagcgtcatcattactatgaatatacgcataaaacgggcctcagaatgtcaccagataattcagtgcgaatgtgcggccgcgccctttatagctgtataaatccggtgcgccgtacgccgggctgtacaggataggtgcgcgctgaccccacacggtggtgtaatctttatccagcaggttttcgaccgcgaagctgactttaccgaccggtaactgatagctgccaaggaaatcgacggtgttatatccgtccagtttctccccgtccgcatcggtcaggctgaaggattgctggctttgcagacgcagtgtccagtctgacggctcccaggccacatacgcggtgacttttgacgggctggcaaacttcacgctccatttttcccactgatcgcctgctttggtctcggatttgatcaggttgaaattagtcccgacacgccagtcagtatctgcgatcgcgtaatccgccgccccttccacaccgtagatccggcgtttgtcatctttcaggaagatagtcatatctttcttattgatgtcgtagctgctgtcagacagtgaatagtacgccgccagctgagtttgcagactgtccccggtgtaacgccagcccagctcgaaggagttgaccttgataccttttacccgcgtatcattgatattcacactgttgagcagcggataatgaccactgaccggcgaaccgtaagtgccggtgccgtagaatttggcgatatccgggatttcaaagccctgagagaaattaaaccaggtctgttgtgtgtcggtcaggttgagcagcaccccggcattaaataacaggttgttgtaatccgtttccccgcccggtaccgcatccgccgaagtggctttgccttccgcaatcagctgttgctgctgataaccgacaaaatcatccactttatttttcgtatactgataacgcataccgccgctcagggtcaccagcgggttgatgtcataactgctttgcagaaacgccgccattgtggtggtggtatagcccggataacgcccggtgttgtaggcggaatccagcgtcagtccgttgctttccttcgctttctgcagattaaagaacttctggttggcactgaatttttcatgctcggcatccgcgccgtacgtcagtgtcaggttatccagcggcttgctgttaaaggtgactttgccgccgtagaaatcggttttctgctctgatgcactgatgctgctgaccacataatccggttttttgccacccagcgccgggaacggatagaaggtctgggtttcatcacggtaatacgcctgcgccaccagatcctgtcccagcagatcactgttgctgtactgcaggttcaccatatggcgtttggtgccggggatccggtcagaatccagtttgtcgctgttatgcgcagtgccttttcccagtaccgccgcaaagtctttgcccagatcgatcccgtgtttaccgtcagattcactgttgtaatactgcgccatcagttccagcgactgatgatcatcaatcgtcagtgttcctgagcccatcacatccaggcggtcagaatactgaagcccggtctgggtgttatcgatcaggatttcgcggcctttgccgtcataccagccgccgtaacgctgataagccacggataaacgtccgtaagcctgatcattaccgccgctgaccgcagctgccacgttttcatcatgatccgaaccgttgcggaacccgcttttgccgccgatctgaacctcaacctgtttctcttcctgaccttttttggtcacgatattaatcaggccaccgctgctgccgccgccgtacagggaggtcgcaccggaaatcacttcaatatgattgatattgaacggatcaatcgaatccagctgacggctgtcactgcgtgatgaattcaggcgcacgccatccaccatcacaatcattgagcgtccgcgcatattcatgccgtagtttgtccggccctggccgctgacactcatccccgggatcagttgtgccaggatatctttcagctctttgccgccttccgcctgctgtgcaatatccgcgttatcaattacccaggtggtctgagccatttcagaaacagtccggtagctgcgcgaagcagagaccacaatcggttcgccggaatcggcagaggttgccgccaaaacctccggcgtggttaacagggtcaggcagggtgtcagaagacagagagagcggatgcgcatggtatctttcctgtgaggatcaaaaaagttcattatcaggctgctgataatattgactgagaatgattatcacaagaagaaatattatccacttgctttttatatttgatttccggggagtgactattcactgtggtataatcggaaccggatatcttcctcttaactcagtgattttcagataaggaatcccatgcgacctgcggactatctgcggcttaccctgctggcggccatctggggtgccagctttctttttatgcgggtggcttccccgcagttcggcgcggttaacacggcctttctgcgtgtctttttcggctgtgccggacttctggtgatcctccttgtcatgcgccgcaccttccggtttgacggaaaattaaaaccggcattattactgggcgtgattaactccggcattcccttttttatgtactgtctggccgcacagtggctgccggccggttactccgccattctcaacgccaccacgccgctgatgggggcgctgatcggctttgctttctttgccgaaaccctgaccgcccgcaaatggctgggggtgatgatgggactggccgggattgtggtgatcaccacggtcggggaaagtcagtcttccgcccatctattatggggcgtggccgcctgtctgcttgccaccgcctgttacgggctggcgggattcctgacacggcgctggatcagtgaaaaaggcggcctggatgcccggctggtcgcgttcggcagccagctcggtgccacgctgttcctgctgccgtttttcggtttcagtgtcacgaccggcccggcggttaactgggcgcagccgatggtctggggcagtgtgattgcagtggggctgctctgtacggcagtggcgtatattctctatttccgcctgattgcggatatcggcccgatgcgctcactgacagtgacctttctgatcccgccgttcggtattttgtggggttatcttgtgcttgatgagacactcagcccgaacttcttcctcggtgcgctgattgtctgtgtggcggtctggctgctggtcagccggggcaaacagcccgcagcggtaaaataattcaccgggcggcatccgcccggatgccgccgttttgccgggataacttacaccggctcagccagtctcagtatcaccgtatccagcagcacctgcgcaccgcggatcagatcgtcatcttcggtatattcagccgggttatggctgataccgttcttactcggcacaaaaatcatcgcggccggcgctatccgcgcaatcatctgcgcatcatgtcccgcaccggacggcatgcgacggtatgcgctcccggcggctctggccgcattctccacacaactgaccagggttttatcaaacaccaccggctgaaaacgcgccagttggcgggctgagaccgtaaccccttcctgctctgataacaccgccagataatcgcggatctgcccttccgcccattgcaggcgctcttcatccgggtcccgcatatcaatagtgaaggttgccgagcccgggattacgttaaccgcattcggttcaaaagcaatcgtccccaccgtggttaatgtggcaccatttctctgagaaataccctcgcgcagaaaggtgatcagtttcgccgccgcatatccggcatcatgacgcagccgtgtcggcgtggttccggcatggtttgctgtgccggtgatggtgattttctgccatgagataccctgtaaactctccaccaccccgatctgtaacccttccgcttccagcaccgggccctgctcaatatgcagttccagatattcatgcggcacgatgctgcccggcaccatactgcccgcataaccagcgcgttccagctcatcacgcagcaccgcaccgtcagtggccaccgcattcagagcatcctccagcggataaccgcccgcatacaccagcgagcccatcatatccggatgaaaacgcacaccttcttcgttagtgaacgccgccaccgtgatcggacgggacggcagcacaccggcttcccggaatgcaccgactaccgccnccgccaggccgctgagcacgccgtagcagccatccagcgccccggcgttaatcaccgtatcaatatgtgaccctatcatcagcggtgcggtatcactgtttccggaaaccgacggcagcgtaccgaaaatgtttccgatctggtcaatacgaatcaccagatccagcgctttcatccaactgaccaccaggtcacgcccctgcttttccgcatcggtcagcgctgtccgcgtccggccgcctttcaccgggtccgccccggtattccccagttcctgcaaatgattcagtaaggtctttccgtctatcttcagcccaccggatttgtgattcatgatcacctcattattgttattgaattaccagtcccgcgttgcgataagctcctccgggtccgcatcctcaaagccgtatgcccgggcaatcaggtaaaaggactcgccgatggaatcccgggcaacggtttcaatctcactgcctgcttcatcaaacgcatcctgcagatcattaaattcctctgtcgcctgctgtgtcagcgcatacagcgccgccagtccgtccggcggattgttttccagcccctcacacagacgcaacaggatcgcctctccctgcttcaccagatggtccgggaaatagctgtcatcatacatatcgcctaataaacggagcttcagaacatccggattggttacaggcattttcattcctcttgaaatagttacgctaagaacaaattaatacagagagacaacatataccagtttccgcgccctgcggacatacctgtttttccggccttcctgtttcccggagccccgggcagtgatatagtgccgggataaaaccggcgcactgcccggcggctgtttcccgaaccggagatgattttgaaaaaacacccagaggacgcccctttccggcagtcacccgcggataattgcagattcacttttatcgatctttttgccggcatcggcgggatccgcctgccctttcagcaacagggcggtcgttgtgtgtttacctctgagtgggataaattcgcccagcgcacctattttgccaatttcggtgagatgcctgacggcgacatcacccggatcgcggcaaaagatattccggatcacgatattcttctcggcggttttccgtgccaggcattttcacaggcgggtgcgcgtcaggggtttaacgacacccgcggtaccatgttctttgaagtccagcgcatcatgacagagaaacggccgaaggcgtttctgctggagaacgtcaaacagctgcgtggccacgacggcggccggacattacagactatcctcgatattctgcgcggacagtatgaacagactgtgccggataatattccgctgagtgaagagacccgcagcgcgctgtcgcaaaaactgaactattgggttgatttccgcgtgctgcgtgctgccgattttggtattccgcagaaccgcgagcgtatttttattatcggttttgaccgcgaccagtttccggatgcggactttgacaccttattttcctggccggaaccgactcatcagcctacctgtctcggtgatattctccagagcaaaaaagcgctggcggaagatgcggtgcgctataaaaaagatcgttttaccatctccgataaattatgggccggccatcagaaacgcaaaagagaacataaagccagaggtaacggcttcggatattgcctgtttaataaaaacagcgaatataccaataccctgagcgcccgctattataaagacggttctgagatcctgattgaccagtcgcgggacggtaaaaacccgcgcaaactcaccccgcgtgaatgtgcgaacctccagggatttccggaaaactatattaccgatgctgtttcccaggggcagatttataaacagttcggcaactccgtctgtatgaccgtcgtcgaagccatagctgaacaactcacggcggcattagtccgggccggtgcaataccgccggtaaaataatcttccggcggcgcggcacatattttcccggcgaaatagggtaatctgggtttattcctgaaatcagcggctgaaaatccgatggatgtacatgacaaagaaacccgttcccggaatatgcgcgccatccgcaaccgggataccagaccggagcatcacgtcagaaagctgttgcatcataacggcttccgtttccggttatatccggcagatttgcccggcaaacccgatatatggatggcaaaatggcggacggctatctttattcacggctgtttctggcacatgcacgattgtgacaaattccggcttcccgccacacggaccgcattctggcaaaaaaaattatcagagaataaaatccgcgatgaaaaatatatcgcagaactgcaccgcatggggttacgcacattaatcatctgggaatgtgccctgaccgggaaaacaaaattatctgacccgatgctgctgacattaataaaaacctggctgataagcagtgctgtttcaggcagtattacggactccggattaactatcacgccaggctgataccttatgacacgcacccagcgcttactcaccttattacagatcctgaaagagaaccgttatccggtcacggcggattccctcgcctcgcaattacaaatcagtgtgcgttccgtttaccgggatattgaaaccctgcgctgccagggtgctgaaattaccggtgaagccggtctcggttatcagatgaaatccggattactgctgccgccgatgatatttgatgtcaatgaactggaagccttaattctcgggttacgctgggtacagagtaatgcggatgatgagctgaaagcctccgctgcccgcgcggcaaataaaatcaacgctgtggtggaacatgaatcccgcgccgtattcagtgacagcacattatttgtgcccgcctcacagctgacacaggtcgataatatcattgccggggaattgcgccgcagtctgcgggaagagctgaaaatcaaactgtgttatcaggataaagaggcccagaccagcaaccggattatctggccgattgccatcggttatatgaaagaggtgcaggtgctggccgcctggtgtgaattacgtcagagctaccggcacttccggctcgacagaattcaatcctgtaaaatattaaccgataaactgccgtacccgaaaaaatacctgctcgaccgctggcgtaaagaagtcctctgcatccctcctgacagattctgacactcccctcacctatgatggtgcctcaacacactaaacaggagagcatcatgagcggactgacactttataccaatgcaatgtcacgcgggaataccgttgatttatttctgaaaattctggatgtaccgtatcagcgcgtggaactggattatggtgcggatatgcataccccggaatatctggctatcaacccgatgggtaaagtgccggcattaaccgacggcgaccgtgttatcactgaaacagccgccatctgcatgtatcttgccgataaattcattgaaaaaggctttgcaccggcgggtgatgctccggaacgcggcacctattcccgctggtcccttttccccgccggtccggttgaagccgctttcaccgccaaagaaatgggtctggttctgacagaagaagaacagaaaatgtcagggttcggctcctttgaccgcgtaatggcctgcctggaaaccggactggctgatgcggcaccgtatttatgcggtaacaccatgaccgctgttgatgtttacatcggctatttcctgatgttcctggccaaacatgacttaattgccatctctccggccatgaaagcgtatttagacagcctgacgttaaacccggcatttgccgcggccttctctggagaataacagcaaccctccctgccataaggcggatgcaaaaatacagcatccgccatttatgcactttcttttaccatttatccgcagtacagtttccttattaatatctttacggtaactcaccggcagaggaaataatgataatgcataccctgaaaataattgcattcccggttctgctttttatttcggcttccggttttgcacaaacagttactgcctggggggatacattatctgacgcagaagccaaaatagcccgccaggcagaaaaagccggtagcggatatcagataaccagcgccagagtcggctgggttacttatgttacagccacactgacaccattaccggaaaatacacgcaatatttcacctgacgaaaaccaaactcagaataatgcgttaccacaaacggagaatacccgtaaccgctggctgacagaaaaataaatataccggtaaatatcctttccgggtgtaaccacgacagatgtgttacatccccgttaaataaataaaaatagcagtaaagataaaaaaccgttaaacagatgcattgtaatacttactgccatcacattaccacttcattatccccttcaaaaacacgcattttaaaccactccaaaaacacaataaaacccacattttattgttattaatctgccggtaaaaacaatattcccccggggaaaaaacacagcgataaatacggatttcaggccctgaaaagcataagaaaccggattccgctccgccacagtaaggaatgttgctgattgctatataaaaagccaataacgccgggaaaaacacgtcatacggtaaacatcagacaaatgatctgccaaatctgaaaagaaaagtgtaagtatttgtgtgaaaagtatcacacttttacgagcgcgatccggaaaactcgaaccatgattttcccttcttttcatttcagtcaaaatgacgggttacaatataacgaattgaataagatacaaaaaatagaaaacaataaacgcaatacaaggatttttacttactcagccaatatgtaaaagatcgctaaaaccgatcaataatcaattgatgatagtttttacctatcataagtgaaatatcgatcgttaataacaattttttatgttttcacatgtcttgtatatttcattaccagatggtaattatttatacgcagcagacgggtaactgcaattaatattattacatccggatttgtaataatttattacaggatattgcgatttttgttttcgcgttaattaatatttctccctgcttaatcagcaccgctgtcatataagtaaacacatcacacctgaatcctgttatggcccggggagtggaatctattatgaaaaataatcagatattactgcatgatgtaggcgcgctgatccgaaagttacgtaaagaaaaaagaatgagcggcgttgatcttggcgcggaactgggaatcagccagcaacagatctcccgctatgaaaatgccacgagtgaaatatcggtatcaacactcattaatatacttgctgtatttaatataacacccgctgaattttttacccgtatatctgatacgaaacatgattttttcagcaaatacaccaccgggaactggtaaataccagccaattagtccgttaattattgttgttatgcatcaggaagatacatcctgtttcctgcctcacatcaataataatgataataaaaatatcttatttacataatttttatgtgtttttggaaaataaaaattatgaaaaggaatgttatgaatattaacctgtttatcaggggatatcagcgatccccccgttccggatataccgccctctcactgcggggctggttagcggctgccgggcttctcagcctgagtactgcggtctgtttacagaccgcgcaggctgcggatatcggcagccagagcggcaccaatattacggttaacgacggtgaccggatcaccggcgataccggggatgcgtccggaaaccgctatggtgtcctgaactcctataacaacggtgccggaaccatcaatctcggcaataacgtgactgtcaatgtgacagacacggacaaatacgccaaaggcgtggttattcagggaaataacagtgtattaaacgccaatggcttatccgtgaacgtaactggtaaaagtgccatcggtgttgacctgtccggtaaaaaagcagaggccaatctgggaaccggcagcagtgtgaaagtggaaggaaccggtaacggcatggcaagcggtgttgtggtcagcaacgcctccaccctgaccgctgaccgtctctctattgaaaccaaaggtaacagcggtacaggcctgtctatcgcagactacggcagtaacgtcaatctgggcagcggcagtacgattaaaaccaacggtaccggaagctatggtatccgtatcgacggcctgaacggcaccgcatccaatggccccgcctattttactgccactaatctgactatcgatgcacagggttcaagtgcatacggcatgaatatccagagaaactccattgttgatctgggtactgacagcaaaattatgaccaacggcgataacgcccacggtatctggagctttggtgacatcaaagcagatgccctgacaattatcgcccgcggaagcaatgccaacgcgctggaagttcgcggcggaaccgccaatatcggtgccggcagccatatgtattctgaactgggcggtggtctggtcaccaacggctcaggtacgaccatcaactttaccggtacggcggataaccgtaatactattttctccggtggttcttacggtgcgtctgctcagttttccggtgctaaaatcaacctggcaaacaccgatattacgattgaccgcaacggaagcctgggtctgggactgtgggcgctgggcggcggtgtcatgaccggtgataatatctcggtaacaggtgccgcaggcacccgtggtgtctatgccatgaccaacagccagattgatctgaccggcgacctgaccattaatatggcaaccgcagatcagatagccattgccacccagcacaatgacggctatgccgccagccggattaatgcaacgggcaaaatgctgatcaacggcggtattcagtcacggggcggcctgatcaatgtggatatggcttccggctcacagtggaccgggaacgcttacagcgataacgtcaacggcggcctgctgaatgtcaccatggacaacagccgctggaatgtcacggatgattccaacctcgataatctggtactgaataataccaccgtcgatttatcgcacagattatccgacaccggttactcaacactgagtatcgccaacctcagcggcaacggcgcattcacgctgcggactgatattgtcggtgacggtgatggtgtcaacaacaccggtgacaaactggtggtaaccgggaccagcgccggtgattattcattaactgtattaaaccgcggcagcctggccacaaccgggaatgaaattctgaccgttgtggaaaccgcagacggcgcagccagctttacttcaacgtctgaagtcgagttaggcggttatctgtatgatgtgcgcaagaacggcaataactgggaactgtactcatcaggtgcctacgttccgccgccggtagtcccggatcctgatccggaaccagagccggaaccggaaaaaccaaaaccaccgatcaccaccacggcggatgcaggcggtaatttcctgaacgtgggttatctgattaactacgcagagacccagacactgatgcagcgcatgggtgatctgcgtcagaacggcggggataataatgcatggctgagaggcttcggcggtaaattcaactcctttgccggcggcaaaatgagcggattcggcatgacctacggcggtacacagctgggctttgataaacgtatctcaccggacacaccgctgtatatcggtacctttgcgggcttaacgcagggctcaccggactatcgcggcggggacggcactgtccgctcataccatctgggactttacaccacctatatggctgacaacggtttctatgttgacggtattgccaaggtctcccggctgaaaaataaattcagcgtatcggacagccagaacaataatgtcagcggcgacggtagctcaacgggtgtcagtttatcagcggaagcaggccggaagttcagcctgagccagaccggtaatggtttctatatcgaaccacaggcgcagctgacttacagccatcaggactcaaccggtattcacgccagcaacggcctgaaaatcgacctcggcagctacgattccaccatcggacgcgctggcacactgatcggctatgaaaccaccaccggtgacagccagatcaacgtttacctgaaaaccggttttgtcagagagtttcagggcaacaccgactataaactgaacggctcccgcgaagcacacagcttcaaaggaaactggtggaacaacggactgggcatcagcgccaatatcagcaaaaaacataccctgtatgcagaagctgacagctcaaccggcaaccggtttgatcagtaccagattaacggcggataccgtttcagcttttaatctgtgagatgctgtaagtaaaaagacgaagagggatcttcgtctttttttgttttcagggaggtctggtttacagcagatatcaatgcggtaaatataatcaatattctattgaaattgttataatttttgtaacagcaaacgcgctgaaaacattgaaaattttcaatttttgagtatgttaaggatgacaacgggataataatcatcagggagaaatgatattggtcgatgctattttttctgtctataaatacattgatatcacagtgatttttatcacctccctgttcatcctctggctttcatccatctcacctgaccggcttttacgtattatattgtttctgttatcactcctgttaatcacaccctatatttttctggccgcttatgtggcgcttatactttcggtgagtctgatgtttgtgtgaatgtgagtataaccagacgaaaacatcagtcttttcctcctgttaacgtgacactctccattgaaattcaccggttttacgagcatgatcgcagttatataaatatgttacccggttcattcttatcatgatatctcccgaaacactgcaatccgccatcgccagcatttcagtgtggcgccagggtgacgtatgcgcaccccataaacccttactgctgttgtatgtgctttcgcagtataaggcggggcatccgcgcctgttcaattatggccgggaaatccacgaaccactgacccgcctgctgagagagtttggacccaagcgacgcaccgattaccctaatatgcctttctggcgtctcaggagtgatggtttctgggaaattaccgatgcggaaggttgtaaacaccgcaggggtaacacgcagccgacaaagaaagagttgattgataatcacgtatcaggcggctttgacgaagccgcttaccggcaattacgcgaacatcctgaattaattgataagctggcccagcaaattctgacaaaccgttttccggaaagtattcagcggatccttgccaaccagctgggcctggattttgttgaccggacaaaaaaccgcgatccgcatttcagagatattatactacgcgcctatcactcccgctgcgctttctgcggctatgacctccgcctggatggcgcactggtgggtattgaagctgcgcatattcactggaaagcctacggcggcccgtgtgtggtacacaatggtctggcattgtgttctcttcaccacgatgcatttgatatgggcgctttcggattagatgaagatctgactatccgcatctccgccggagtcagccgcagcccagtcgtcgacaatctgttctggcagcgaaacggtcagatattgcatcttccgcatgatgaatccttatggccagcagagcaatacatcggctggcatcgtaagcaggtatttaaggtgtgaggatatggcgtcttctgacctctcccctctcttcagtcgtggggggaactgagtcaggtcaaaagtgaagagatccgccggacgatctctaaatgtgaatggctcaattatgcgggatacttacaaaagcacagcattgaccaaccgttatccggcggaggcaagaacagatcagggccctgcgtttgcctgccatgctctgaactagtgggtatttgaacataatgttgagcggcggcttattcagctagataagccgacgcagaatgggttcatagatgttgttcatgtaagataaattataagcacatggtagcaggactaaaacgacggccggtcccattcttccctgcattatcagatacatccacagttcaccgtgggatggcgaaacggagaatacggaagtaaatcaaccgacattactaattgagtgttatatctaatcttgggggcaggtcaaggacgacgtgaaaggactttaggttaggttcctagtggtgtttaatggatacgttatgtggattatggcagactaacagtaactaaaaactcaaaatatcccagtctgagattcaaatgaaacaagaaaacatcattcaaaaaatttgggggttgtgcaacatcctgcgaggagatggtataacctattatcaatatgtatcagagctaagctatttgctttttctcaaaattgctcaagaaaacggcacagaaaaacttcttccggaaggcttccgctgggctgaccttgctgctcatcatgaagacgggcttttaggattctatcaagagatgctaacccatttaggggcatctgttgaaaatgacgtgatcaaggcgatttatgcttttccaactacggtgttttctcattcagaaaatcttaaagccgttatcgatggcatttcacgaatagaatggcatcaggttggtaaggatggctttggagatctttacagtggattaattgataaaagtgcccaagacacccgatctggagctggtcaatatttcacaccgcgacctttagtcgaaactattgttaacttggtgcaacctaagcttggggagttaatacaggatccagcatgtggaagtggtggctttttggtttctgcagacgggtatattcgtagaaattatacggaaaagcaatacaaaaataatacaccaaaatattatggtgttgaaatagaaaaaaatactcgtcgtatctgtttgatgaatactttcttacacggattggacgcagatattatctatggtgatgctcttactgaagatgcttctcaacttgaagccgctgatgttattttagcaaacccaccttttggtagcaaagctgggagtaaacgtccactccgagatgatattccttttccaaacaccaataaacaatttgcttttctgcagcatatatatttaggcttaaaaaaaggaggaagagctgctgttattttgcccgataatattcttttcgaggaaggggttggtagcttagttagagaagaattattggggaaatgtaacttacatactatccttcgtcttcctacaggtattttttatgctgcaggtgtgaaaacgaacgtcctattcttttctagaaataccgataattctaaaggtactgaaagggtatggatttatgatatgcgttcaaatatgccgaggtttggaaaaacatcaccacttgaagtaagtgattttgatgattttgttacatgttttggtgaagatccttttggattatctcatcgtaaagatcttggtgagaaagaacgatttaggtgttttaccagagaagaaattgacaagcgaggtggaaacttaaatatttcttggcttcgtgatgatgaatctgaggacgaaatgactgatctcgataatattgcagcctcaattattgagcatcttaattctgctttactcgaaatcgaggcagtagctaatgaaattgttgagtccaaaaatagtaactaattttcaaatctaaatatgattttatatagaaacacatttttcatattttaatgtattctaagtaagagaaattagaaatgttaaaaaaccaaaatcaacttacgaatacaaaactacggatttgctacatgataaaaggcgtagagaatgagtgaagctcgttggattgttcctaaaaactgggaatggacaactatctcccagattgcaaaggtcgttggaggaggaaccccttcaagtaaagttccagataacttcaccaaaaatgggattccgtggattactcctgcagatctaactggttattcaaatacttacataagtcatggtcgtagagatttatctgaaataggctatgcttcatgtggtgcaacgcttttacctattggaactgtgcttttctcctcaagagcaccaattggatattgcgtaattgctgcaaaacaattatctactagccagggttttaaaaatattttacttaagaaagatattctccctgaatatgttcgctactatttgttaagctcaaaacaatatgctgagagtttagctggcggttcaacctttcttgagttatctgggcagcgtatgggtgaaatagccattcctatagcaccttttgctgagcaaaaacgtattgttgaaaaagttagtggtctgttatctcgtacggcgaatgctaaatatgaattagataagattcctacactaattaatagatttaaatctatattgttaacgaatttatttgatagtgaatcaactaataacgttgataaaattagtttaaaagacttagcgatctctgcacaaaatggtattagcaagcgtcgtggagatacaggaagaccaataaatgttcttagattatcagatttatctaatgctaaatttataggtgagtctcctagaacgatagatttgactgaagttgaagaagaaaaattcacattgcatgacggggatttactttgcataagggtaaatggtagcgagaatttagtcggtagaatgttaacatggaattcaaaagaaaaatgggctttttgtgatcattttatacggtattctctagatacaaaaaaggtcattcctgaatatattgaatatttcttctcaacagataaaataagaaatattatcgagacttcgttcgtatctagcgctggtcagaaaaccgtcaatcagagtttgataggcaatatatcaataccgataccaaataaaaaaattcaagctgaaattgtgctccgcattaaaaataatttgttgtggctagatcaagtagtggttgattgtaatctcagcaatgaaaagctttctaagctagatgcaggaattcttttaagtgcttttaaaggaaatctgacaacacaagattcaaatgatgaggttgcagaattacttctctccagaatagtatcagagagaatttcggtccctaaaacatcaaaatcaagaaatagtaaaaataagcctatgataagtgatcctaaagctcgccttttacaagacagtgaaagttggccagatagaggtcttcccttcgatgaggtagccaaaagaactccaattccgcatgacactatgcgcgatatccttttttctttattatctgaagaagaacctgagctacaacaatttttcgataaagatgcaaaatgtatgtatcttaagcgggtgaaaaaatgagactccgtcgtttaaaaattgaacgttcttctgcaaatgcaggcctatttgacggtttggatgtctggtttgggcgcggggacgatgggaaaatggatgcttcgtttgcgcctatttgcctaattggacctaatggatcggggaaatctcagttcttacagcttttagctgagatttttcaagcagcatggtttgaacacgctcctacagaagagcgtaagagcgctaatgatgatgttatttttgaactaacctatctaattcgaccagatattaatagtgagcctgttgaggttactctatttaggacaaaaaaagggcgcggcgtaggcccagttgaattactttatagcgataaaaaaattagcattagggcgggtactaaacaatttgggaaatttttaccatcacttattattggttacacctcgggtgacaatgaaactttaagtttaccatttctagttagtaggagtggttatgctgaagatgtagctcgtgctgctttaggtgattcaacaaaagctagagtagctgataatcggctagtgctaatagattatagtaccaaccttgaagttttgttctcgaacctgatgcttggagaggaaaagtcgcgtaaggaaattttagctcacgctcgaatttcagatttagcttcttgtcgatgcgttgttcgtcttgctcatcctgtcattaacaaagtttcaaaatcgcagtcattaatttcaggaagaaaaggtattcagcttacacccgaacttgaaaatatcattcaatctctgaagaatacagctacgtgctggagtgaggatgcgaagactgaaacttacacttttgatttttttattacacaagccacaagggacgcattctctcatttttggaacgacgctttctcgctctatcgggatttacataagcttgcattactaaatgatttggctatacctaggcctgctcgtaaaagattagagcgggcagtaaaagagagaaggtttgcatcaagactacctgtgccgcagcaagaggatatggtatttggttttgaagaagttcgcttttggcctctagaggatagcagaaatgcggttgactatgtttctttatctgatggggaacatcaacaggctttgattctgggaacatatgcgatgatctccgaagaaaatgctctttttttacttgatgagccagagtcacattttaacccacaatggcgagttaaatttgtacagcgtcttatggatttaggtggagaaagagcaaaacaagaaatgctcttgacttctcatgctccctttgtgccatctgatatgcctaaaaaccaaattttaattttctctcgtccaaacgggaaaattgaagttgatgagccaaaaatagagacttttggagcggcatttgaccgaattcttgaaagttgttttgacattaacccaccgatttcaaagattgctgaagaaaaaataaatgagttactcgaatctgataatatatcagaaatagaagaaaaccttaatgaacttggacagtctgtagagaaggcttttttggcaaatcacctaagaatgttaaagaagaatatctaatgttgtttacttattcacctaatgcacttgccgaaaactggttaaattctgctatagttagcattttaaatgaaggtatgactaatattctttctggacaaagaatggtttcttggccgagaaatataccgcttgaacacagagagttattgcataaccgacgtggtatccgagatagacttactgtgttttggcgtgagtatgctaatttagagcgacaacatcaggaggctctgctggttgctatgcgcgagcaaacgtctttgcctgaagttttcagtaatgatgcagtatgtcctaaaattgatacattccctgacgttatcagagtaattataaacgacttgtttcgctttctctttgagaaacaattgaatagtataattgttcgtgagaaaagtttacgtgatttgcattatgaatcaatctattttagcgtacccagccatgtatgccctttttgcgggcttggacatttaagagcccctggtgctccaaggcatgctcttgatcactatatgcctatttcaaagtatccttttgcaggcgctgatttacgtaaccttccaccaatgtgcagcgaatgcaattctgatttcaaaaaagatactgatattctgatagatgagcatgaatcacggttgcattgtattgacccatataatggtcccgtgttcaatattagcttagctgaaagtattccttttgcgggaaggattgaaagagctattagattgccccaatggattattggtttcgttggtgattctcaggattatgctgaaaattgggatagggttttcaaaattcgagaaagatatgagagagatgtattaaatgctaatttcaggtcttggttagaacactttgccgtttggtattctaatccacgtactaggaatacctatgatgatataattgattcattctccgaatatattgactctgttattcaggatggatttacagataaagcttttttaaaagttgaagttttcaatctaattaggaatgaatgcgttcaccccgaacgtggggaggacatgatagcttttctgcaacttctaattgataatgtataattttagcttattgtttcatgtttggatatctctggaaaagcttgtctgaaattgagttcttgatgggggatgatgtgagtttatactgagctttagtatgatttttttacaatggatttcacccctattccttcttttaggagtgattatgaatattcagacaagttatgccaagctgtctcgtgctgatatcattcgctccatagcagcacctaactgttaatgagataggttagtcatcctcgaagatagaagcttccgctgaacctacgcgcaaaaatttacgtatttacgtcttgcggtttcattacttcttaatgcttctctgaccctgtgcctcattggctcgtagtttattgataaacctgcatggattgccgatatataccggcttcatttttctccccgctatgataaaccagtgggttacatccttccttaacggacatcacgtcggctaatatgtaactatcccagaaaaaaatgccattcactttcagggatcttcatccatgcagcttagatactttacctattttatatgcataaaaaaataaagcacatcacaatagccatctttacgcccgaacgtaaggatggctattaaatgttacataaaattcacattaacaacattatccaaacttccctccaactcacccatgtagtccgcataccactgcatcattttcctgttttcatccatatacttagcatagttatacgttccccgagtagagtttttatcaacgtgggcaagctgagtttcaatccacgctaannnnnnnnnnnnnnnnnnnnnnnnnnnnnnnnnnnnnnnnnnnnnnnnnnnnnnnnnnnnnnnnnnnnnnnnnnnnnnnnnnnnnnnnnnntgctttatgaatgtaagccgcacgcacagagctacgctcctgatggctcatctacctttctaccgcatctctcgaccacaaacccgattcaatcaatgagctacaagccatcgccctgaatccatgcccacagacctccgttttcgtgtcataacccatcactctcagcgccttattcaccgtgttctcactcataggcttacgcgggtcgtgatcaccaacgaaaattagctcacggtttccactcatgcttttgatcttttccaaaattgcgagagcttgtcgcgacaagggaacaagatgcggcgtcttcatctttgagccactctgagaatgcttaacaccgtccaacggttcacgctcacccggaatcgttcacatagcagtttggaaatccacttctgaccagcgagcaaatcgcagctcgctcgagcggataaagactaacaaggtaagttcgacagcaagtcgggttaccgtcaccatcagtgagcttataggcttttgcttcaggcttagccgaacgaaccttcacatcactcagagccatgatgagtatcctttcaagggttctgtgtgggtacaaagattatcgaaccgggctatacccgcagttgtacccatatcagtaagttaatgtagattgaatcaggttgtgaaaaatcgcagaaagtcttgtatgacatgaatttcaggcacaaaaaaagccacctcgcggtagcttgatttcacttaagaatgcgaaggccggactcgcaaagtgatgtcaacacattgttttacattaaaatacttaagttaagtaaaaattatatactcaaatgtatactcattgatatttcatgcgataaatacaaaaaaataaaagaaacaatttcctgcgccagcctgctgccaacgcagtaattgtatcagttatttattaatacagtactacgatttcatattgattgacggccagagcaatactcatacattttctccgtcatcacccataacgctttattcagacggatatcaccatcgatacccgtcacggcccgggtgtgtgatcgtttccctttggctgtacgtccggacagtccgcctttaatcaggttctcctgcaaacgctggtacaccgtccacaggtcatccttcttatcttcccaccggcgcggttgcagcacctgctcttcggtgaccggctggtggtcatccccgaaccggtacgtgatagcggcatgcgccagagcctgttgtgccggtggtggtaataacagcgactgcatctgttcccgtttatcagccaccgcatcaaacgtttccagtacttcatacgccccttcaatcactttatcgacgacattacctttgtgcggcactctgacctcaccaaaggtatcaccgcagaccagaccgttctgacagactgcacggaacaatcccggcagcatctgataactgctggtgccgtcatggctgtttaacaaaataatttccggtacccggacaccggtgatctggttatgacggcgaaggcgcagcatatgcttggtatgctcccggcggctgtcatcacggacacgggtctggcaggcaaagaacggataaaaaccttctttctgcaggctctcaagcagggtgatggtgggaatataggtatagcggtcactacgggattcatgtttttctgctgaaaagacactgggtacagtgcagtataattcttcggtggttaacgggcggtcacgacgaatgatattcaccctgccgaagcgggaagctaaacgggtcataataatactcctgtagaataaacggataaaagggtggtcagataaaaaccgggactgaacgggataaaggaagagataagatgaagtgctgcagataccggctttttatacggtaacgggtctgcgggtggcatagctgctgtggtgagttatcaggccggttgccttccgtgcccgcagaatatcggtcgcagtgatgccgtgtgacggctcagtgatactgttgttgcgccggtcagtgcggaccagtgcgtatttctccgcaaaggtattcagtgcctcacacaacgatataccccggcagaggcaggcctcaatcacgcgctcatcgctgaattccgtgtcgttcagagtgaggccgtagtgctgttgcagcaggtaagtcagcagtgtctgccagactgccgccggtgacgcgggtactgctgtattgttcatggcgcagctcccggttaatcgataagacggaaaatggcagcacactcctcatgctgcagggcgtagtcccgcaactgataaaaatattccaccatctccggactttcggttttaaatgaccagagactgtaagtgatgagacatactgcgataccggccgcttcggggctcagttccgcgtcattgccgttatgcgggttaaccatcgggagtgacgtttcaattatgtcaggccagataaatacgccgccgttggtgagcatgctgaactcccagaatgcaccgtgataaatgtcacacagattatccattatcttaaaaatatcgccttccaggcgctgccagcccggcacgctgccgaaataaaaccgccagaatgtgtctctgccgcggggatgaaccagattgcttttgatggctgcgggttcatgcagcggaagtgctgataatgtcatcgtgaaactcctttgtgtttaggggtaaaacagtggattactgatttgtgagtggcgcataaaaaaacggcagactgtgaacgtctgccgtcaggggtgatgtaataaccggtcttctgttcaggtcagcggggaaagagccgacccagcagacggtcaagggtaccgcccagcacggctgagcaggccagcgcggcactgaggcctgccgccactttttcggctgtggtggcgttctcattgtctgccgcctcagccgcagcctgccaggcacagtaagtagctagagccaccgttgccacaccgagtgtggtggccattaatttaaagacagacatctgtgtttcctttttgcatgcctcagttactgcggaccggaccagctgtcggtctccatctgcaggaaggattcacagtcgccctctccggctttgcagacccgctccgcaatggatttcggcggccatttctgattcccttcatactccataccgttattgtcgatacaccccaccctcagccagtctgtccgggcgccggtattataataaatgctgctgatacaggtcattgccaccggtgcagggtgtcctttggaagcgccaacgttcatattacttctcagtgctccgtgaggaattggctggaacgtagatttccggcctttgccgtcgttcagcattttcagctgttgcccgtattcgggggtcaggtaataagtgtaacggtcaggctgcacctcaccgggcatgcgcagtgcaaaaaccggtgcggacagcagtaaacaaccaagcagtgtcagacttcttttcatagtgacatccttattaaggtaatgaacggataaactgataatggggtaatgcggtgataaattcgggccgggtgactgtccgtgcgataaccgcatcctgccggaagcggcgtccggacacggcaatgttctgcagctgactgaaccggaacacccgcagggcagactgccattccccgcacagataccagtcccgctgaaaataaatcagcttgtagggcgccataccctcatagtcctgaccgtcacagcggaagctgagcaggcgcctgcggacaatcgcctgtgtcaccacataaaagccgccgaacagtgtcggggcgtattgcggtggttcatggtagaccagacagggggcgccgttttccggactgagcagaacggacagcagcctgcggtcaagcgagggaaacagcggggtgatatgggtgatatcggcaaagtacaggatatcgctgtctgtccggtacgagcgctgaccggcggccagccggtatccgccctgatacggctcagtgtccagaaagaccaggcgctcactgaaatcccgctgcagtgtgcgggccgagacattaaactcacgggcgagctgtgccggatacagcgtttcgccgcggaacaggcggctgataatcatggccagccggaatgcaagccggtcatggcgtgaatctgacgtatgcatgagcgcagcctccgtgagtcagtcagataaaaagggaataacggaatacggaaatcaggccgccagggccttctggcgcaggtacgccacaatgatgcaggcgggaatggtgacccggtaagcgggaccggcgatatcggctatcagccatgcggagctcagcgcaattccgacaggaccggccagtatgcccagaatgcgggagccgaagaatacagaagccattccggccgtaccggctgtggttgccattccccccattgcctgtatcacgccgaaagaggcgatggaagcgagttccagcgcagccaccccggagacatttaccgctgcctgcagagccatcatgacgagctgcggagtgggattagtcaggttgagtttcatttcctgtgacagggcagccagtgcagccggggacatatcactgatgctggttttcagtatctgcatcaggaggttgatttcagctgtttctgtactgtcctcctttacatgctttactttcattctgttgcagacatccatcagaatttcacggtagagcacacctttgttgccgcgcagcagcgtggccagactgttggccccgaaggcctgcagttcggcacagatggcgggccagtacttctgatggtcagggtaaaagagctgatattccggtgaggcagtcagagactccgccagacgctttttgccgtctttgctgtcgtgtgtcagaacggagaccagcagaccaaggtcctcattgctgcactgacctataaacgcgaggtcagggtcgatacggtaagttgccataacagaaattccttacagggttatttaagacaaccacagcataacaaaggggtctgacagggtatgacgcggaaaatcggtattttcgggggataaaaaacggggaaacgacagggggtgtcgccggccagttattctgaccgatatttcccctgtcatatcagttagttaatgtatatctgaaaaattactgattcaggaaaaatatttcgaatactctcctgggtgggaagatgccggtactaaaaaatcacataaaataatttcgctgatataagacgtattatctttttttcaacctgtcatattctttcctgattaaatcagagataatttcagttgtttttttattgctgattctgacgatttctttcagtttttcctttacgtcattactgacatacgtgtttataactttcttatctttaatgctttctctgtaacgaacctgcgaccatgcttttttcattttaataataaaaagctcacacgattcatttgataacagaatgatatcaaagaaaccgtatattctgtttaaagcggatgatggatggtaataatacaacatatcgtcattctctgatctgaaatgaccacgaatatactccagagcccagtcaacttgtgccttgtttttgttttcaatccagaacagccagtctgtattctgattgaaccaattagtcctgatatgatcaataagtaattccttaatactctgtggtatatccagtctgtcaaagtatgattttattgtgtctttcagttgccttaatccgcatggtgtttccggcagccccatattccggatgtggggtgtttcaccaaaagatggataatgatttctgtatcccgaccctaattttactgccagagtctgaaggtagttaccatgtatatagttatgtataaactgaataacatatagtgcaatgcgttcattattgatccagtcaaaataccgatcctctgtcagggattctttataggctatacaagctcgcctgatgaaatctcttctttctttttcatcagtcatgttatttctgattaaatcatttaattcattttcacccaatattcttcctgacctgaacgttggtgacagcgcttcatttaaattacggtaaacataatcagtgtaaaattctcttttcctttgtgagtcagccttaagcatatttattaatccttaactaaagaactacgtagtgtaatggtagtatatttaattgtattttggagtgataaatgtcttctttttgtcataaaaatgtagtgacaatatgttactcaaccctgtgattactatcacctatgcttttattttctgcaaaattcacatggtttgttactatcttttttgttatgaatgaagactaacttttttcagtgcatgagaatagaatcgttcatacataccagccttccacctgaaaccgaaggatatacctgataagcagagaaggattatttattatctttaatttctttattgttgttcttgttattatgttcacttttatgccaatagttatcaattaatagtagccactatttcttatcatatggatacctgaatacagacagaactctctcgttaataacacataaggtattaggtttacacttgatttcttataaatccagaaagtatatttatacagctgtaaattactatcggttaaggtgcacctatagtttatagataatattcaggatgaatatcattaatcaccctttaaacctgtatgttatgaacttcctgtctcagtaaaaaataaaatcccccctcttatatatgaacagaaacaccatcattaaccagagggaattaatcatgaaagacgatataaccggtgaaatactggcgctgtcacaaacctacaataatggcacagagattactgatgatactacagaccgtgaatcactccggctgatagcgttatataccactgcattaattaaaagaaagagtcagtctgctccttttaaagggtgctgctttgctaataaattacatatcaaggccactaaaactggtcagttattttatgaattaatacaaaacattctttcactttcccgtgtcaccggcaaccggcgtaaattacacccggttattccgctgattgtttctcttactgagaaatatcatattcgttatgttccgatgctgtcggaataccatcctttctcagaggaggatattaaacagttaaatgaagcctattgtgaatttattcagtccgtggacagtaaagagtataaaactgctgtcagtacctttaagaacagtgcccgcaagaactaccgtttatgctgccgctatattgaaaacctgtttgagcgccatgcaaagctgctggtggtacggacagacctgtcttacggaaagcgggtcagccacaaagttacagccggggatttaacccgtcaccggattgccctgtataaagcaatacagcggttacccctgtttaaacactgcgtcggttatatcctgaagctggaatacggtcgtgagaaaggctttcactaccactgcctgtttttcttcaacggccagcacgtcagacgggatattacgatagccgggctcatcggtgagttttggcaggaaaccatcactgacggacaggggatctactttaactgcaatcgttataaatcagattaccgtatctgcggtattgggatgttgcgccgcagtgagaacttccggcgggaaggcctgatgaccgctgtgaactatatctgcaaaacagaccagtgggtgaaacttcaggtaccggggattagccggacattctggcggggaaccatcagaaacaaacggcgtaaaacacgccggtaaatcattttttacagacaaggggaatcttatagaagtgatatccgcagcatcatcgatagcacttctgcctttttaattaaacaaagacaggagattccccatgaataccactacttcctcttccctgctcgatgagccacttgtggacatgaaattcatcacccaatttaccggatcaacggacaagtggttttacaagctgatacaggagggccagttcccgaaaccgattaaactgggacacagttcccgctggcagaaaagtcaggttgaagcctggttacaggcccgtattgcggagtcccagagataacttcgggtttttacgtttcctttcctgatgtctgcccagcgctgatacctgtatccaactctctgcttttcgctaactggatcacacttcctccggataacatccggaacattagcggctattcgccgtctccggcactaccggtatattagtccggtatactgtcctttgtttcaggtcacggtataattacggctgcactagcgggctctggatatctcaatagcccgtttactgtacgtttgttagatgaaattttgacggaattggttgaataggggctggcaaaatgcgccgaactcactgtttcagttaaaaagttagagtacagttctcgccaacacgattcactctataacgcatggcttgatgagcaggatcgccagcaagttatgaccacgttgctgaaagagggctaccttgggcctgcctagtcagggaaaatctcatgtttagcatggggataatcagaacaccgatcacggacgtgaactgaccgtgaccttcagtgatggcagtgaacattatgtgttactcgatatgggactgagttactggaattgtacaggtgacacattcttcgatttttcaggacgaataccgaatcaggtcgagcgcttggcaacatgccgggcattggttatagccccgaataatggattgaagagttatatcatcgcaggctaaacggacgctcccccacctactcatggtgggggagttgacctagctcacttttaactatcgctgtttgaaatttatgcgttatttctgcgtattacattccattttatccccctgacgccacttttcatgttatctttaaagccatcttttttatcgcagtgtgcagcgacatatcgctcgggatagtgtcatcaccactgcctcatacagacagaaaaaccgatgaataagcaaaattatgcacctggaatgcgggtggttattcgtgatgcagagtggcgcattcgccgggcagatgacagcggtgatggtggcaatctgctgacctgtgatggcatttcggagctggtacgcggtaaagaagggctgtttctgacaaagctggaacaaaaagttgagattctcgatccagcaaaaacaaatctggtggaagatgagtcagccaattaccaggcggctcagttgtacatagagagccagctacgccaacgcgtaccgactgacagcaaagtccattttggacatcaggctgcgatggattcaatgccctttcagctcgatcccacgcgcatcgcactggcgcagccgcgacagcggatattaattgctgatgcggtagggttgggtaaaacgctggaagccggtattctggtttcagaactgattcgccgtgggcgcggcaaacgcattctggtgctggcggttaaatccatgcttacgcaattccagaaagaattctggagccgttttgctattccgttgacgcggcttgactccgctggtctacaaaaggtgcgtaaccgcatcccaaccaaccacaatccgttccactatttcgataagaccattatctccatcgatactctgaaacaagacatcgaatatcgccaccacctggaaaacgcctggtgggatattattgttatcgatgaagcgcataatgtcgctgaacgtggaagcagctctttgcgcagcaaactggcaaaattgctctccgggcgtagcgatacgctgattatgctttcagctacgccgcatgacggtaaggctgaaagttttgccagcctgatgaatatgctcgacccgacggccattgccaatacgaaagagtatgaatatgctgattttgccgataaaaatctggtcgtgcgtcgcttcaaaaaagacgtaaaagatcagatgtctggcgagtttccggaacgtaatatcgtcaaacttactcacccggcaaccggggctgaagaggaggcttatcgtcgtctggttgagagccagttccgtgacgacgatgatgaaaactcccagtcaaacaaaggccgcttgtttaaaatcacgctcgaaaaagcgttgttctccagcccaatggcatgtgccagcgtagtggctaaccgcctgaagcggcttgagaaccgcaaagagataaacagtcagagccagattaacgaattagagtcactgctgctggcactcaataatattgatgccagtcagttcagcaagtatcagttgttgctggagaccatccgtaacgatcttcgctggaaagcgaacaacacggaagatcgtctggtgatctttaccgaaagtattaaaacgctcgaattccttgagcagcaactgcgttccgatctcaagctgaaagacgatcaaattgccacgttgcgaggcgatcagggcgatacagttctgatggagaccgtcgaaacgtttggcaaaacccagtctccgctacgcctgatcatctgctcggatgtcgcgtctgaaggtatcaacctgcaccacctcagccataaaatgattcacttcgatattccgtggtcgctgatggtattccagcagcgtaacggacgtattgacgctatgggcaaaaacaccagccacagatccgctacttgctgactgaagccaacgaaccgcagatcaacggtgatatgcgcgtgctggaagtgctaatcaataaagacgaacaggcgcagaagaatatcggtgacagctccgaatttaccggcaaatttacccaggaagaggaagaagagcaggttgctgaattcatgatgcaggacgatggtgccagcctgttcgatgatctattgaatagcaatgtcactgaaaattctgaacacgacctgtttggcgaaatctgtagcgcagtgtccagcgatgcttcgaccgtgaccgaaagcgacattagtctgtttgataatgagcaggcatactgcgaaaaaacgctaggctatctgaaggcctgcggccagaccgtgcaatacgataccttgcctgataacaccttatctctggtcgcaccggaggagttacgccgtcgctttagccagttaccgccggaaattgcgccggaaaacgggcagctttatctaagccaggacaaaaccgttatcacggaagccatttcgcgtgcgcgcggtgagcaacatgcctggcctgatgtgctgtatctctggcaaattaacccggtcgtgcagtggttagacgataaaatccagtctgcatttggccgccaccaggctccggtgatgcgcctgccgcacctgtttgaacctgatgaggatcatttcatcctttccgggttgttcccgaaccgtaagtcgcacccgatggtgaacccgtggctggtggtgagttttaaccgcgaaacgttaagcggtagcctgccttttgctgagttcctgaaacgacatccgcaactgagtagcaagctgactaacagtggtggcaaagatcgtaaccatcaacgccagcaggatctgctggaagcggcaatcgcccatgcgcgggatgtgtttgttcacgatcgaaatgcttttgaagagcgtatcaatcagcagctcaatgagcatctacagaagctagacgttctgcgtgggcgtcagctgaatcaactggagctggattttgccgataataaacagcagctttcagtgaaacagagccgcaaagaacaacgtcagcgcgaaatcgaacacaattttgacagctacatccaatggattgaggacaccatgaccaccgaaaaagagccatacatccaggttattgctgtaatcaccggagcggagggctaatcatggcgctggtcggtattaataacgaaaacgagttttactctaaccactatctgggcgaagtctttaccagcgctattcgcgatgtactggaaccctggattaaccaggaaaatgccgctcgcgaagctgaacgcgcagcccgtgaacagggcaaagaggttgaggcgggctaccgcgcgccgtggaaccagcttaacagcctggctacagagtttttccgtaaactcactgaacatgaaaaacagcgccagatcccgctgcgtctagccgatcagcgcagtcgctggcagccgctgttaaaggcattgggttatgaactcaatccgcacattcagatgctggatgacgatacgcctttgccggtactggctcgttacaacagtaccgacggcagcccgtggctgtggattgttgaagcacatgatcaggatgaaggaacgctggatccactggcgctgtcgctgctgaccgcgcagttcccggcagataccgataaacataagcgcgacagtctgcgtaaaaaagcgaacggcgaataccgtagctggcaggatctgctctccacggtggtcttcacgcagaatgaaccgccgcgttttgtactgctgcttggcaatcgccagctgttattgctggatcgtactaagtgggcgcaaaaccgtctgctgcgttttgattttgaagaaattttaagccgtcgtgaaacggatacgttgaaagcgacgtcggtgttgttacacaaagactcgctgttacccggcagcggtgcgccatacctcgattcgctggatgacaattcgcacaaacatgcgtttggcgtgtcggaagatctgaaatatgccctgcgtgagagcattgagctgttgggtaatgaagcgatgcgttatctcatcgacaacgagctggcttattataccgggaaacgtgctattaacccggatgagttgagccgcgaatgcctgcggtatatgtatcgtctgttgttcctgttctatatcgaagcgcgcccggaactgggctatgcgccgatgaccgccaaaacctatctgcagggatacagtctggaaacgctgcgcgatctggagatgatcccgctgaccagcgaagaagatcgcaacgggcgctactttcacgatagcctgaatatgctgttcaaactggtgcgtgacggctacagcggcggcgtgaaaatgcagggcgacctggagagcggcgaccggatcactattcacagccatcagttcagcgtgccgcgtctggaaagccatctttttgaagcgaataacacccgtattcttaaccgtgtggtgttccgcaacgaaaccctgcaacaaattattcaggcgatgtcgttaagccgcccgggtaaaggacgttctaatcgccgggggcgtatctcctatcgccaattgggtatcaaccagttaggtgcagtgtatgaagcgctgctctcctaccgcggattcttcgccagcgacgatctctacgaggtgaaaaaagccggagaagagtttaacgagctggagacgggctatttcgtcagcaaagacgagatcggcaaatacaatgaagacgagaaggtttacgaaaaagacggcagcctgcgtattcaccgtaaaggcagttttatctatcgcatggccgggcgcgaccgcgaaaaatccgcttcttactacactccagaagtgctgacccgctcgttagtcaagtatgccctgaaagagctgtttaatgagcaaattgatccgattaccgatccgcacgccaaagccgacgccatattaaacctcaccgtgtgcgaaccagcgatgggcagcgcggcattccttaacgaagccatcaatcagctcgcggaagcttacctgttccacaaacagcaggcggaaggtcgccgcattcctcaggatcgctacacccaggagctgcaacgggtgaagatgtacattgccgacaacaatgtattcggcgtggacttaaacccggtggcggtggagctggcggaagtgtcgctgtggctgaacgccatcagcggcgatgcatttgtgccgtggtttggctaccagctgcactgcggcaactcgctggtgggggcacgccgtcaggtgttcaacaagagcgagctgacctacaaaaaagcgaaagatccgagctggcttaacagcgaaccggccgagctggcgatgaatacgccgcgcgaagagaagcagattttccacttcctgctgccggatagcggcatggccaactacagcgacaaaaccgtcaaacagcgctatccggatgatttcaaagcgctggacagctggcgcaaagagtttaccaaaagttttgcaccgcatgagattgctgatgtgcagcgcattagcggcaaagtggaagcgctctggaacacatttcgtcagcagctgaaagccgagcgccagaaaaccgccgacagttacccggtatggcctgcggaaaatacggctcaagtccgctcttctttaagcaacaaagatgaaaccttcagcggtcgcctcgaagataacagtacctatcagaaactgcgctgggtgatggactactggtgtgcactatggttctggccaatcgacaaagcgaatgaactgccggaccgcggtatgtggctgatggagatggagacgctgatcgacggtattgtcgtcacggaaagagtcactgaagttgcagagcaggccaccggcaatctgtttgccgacgaggatattgttcgtgaagaatcttcgctgttttccggtgcaggccgcctgaaaactgaagtattgttccgtcatttgccgcgtctggcgattgttgatgcgctgaagaagcagcaccgtttcttccattgggatctggaattctgcgatctgttcgccgagcgtggcggttttgacctgatgctcggaaacccgccgtggctgaaggtcgaatggcaggaggctggcgtgctgggcgattacgagccggagtttgtgctgcgtaaactgagtgcctctaagctggcaacgttgcgtgttgataccttcaaccagataccagccctggaagcggcatggcgcagcgaatacgaaggctgtgaagggatgcaaaatttcctgaatgcgcagcagaactaccctgtactacgcggtgtgcagactaatctgtataaatgcttccttccgcaggcatggcgtttaggagcgcagaaaggcgtagcaggtttcctgcatccggaagggatttatgacgacccgaaaggtgggctgttgcgtgcgtcggtgtatcagagactgagggcgcattttcagtttcagaatgaaaaagggttgttcccgatcggcaaccgtaacaagttcagtattaatctgtatgcaactacagcggcgagtattgggtttagcaatatagcgaacctctttatgccacaaacgattgatggttgctatgtgctttcagataaacctgtcggtggcatcaagaatgatcaggatgattggaatcttgaggggcatccggacagattattgcaaataaacgaagagctacttgagcttttttcgcgactttatgacgatgaaggtacaccaagccttgaagctcggctaccagccctacatgcaatacagctaataacggttttagataagtttgctgcccagcccattagacttggggatttgcagaacgagtatctatctactgtaatgttcgatgaaacctacgcgcagcgagatggcaccattgaacgtaatacgcagttcccaaaagattcgtcacaatgggtattgtctggccctcacttttatgtaggaaatccgctatataatacaccgaaagctatttgcgatacgcataaagcgtacgataacctcgatctactaacgctgcctgatgactatctgccgcgcactaactatattccggcatgtgatgcacaggagtatgccaagcgtactccgcgcgttacatggactgaactgggtgaagatgagccgagaaaggtgacggattattatcgttttgtgaatcggagaatgtttggggcatcatcagaacgttctatgatctctagcatagttccaaagcacgttgctcatatacaccctgtactctcaacgacattcagagagccaataagcctgctaagcttttcagcattttgtcattcaatagtggctgatttttatttgaaaacaacagggcgggcggatatttatgaatctacattgcgttgcttcccttatgttgagctaatgagtgcaaactcaagagcattagctttgaacgtgttaacgaaagattatgccgatctttggcaatcctgctataccccagatttcaacactcagcgctggagccgcaatctcccacaactcccccaggatttcttcaccaacctgactcctgagtggcagcgcaattgtgcattacgctccgactacagccgccgccaggcgctggtggaaattgacgttttggttgcacaggcgttgggattaactcttgaagaactcctcactatttaccgcgttcagttcccggtgatgcgtcagtatgaagctgacacttggtacgatcagaacggccgcattatctttaccccaagcaaaggcctggtgggcgttggcctgccgcgtaccgcgcgtaaagcggacctgaaaaacggttttgtctttgatgtcgacagccctgaatggaccagcggctactgcaccgatcaagccatcggctgggatgatgtcaagcatctgcaaaccggtaccgtcagcgtcacttttgatgactatacccgcagcgacgaaggcgagcgcagaaccgtcacctggcaggcaccttttatcaaacctgaccgtgaagacgactataaagtcgcctggtcattctttgcacaagataaggagagcgcctgatgctgccttccgttgtcagtcggcaggttgccgacagcgttgcctcctttttacgggcagccttcccgcttaacagcccgctgtttaatggtgaagaaaataataacgtcccgatgctggagcaatttctggcccagccggaaacgttgctgaaaggaccgtatctttccgctcagctgccgtttcgtaaaagtgatttatccctgaacttcttccctaacctgacgctgccattcccaccgcacgcgcatcaggcgcaggcgtttcagcgcctgggtatcgagacgcctcagccgacgctggtggcgaccggtacgggttccggtaaaacggaatgttttatgttcccgctgcttaaccattgtgctggggcatcagaggccagtgttaaagcgatcatcatctacccgatgaacgccctggcaaccgatcaggccagccgtttcgccaaaaccatcgccagcgatccgcaactgcatggcaaagtgaccgtcggcctgtttgttggcgacagtgaaatcgaacccagcaaaaagatgtctgcggataaagtcatcacctgcaaacataccctgcgtgagaacccgccggatatcctgctaaccaactataagatgctggattacctgctgatgcgccccggcgatcagaagctctggcgctataaccagcctgggtcactgcgttatctggtggtggatgaactgcatacgtttgatggtgcgcaggggtcggatttggcctgtctggtgcgtcgcttaaagcatcatattggtgtcgatgacaagcgttttacctgtgtggggacgtcggctaccgtaggtgacgaactgggacaactactcgattatgcgaaaacgatctttgatcagccgtttagcgatgacgcggttattcgcgaagatcgctacacggcggcggaatatctgcaaggttataccatcgagtacagtcagtatccgggccaggatgtcagcgctgcgctggatccgcaaacgtacgccagcccggtagattatctgaacggacaaattccactatggtttccggatagttcactgcaattacctgccgatctggacagcgatctcggacgtgaaaagcgtattgagttgggctcattgttacgtcgccacagcatcctgcacgtactccttgaggatttgcaggggggaattttgtcggaacagcagtgcctggaaaatctccaggtgatgctggcggaaagcgccgggcatgcaacccgcgtgctgcaaagcattctggcactaattgcccaggcacgactggaggttccagaaaaacaggaagatcgggaaaagcgcctacaggtgaacaaagcgcggcccgtactgccttttgtgcaactacgttctcagctgtggttgcgcgagatgcgccgcctggttgccagcgtgtcaaaaacacctgagcttgtttttgctgatgatgtcgcggtggaagatcgcgaacattatcttcccgttattcactgtcgtgactgccatgctaccgggtgggcgagcctgcgccatggtcagagcgttcaactcgaaactgatctggacggtatttatcgtcagttcttcgaaaaaggccgttctattgtattggccttcccggataacaacgataaacctgtcagcggtgttcaccagaagttgtgcccttcctgtttaaagctcaataagcaatctaacgtgcagtgtgggcattgtggccatactggtctgctacaagtacttatcccggatatgctcaaagagcgtaaggatgagctggaatttgccaacgaatgcccgtactgcaacagcaaacagggtatttcgattcttgggtcacaggctgccagcctgtcggcggtgatgatccatcagctttatggcagccagttcaacgaacataaaaaactgattacgttttctgactcggtacaggatgccgcacaccgcgccagtttctttaccgcccgaacctggccgttgatggtacgcggacaaatcgccagcgtgttgggtgaaaaagaaacgttaccgttggatgcctttgcggcacgtgtctgccagcagacgcgtgaacgttcaccggatgatgcccattttgccgcgagcttcatcgcgcccaacatgcagtggatgaacgattaccagacgttgaagaacgaaggccagctggcagagagttccgatttaccggagctggtttctcttcgtctcgactgggaggtatacagcgaatttaccctacgcgcacgaattggacgtacgctggaggccaccggttacgcagctgcaggaattgatgttgcacgtttcaattcagcgataacggcgcttcaccaacagcttgtcgaagagctgggtgatgaaatggttggggtcagcgttgagcaggtggcacacctggtgattggcgttctttggcatcagcggcaggcgggagctgttctgcatccggcgttcgaaagttatcgtcgtgagggtaagacctttatgatgacacagaaggagagaacttcacgctatatgccatctattggtccgaaaacgcgtaaaccggcctatgcctcgtttgaaaaaataaatggcttccatcgattgattggtgcgaaatccaaccccagctggtatcagcattggatcaaccgcacactcagcaacggtaataatctgtttatcagcagcctagcagagacggttttacgacgtctgtttgcggcactgaaaatggccgggttggtaaaagattttgatacaaaaggcaaagaagcatgggggctagtaccttcggcgctggtggtgagccgcgatgttgttcagctaaactgctcttgctgtcgtgaggttgttcgggcaccggccgatcaggggtggcactggcgaaacgcgccatgtctttctctgcgctgtgaaggccgctatcaggaaactgaaaatacagtgacctggcactgggataatatggacatcgctcgtgttcagggggcagaacataccggattactgagccgtgaagatcgtgaggctacggaacaatcgttctaccgcggtaatcagccatggaatatcaacctgctttcggcaacaccgacgctggagatgggtatcgatgtgggtgacctttctacggtattactctgttctgttccacccgcgcaggctaattacttacagcgtattggtcgtgccgggcgtaaagacggcaatgcacttaacatcactgtggctgaggggaacccgcacgatcagttcttctttgaagagcctctggagatgatgcaagggcaggtacaggcccctggtgtattcctgaacgcaacggctatcctggagcgtcagctggctgcattctgcatggacaactgggtgaaaaccggcgtcccggcatctgctatcagcaaaaacgttaaacagatgctggacgagctggagtttggacacaaatctgggttcccttataacttcctgcgttacgttgaacagcatcatgtggatattgctcaacagttttcgtccatcttcccagatcttacggaagatacacgtctacagctactatcatatttgcaagggacaccagggcagcgttctctggttcaacgtatcgaacaaacattaaaactgctggtggaagatcgcaaatcgttgcgttcccggattgataaactcaagcgcagtatcgacaagctggagagcgacccgcacgatcaaaactttgacagcgatatgcgcgagttgacatcggaacgccaggcgctgatggcgctggtgaaccagatcaacaacaagcaaacgcttaatttcctcaccgatgaaggattacttcccaactatgccttcccggaggccggtattacgctgcgttctgtgctgtggcggcgcaaagacggtggggaaactcgtgagtatcagaacacgacctacgaatacgaacgtccggcttcaacggcgctggctgagcttgctccgttgaacaacttctatgcgggcgggcataaagttgaaatcgaacagattgatctgaaagtgtctgagcctgaaaactggcgtatttgcagccactgtaactacagcgagaatatcgatcagaccggcgatcagcataaatactgtccaaaatgcggcacaccaggttgggctgatgccgggcaaaaaacgacgttactgaagcttcgccaggtttatgcccgctcaagcgcccgtgacagccagatcagtgatgagagcgatagccgagaaccagcattcttccagcgacagctgctggtcagcttcgaaaaagaggatgtatcggccgcttatgctattgatgaaggagaaatcccgtttggctttgagtttttgagcaaagtgactctgcgagatatcaactttggcaaaatggcggatgatgccaatgagctgatgatcgcaggagaggcaaagaaaagcaccgggtttaaagtttgcctcggctgcggcatggtgcagcgccctcgagatcatgaaccacgtcatgacctgagctgtaaatatcgcgctgaacccgaaaaagcgaagtttgaagattatctctacctttatcgccaactggaatctgaggcattgcgtatcctgctgccagtgaccagctacagcaacgatcgcgtggtggaagcctccctgggggctgccattcagcttgggcttaaacattacttcaaaggtaacgtggatcatctgaaaggcgtggtgtatcgcgagccggaaaatgagggcgaatcctggcgtcagtatctggtgatttacgacaccgtaccagggggaaccggctcactcaaagaattgatgcgtacacctgacaacctgctgaaattacttgagctggcctacaaggcgctagtggaatgcagctgcaaccatgatacgcataaagatggctgctatcgctgtgtttatgcttaccgtgaccgcgggcgtatgaagtatgtatcaagagatcaggcgcgtctcttactggcgaaaatcctgaaggccagtgcttctatacgcgttattgattccatcaaaaacatttcgcttaatgccatgatggggagtgaactggaaaaaaggttcattcactgcctgcaggataacaaaaatcttctcgtgagccggagttatgcccatcagaacgcaggctggattattaatacccgtacagaaccggcgatgagctggcatctcaaagcacaggttgatttaggggttaaagaaggggttggcatccttagccgaccagattatgtgctctatcctctgatgcagtcagaaaagataaaaccggtagcaattttcctggatggttttgcttttcataaagatagcgtgtcggatgatgtccaaaaacggcaagcgattaaagatagcggtaatttttgggtatggacagtgacctgggcagaccttcaagaacaaggtattaaacacgtacagaatgtcatggggcttgggcataacccgtatatgaaacagcctaagtattataacctgttccatgatacaaactttgcgacacttgaaggttcattcagggagagaaacagttttgcactgctactcgattatctctctgatcccggtaataaaactctactatggcagaaaatggccgctgcctatgcttgggtgtggctggatcctaaaaagtcgcaggataccggagccaaacaaaagtatgcctatgaaatgcaggagaacgctcccgcttatcggttgaatacacttttgcctgatgaaccttttgtatttggtggtttactggatagctgtagttcatcacaacagttcattgagctggcagctgttgtaccgcaacaagccattaactcaacgacaagcattgaacaaatgcgaaattggttgaggctgcatatttgctttgacgatcattattcccaggatgatggctatgaagccggatttaacggtttctggtggatggtgaatttactgcagttcctgccagatatgacattccccagccgtaaagcggtccatttaccgcaggagcctgaagcggtaaaaatgcagacttcggtggtagtggatattcagcctgacgagagctgggcggagataattgagtttggtttattgagcgcagaagaagtcgctttgcttcaatcgttatcactaccggcaccgacagtcggatatgaattgcaggatgacgatggcgaaattattgcagaagccgatctcgcctggccattacaaaagcaagccctgattatcgataatcaaggctttactgctttattcgaaagtaagggttggctcgttgcattcgggccaattgacgaaattacattgcagcatctgtccggaggtgacaaatgacggttccaacgccaaaggtggcactttctgatggttttctgggagcttttgcgcggattcctaaagcgcagcaaaaaaaggtccaggaattcatctccaagttccgccaggatccgacgagtaatgggttgaactacgaaaagatccacgatgcacgcagcaataatgtgcattccgttcgtattgaccaaacctaccgggggatcgtcctgaaacctgagcagggtgctctgtatatgctgatgtgggtggataagcacgacgaagcctacgactgggcgcggcgacacgaatgtgcgattcacccggtaaccggtgcgattcaggtgattgataccagctatatcaaacctacccccgagccgactgttgttgataaacccaaactctttgctgcttatacggcagagcagatcctcgcgctgggtgttcctcctgtgtttattgagcaggtgatggctcttgtggataccacagggctgaatcagctggaaagcgtgatgcctgcggaagcctgggaacccctgcactggctggcagaaggtctggattaccaggaagtgctggaggagtttaacgatcaccgtgatgagcctgttgataccaacgactttattgaggcaattgagagaagtaaacgtcgtttccatgtcgttgaaaatgaacaggagctactgcagatgctcaatgcgccactggaaaaatggcgtgtattcctgcacccgagccagcgaaaactggtggagtctccggcaaatggtccggtgcgagtattaggtggtgcaggcacgggtaaaacagttgttgcgatgcatcgtgcacgttggttatcccaacgcctggccgatatacccggtaaaaaagttctgttcacaaccttcacccgtaacctggcggcggatattcgcgccaacctacagcgtttgtgtagtcgtgaggagatggcgcgtattgaagttgttaatattgatgcctggatgagcgagcagcttaaacgccatggatatgatttccgcgtggtgtatgacagcgatgaaggacgacgtaaatgctggaactatgccttgcagcaagtccctgctgaattgggattaccggataacttttattctgaagagtggcaacgtgttgttcagccgaatgcagtttacagtcgtgaagaatatctgaaggtgagccgtattggtcgtggcacggcattatcacgtattcagcgcgcaaaaatctggcctgtgtttgaagagttccgggcacaaatggcgcgagccaaactgcgagagatgggagatgccatgcatgaggctatgattctgtttaaagaaaaacaggtgcaattgccttatagcagtatcgtagtcgatgaagctcaggatataggcgtaccggcttttactcttattcgtagcctggttccagagtctcctaacgatctctttatcgtgggtgatggacatcagcgtatttaccgcaataaagtcgttctgggtcagtgtgggattaacgttcgtgggcgccgtagtaaaaaacttaaaattaactaccggactacagaagagacgcgacagtttgctgtcgggttgttaacaggagttaaggttgacaacctggatggtgaaactgattcctgcaacgattatttatcattgcttcatggtgaaaaacccatgattactcatgcttcagattttaaggaagaggctgagaagattatcaagcaaattcgggcgttgttagccaatgatgtccgttcccaggatatctgcattacttcccgcacgaggcatacgaatgagcgctatgtgtcagctctgaatgaagcgggaattgaaacttttaatttagggaatgatagtggcgacagtaatcaacgggccggtgttcgcattgcaacgatgcaccgcattaaagggctagagttccagtatgtgttccttgcgggtatcaacgatggcatcgtgccggaagttaaagccatagcatctgacgatcctattgaacaacgtgatgcattatttaatgaacgagcgttgctccatgtagcggcaacacgtgcggtaaaaggcttatttgtttcgtcttacggtaaacctagtttcttactggagtctgaaagcgagtaatccagccagataaccagaagctatagcttctggttatctgcattttagcactcatcaatatcggccattgtgtagtggtctaatgattccggacaccattttaggtggtaagattaccatcttaacaagaggtgtttcatgatcagaaaacgacgttctttttccgctgaattcaaatgcgaaactgcttgtccacttcccctaaaataagacagctataattggattttctgccttaaaaattgcagaggtcatgatgaagtgatctcctcccaaaatcagcgccaggttaaatcagagatccggacctttttgcagacttcggatgaattcctccggagtctggttatttaatgaggaatggggtctttgccggttatattcctgccgccagcattcgatcttttcctgcgcatcttccagcgacaagaaccagtgaacgttcagacactcgtcacggaagctgccattaaaggattcgattaacgcattgtccgtcggttttccgggccgggagaagtccatcgttaccccgttttcatatgcccatttatccagcgcctttgagataaattcgctgccgttgtcggtctgaaaccgttcgggaacgcggtgctgtaactgcttcagacgcgccattaccgcaaccacatcgtcaccccgcagaccctgtccaacttctatcgccagacattcccgactaaaattatcgactacagtcagcgcccagatccggcgcccgttgaacagattatcagcaacgaaatccatactccagcactgatcggctgccgtcactgccggacgctcctgtctgtgcctggctgtgacatgtcggcgtggccgctttgtccgcaggttcagcccttcctgacaataaatatggtgggttttcttatggttaatcagccagccttcccggcgcagcaggatatgtatgcgctgcacaccgtagcggatgcggatttccgctatttcccttatccgctgcgtgactgcgcggtcgtcacgccggctttgatagtggtagaccgtgcggctctgcatcatcagacgacaaccacgccgcagcccgatacggtaggcctccagcaaccaggttaccgcctcccgcttctgcgccggtctcaaaacttttttttgatgacctcctgcagcatctctttgtccagactcagatctgccaccaggcgcttcagacgctggttttcttcctcaagctgtctcaggcggcgaagttccgtcacacccataccaccgaattttttcttccaattgtaaaaagtggcttcagaaatacccatttttctgcacacttcctctacccgggtaccggtttcagcctgtttcagggcaaatgcgatctgttcttcggtataacgtgtctttttcatgtcagatgacctcttttttcaggagaagaaaggccggaaactctactttataccggtactgaagaaagggaagagatcaggggggattaccatttagctcggcctcaacatccaaaaacccatagaattctcgatagagactttttttgtttaaatagtcgcccagacaagtaaactcttgctccaactcctttctcaaatatcctggaattaccaaaaactctatttcttgacagatatcaatgcgcccatctagtgaggttgatatgccatcccaggtgtccatatccccctcaataaagcattgcaacatctttttagatgaagccggctcataagaagtttttccacggcagaatatatccgacatggcataagggccatacgtaagcgctgtttccttaccacttctatgcatgctctgcactacaacctctccaagcaattctggttgcctagtaatgataagatggtagatagagtaatggacgtgatactcattcaagaaacttattttgcctaacccatactctctaaatggcggataatccatatagtctctatcggatgttttccacttccagtacttgtcgatttcacaattaaaaatctgcaggacgttagacttttgttttgcgaacaaaacgcctaattcaatgccatcttttgcttcctcaaagtaattagaccctttttcatccttacgagtaaatgtcacgtttgtatagccagccaaggaagcacccattgaagaaataagtttcttgtataaggacacttcttcaaagtcatacctgagaaaaatagtgcttgtatctagatacacaccgccatatcgttctaaaagcctaagcctaatgatgtcactatgatttccatgctgaacactaggatcgccagccttctctatcagttgatgaaagtatggcgggaggggtatgtagttttcaatgtaatcaggcgcgcgtctgtctgacgtagtaacgataacaatccaatcactgtcacttaacctagactctaaatttcttatgtttaacgcatggccgataggcatgtcctctttagaagagtgccagtacaagaaaacaacttttttattttccagcctatcactgttcttgattcggtttagcgcataatcgacatctgcgttttcgaattgattcatattcttaatgtcgccaaagtcaaccaagcctttgctctgaataacttcaaagcttctatctgttgtcggttgccaaatattgaaatatctagtttcagggtagatggcgacaacccctttttttaataccttggaaacatggacaagagatgtgtctacagagatcaatagtcctgatttgcgaataatcggaataacgctttcaaagtttgttattccttttaccagctcaacattagacaaactcaagtcgtcaaccaaccgtgaggctgatagtaaagaattagaagaatacataactccaaaactactatcacgatgagacgtagctaggtgacttataagagactttgttttttcgatagaaagtgacttatcttcccggctcccgtaagggttgatcagaaaatcataggtttgggggaaacagtctttctctacacaaaatgaagctccagccaaaacgttgctcccaccaattgccatatcaacaatcgactggtatatgccgtagatatcattgtttttcgacttatctatgaataccttgtttgacatctttaaggcgctatctgtgctaaaaatgaatcgaggattcaagagaaaaacacacagaacatccttaaccccaagcttgccaaagagtgggacaactgcatcacacctttttacattgaatgcaaccttaactagatcaagccatccaaaattcttctcaattacgtgaactgaatctacttttatcaccgagcaatagagcgcacgcagtgattcgttggtaattacactaactcttacaccgcagtgagcggttaggaattcgatgatgggagccgaggcgatagcgtcaccgtacttaccattccagttaacgaaaacaatatgcctgacgttgctattttttttcgtaagcagttttttgaatacgactgacaaatcaagaagccgtatcagcagcttactaagcacgagcaatagagtcttcatttagagctggttccgtttgttaggatagtttttccgaccgataagtcgacgtttgcaggtagttacacagtccatgacgatcaaatttcgtgatgaataatgcgggcttgtttttgcagtcgaacgatcatatgtggtcttgagttttgccaaaagattacccataataaaatctcgcacgccgttgcaaatttcagaattcggtgatacatatcatcaaactgaactagacaccacctttggctcggattttctatagtcggcaagacgttggtcaaattccgcacgccgacaagaaggatatgaatgcattctcaactgaggcactattggacaatctccacgagttgttagccacaatccccgaaactgagcgaatccattcgctcaaagcacggatagtgcccggtctaggagtggcgcagggaaccctcgctcgccagttgccactgatcagccaagggttccccgaggtcgtagactgttacccaggaactataaatatggagctcgaatgtcctctcgaagttacgcagcctgatcatcgcactgctccgctcgcttggactccgagcggacgaacgactgaagtattcgatttagtacgtattgagctcgagttcggctcactaccgacgcgcgtgcccgcatggttgtacattgcccacgcatcccctcaccgtagaactccgaccattcatgaggtaataactcagcaattaaacctgagtgatgtcagtgagtgcaaaattcatctgcgcgcaagcgcagtaatactgccccctacacattaactaacggtgccaatcagccgctcgctctctcccagccaacagccacaatcagcctctatgtgtaggaacaatttgatcaataagcctcaaggcagctgttcacgggtaaatcgcccttccattgacacttaacaacccgccatttgtcaggtactccctcagtaacaccaaggaaggagcacattgcggctgacttagaaactcgttacccaaggctgacttgtaaagacgcagccaggtcggcgcaggcaccttcggcaggaatgctgcaagcgactcgcggttttcctccccgaataacaggcgcaatgtgcgcaggattggttggtagtcccgcgcagacaacagttccgctacggtttcatccagccgctgcttgaccgctacgccattcagtcgatcctcaactgaagcatcgccgagcgccacacggggattaatcgctactggatagattgcgcgaaacgactttgcaccgttacgcatagattcataaagcactttgtcggcggtagatccagtgaccaacacatcgtcgccgaagatcacatgcacaccactccagcgatagaaattttcagccggaatgacgtggtcttggaccagattgactctctcccgctcctcagtgctaaggctggcgtagtcctcgcagggcggcgcaatcctgggtagcttgacgttgatgatggtcggcaaccccatatgcgccagtttgatgttgacctcctcgaccacgaactcatagagcacgttcgccgtggacggcacgttgcgccaaccagtggtcatcatcactacgttgtcaccacagaccttggcgttctggaacaggtatgaccattgcgagtcaggcctatccagctcgccacagaggtagtcgataagttgtcttgcgagataccggatgtcatgcacaccgccgtatttagcacggctgtagattccagccagtgctgtggcatcgctgcccgtggccatatcgcggaacactcccgattcggcaggtgtaaggcagtgcagggccgtaccgccaaaaatcgatacatactcggtcatgctgatcaggtcacgtgcaaacagctcagcagcgaacacgcggaatccagttttcacatcattcgcacggagctgagcggaagcctgacgaaacatcgccaactggacatcaactgggctcttaagtacatcggaccatagcgcagaattttgggggggaatcatgttcaaggctgttcaagtcctgctgtcaaagttgctggtgtgcccgttaacgtcaggctatcgagggagacatcgattcgtcggcgcctctcgtagtaactaatgctcttcagccccaaaggcctcagggcctctagcagttcagcaatgcccgccccagcgtcgttcgggtcatgggtatcagacccaaccgtgaaaggcacctcgtgcgagataagctgtgccaccaattcccgagacggatgagaccaaaagccctggacctccctgcccgttatagggtccaggctcgactttcgaagacctgaggcattgagctcaaatgcgataccgcttctggcgagctgcgttagcaagggttcgaaacggcgcaggaaaatatcttccggcacgccacgcagcaaggtgtcagcgtgcccgacagcatcgaacaatccactgtctagcagaccttcgagattggcgaagtaacgatctagaaacgcctgtccggcaaggcgtggcagctcccagaccttcaccatcgcctcatctggaacttccacgtaatgaattgagccgataacaaagtccatcgggtaacgagcaagcagctcgcgattgaaagcatcggtgcccggcatgtaatcgagctcaaggccacacaggatagtgatatgtccctgataaatcgccctcgcccgttcgatgtcagcgaagtagctatcaagttcggatgcgagcagacgattgttcatatccacggggaacggcgcgtggtcggtgattgttaggacggtcacgcctgcggcgatcgaggcacgaactaactcgtcgacagtgccgaccgcatgtttcgaataaaaggtgtgggtgtgtgagtcgatcatgcagcgtcccactgttcaagcaacctagcatgcccagccagttccttaaccagccagtaggggttgttcgccttggcgatgatcgaacgaagcagctctgtgtcatcaaggcgcgccagtaactcggtcaagggttgcgtataaagtgctcgggttaacggtgtttcccgcacgtgctcggccaacttatgccagtcgacccggtcaaagtgaatattgcccaagcgctgattctcgatgccatacaggtatatatcgccacggggctttaccgtgacatccaaaccgttggcctgcggagatttattcaggctgccgaaggtgaaaggcttgttaacctttgactcgatcgcctcgatgtagcccagcatatccagatagcctggggcagttcctggagcagggtgaacgaggttcttgtagtcgatgccgaagcgctcgccatccgcgaccagtacatcttccagcacactgcttggctcaatgattgcttcaactccccagtgggccagttcggacttcaagtacgcgcgagtgaagtcgcgatcggtgtcgatagatcggaacgagaaactcagcccagacggtcgccgacgccgcaggtagtccagactaaaaccatgggcccgccatttaaccttctcgatatgatggctgtctgcactgaggcggatgttgcaggtgtcgccattgtccaagacaatctggtttgtagtgtcgtagaactcttccatcctgtcatgccgatagaacccactggtaatgaattcgaatttcttgccaccttcagacaacccgagaatctcgtggaacactttggcattgttgagtggctcgccttcaccactgatggagatgcgtttgacctccgtggaattgatcaaccttgcaaggttttcccgtgccaacgttgatagctccatgctaatacccgctttgtgcttgtcagcatacatacagaaggtacagccaatgccgcatatttgtgtaatgtcgatgtataggaggtgtccattaagatgcattaaaagcctcaatcaaaccttgaaccgatgcataggtatttgtttgtaaattacacatggttgctatggtgagatgaaatctatgcgaaccaataccgtctgtcaacgccaaataattcagcgcgatactttttctggccatccatttataaacactgaaccatctgccctcaggcgaatttcaagattacgttcaacgtttccactactctcaatcctcatatcgtaacgccctgtcaggtaattaaattgctggttcaaggaacctgcccatcggcgactattgtcaggcaaatctgagtcataaggcccatcgaccaaaacatccgtatatctaagtagccgatccgtccctggtaaacacaactcatctagttcttttagggtatatccactaaataccatcaccgaaagtcccagcgactgggctccttgtgcaacgacagccaaaccttgtgcttgcaatatgggctcgccaccgagaaaggtcaccccttcaagatcatatgtttggtgcgcattctccaaccattcgagaacagattctgccgaaacaagatcacgttcaactagctgcagatatccagggttacagcaaccaaggcaacgcttgttgcaaccttgcacccacaaggctgctctgcgccctggcccttctgcctcggtgcaagctaagcgagatgctatattcaggtaatgcataatttcactccaactcaaatatcaagttgccacctgcgatatgaacctcaatcactttgcttcgaatctgattagaaccacctatttgttcaaatagaaaatcggctaatggatcaatcagtttattagttagcgcgttggggacgcagcgaccacccgtcccgcgatccacatctttaaccagcaaggccagtatctcggcctccttaacaaacttcaattccgaaacgccccatttatccttcaaccctttgcgcaattgctccagcttggagcgagcgatgtcaatcaagaagctatcgtcacgtataaagttaaatggaataatgttagcctcgcctattcgtcccaacaattctgggcgctttagctcttgcacgaaatgttgccgcaccttttggatgaattcattccgcacatcttgacactcataactgacttcggctgcgccaatatttgaagtgaacacgataacggtatctgaaaacatcaccgtttcacccttgccatccgttaagcgcccatcttcaagaatctgtaaaaatttgtcgagaatacgaggatgcgctttctcgatttcatcgaatagtaatagtgaaaatggtctttgcttgaccgcattagtcagctgtccaccagcttcataacccacataccctggtggtgcaccaaccaacctttgatcggcatgttcgtgattaaactctgacatatcgaaacgaagacaagcttcctcgtcgccaaagaggaattcggcaatagactttgccagttcagttttaccgacacccgtaggtccgacaaaaaatagtactcccttgggagttcgttgcctgtaagagtgttgaagccccgatagtccagtaaaggcacgcacgaggatgcgtcttacagactcgatggcttcaccttgccctttaacccgccgccccaaggtttcgacaatggtctgaagtttcttatgatccagttgctcccaaggactgtgtctgcgtccgtggcgataaagattgagcaaagataaggcactagagacttcagtttcctgtcgtgaaagtcttgcgagattatgaatatcgcggatactctgaccttccaaaccgtccacgaaatcagccaattcacgccctccttgctgcaaagtaggctgcaaccgaaacacttctttcaaacccagtacagcaaactctcgaatctgcctagtcggcaagggaattgctatctccttaaatagtggattgttcagatagagtgatggtggcaatacgttcacccccccgcacagtagcactagcagtgattgaggctggttaatgctttcaggattgcgaactacagcggcatctcgggtcgcttgccctaagcgcagaagccatccgcgctcgttctcactcaatgaattgacgctaccaaacaaatattgcgtccagtccagaacaaaagctaccggtttttccccacgcggttgctgcaaccactgcgcagcaacggtcagcaagtcgtccgcgcttgccgaaataccgctagatacggggctcgacatcgaagtaggcggcaattcgcccatatcataggcgctcccctcggaggcgctggctttcatggcatgtggtgtaacggagctttgcaattccccccaagtcctcgcatcaacgccgctgacaccattgacgcggttccagaaaactacatgctggtatccacgctgacgcagaaggctcatcaatgcaataggcaaagctgtccattgtcctggcgcgtcgggatcagatgtcaaatcacccgtgttgccatgcaatataacaccgcgccgtatgccgcattcacggcgaaaatcttcctgccaagtcaacagagctgaactcatttacttctctcctgtgtggcatcagggtaagggcgagcatcctgctcctggtcgtcgggattgacccaaatcacgcgcttgtcgctcaggctaatcccgtaagcatcttgcagcgttgccatgacgggagcgacatctttctcgcacgttttgcctttgtattgatgaaatttgtaactgaggtgcccgctcaggttaacgcgaaaatctgcttgcgcgccagcagggcgacgggcgcgaatcagcacttcgtcttgcccttgtgatgtgagatgctcggggccatccacgacaaagccagcttgttgcagtgagagataaaccgcacgcacaacttcacgacgctggctttcgtctaccgcggcttcatccagctcttgcgccagttggctcaaggcttcggcctggtcttcaggagcaagtcccgtcgcatgagccaaggcctcgcgcaacttggcggcgtgctcgccgccgttcttatccgcttcctgctccaactgctctctttgcagtgtaagtacatcggtaaccgcttcacgctgtacacgatttttcatttccagcaactgacgtttagcatccgcttcataccgtagccgaacttcgctcaaagcagctaaaatttgcgccgtggtcatgttaccggcggcatcgccaagtagtcgcgcccgcaattgcgtcaactcagcaaacgcggcgttgagtgcgacaggtgtgctccagttgctcaagccctcgcgccatgcggcctcgagttctgcccttatctgcaattgtcgctcggcctctgcttgctgcgctttgcggaatgcgtcagcggcggctagctccgcatcttgacgggaacgacgctgctcacgagcaaatcttggtaatccgtgaaatcgtccacctaacgaacggctcatatctctgacagcaaacgggtcggagtctaacaaagtctccattcggtcaagagcgatgcttaactcacgaaactcttccgaaactacgacatcaagcccttgaccgatgacatcattcaatacactgcggtagcgctcaaggaaaggtcgcgttgtttcacgcactcgctgtcgatcaagctcttgcttacgttgccgttgaatttggtagcgatattcgtctgcccgactcatggtttcatttccttttgttttttctattgtcttgcttccgtggatgcatacttggcgaggcagcgggcaccagtcgcgtaggagcatatgccttggagtcttgtgtgtgaatgccaagcgactgcgctttgttgcgtaggttgatgtcattacttacaaacaaaacttcattcaatcggaagaacaacgcagttgaaagaattgcatggtcaggatgcttggcatcccactctgcaggcagcaaggccgtatattctgtttcatggcgaatgcgagataaggtcgtatccaactggcgaatggctgcgcgcgccttcgccgcgcgagtatcatcttcactggtcttcaagccatccagctcgctcaaaacccgatgtgggacaaccggaatatcgtcggagcgaagctcctgcaaaagatcagggctttccatcagagcgctggtgtcgaacactacaacgcggtacccattctcaaccggggccagcttgtcctgcgccaaacgattccagcgttccacagctttattcaaagcatcccagtggggcgatgatgtatttaaaacgtggaaatgctcagctgctttgcgccaagcgcgcaccgcattcaatgcacctgggttcagagtacgcacatctatttggccgttatccgcagccttcaacgcctgttcgccaatactccggtaaatatcctggactgctttctcaataacttgcattggttgctgtatgacgtgtgggccatacagcttcaactccttgcgctccaatgcgttctcaagccacatttgccgcaattcgacggagagcaattcttctggaattgcagtggtggaaggcaaggcagatcgcagctttactaatgagtccaaggcgcgaatgggggccacatgacgcagcagagcagcttgcaacgccgcagctttgtcggcagatagtacctgagttatctggattaatagaggaacgacatcttcagaatctagctgatagtgcgtatttttcagcgacatttcaatagctttcgacagagattcttcccaagcagttttccaatctttcctacctgagcgccacaaaccaattgcttgtttcgcaggttccaccagcgccatcagctcatccaatggcctctcagcgcgcatagcaagccatggccaaactgtttctccgagttcatcggaactacgccatgcaacgggcatcaacgcaattagcggatcatcggatggcttacaagagagctctaattctttgcgtagcgttgcccaaaacgcagttgctgattggtctttcaatgtaaccgtcaagccgcataagcgcggttgtccggcccagtagaggcggaagataccggccacttctacttgcacgctcaatgcgtcgttctgtggcagagacaagctacgaaatcctggcataatccctgctggggtgggcacgagcaatgtgaacatggtcggttgtttgccattggcaaccagttctggtgcgttcacttcagacgataaaacgatagtgggtgttgttgcatccgccgctacaaccccttgcgcaacgatgctgaaccgcgccctggctgttaccgctttagttgcggcaatggggcaagcagtgcgggcctcttgtaaaacagaagagtcaacgttgggcagcaaggaatctgtctcgcttgtcagaacatcagcaagcaaaatttcccataccagttcggactgcgcttgctctaaccaacgctgcaacgctgcatcacgtggagcgctcgtagacagtacgacatcctcgctgcacgacaactcgagtcggcgctctccccatgccgcaggctgcaccacgggcgcgatgcggtcgataaccgtcgcaggttttttccagtcatacttttcctgcgctatggcgcgttcaacctgcggcagcggattttgcggccttaaagcctgatcagcgacactggcacgattgaaatcacgctgactgagacgagctccatcattttgtgtgggcttaatctcgtcgctgatgggatcatagctgtgccagaccttaaccgttcgcgagcgtaccggcaagctatcactacgcaagaattgcaagccatcggcagtcaacgcaagctcagtcaaaggcatatcaagcctatcctgagcgtagcgtttgggtagagctcccaaagccgaaagttcagacacacagccttccagcaattcacgcacatcacctgtacccagttgatcgcggaaaacacccaacaaagataagttttgtttgtcgggcaaatggagcccaggatcacacagtcgcaacaccatacgttcaaagactgtgggcttgcgctcggtgtgataggtcacatcggattcaatgcgatacaagggcaagggaacggaaatttcaactaacttcatactcggcctccccggctaccatgcttgttgttttttggcgtaactgtccgattagtcggagcactagaccagttgggctgttgtttctgttggggtagcatatcaggcgacatcaagtgccttgctggaactagacgtgcatcgcgctccagttgatccagtatgtctttgtaaacggttcgcttgacactgcctgcgctgtccatgcgcggcaagttcacctcgtaagaggcatacatactttttgcaccaaatacgattagtagctcctgcgcacgcgaaaatgccacattaataaattcaaaacgagcaacattggctttgctagaacgacgtcggggctgattgcctgaacgcaaagggtcgtatccatcatggcgcaccatgctaaccagcacgatggacttttctttgccctgatatcgaatcacagtattgacttccacatccagacaatcaaatcgcccgtttgactctttgggtctgcggcggcggatagcggcacgaatttctcggcattggttggcatagaaagacactacaccgactttgcgtttgtttgttcgtgagtagccttgcgcagcggattgtagttcaatctgttctagcgtttcggcgatcaactccgcttccagcttgttggtgcgccgtggctggttgccgtccatgtcctcacggtgaatctgatttttcaggttgtaggtagtgtccacccacaacgcgtggtcacccggagtgagtaaatctgagccaccgtcaatattctttaatgtcagtccgtgaacgcggcgaagcttagggtttgggtcatcatcaggccgaaggaggccgcattccaactgcccttcgtaaaaatggttcaccatcgccatgatttgcggatgcatgcggaactgcacattgagtcgtgcacggttggcatcgtccgccatctcgaaatgtgatttgaacaacgaggctgttaccatcttctcgaagcgacgcaagttgtcgcgggtcagcaaagtttgcacttctgcaacattgcctattccgctctcctcagtgttggcttcgttttcctctacttcatccatgaagctacgagcttcgtcgccttcctgaaacaacggaggcaactgacggtggtcgccgaccagcacagcgcgacgcgcacgcatcaagggcatcagtaattccagcggcgtagctttgctcacttcatcaatgattgcgacatcaaaactcgtctgcccagtatcatccaaggtgcgttcgttctcgttgcaagtaatggctaccacattgcagctcgcgagaaaatctgaacccagatgttgccagtcttcttctgcggagttgttgcaactcaaatcgcgcatccaatcttccagtaacggaccccatatcatgcgctcatgttgcaggctggcttgatgttgctccaaggccttgatgacttgggtcacagtgtcgatgctctgcgacaaagttgcggcaggttctgccggcaaacggttgccttgcatgatcgcctcatcctgtaacagagacttaaccttctgctcatgctgccaatgctgttcttcccagctgtccacgttactttgagcgctgcgctcttggttcctcgctgcttgcacaaggccattgttcggtgcttcaggcactggctgcgccagctgtgtccgtaaggattggttcaggctttccgtcgcctgttcgataaccggctgcatactctctagcgcacgcaggctcgcatctatgtcgtcagccagttgagtggcgcttttaatcggggcgcaccattcagaagcttggcgaaataggccgtcataacggctgagctccaagccaacgccagcctgctccaactctttaagctcattgtgcttagctctccaagctcctacgtaagcatcgtccttcgccatctgctccattaaagcgctaacctcatttcggagcgattcaatgcgtagccgggtgtttgcatcctgaatggggccatccgctgcttcacgcaggcgtcgaatatccgcggcaatggcttctcgcacattcgtgaaacgccgccaccgggtgagcatatgcgctagcatcccgccccgactgcccgcgtgagccagccaatcatccatagaaaatcgcactagcaatcctgccacctcgcaagaggcaaggccttgcacaagatttctggcgggtatctctacatcgcgtaagtcgccatgcagagtatctgcttcaccgcgcaggaagagctgaacactttgcaggcgcagacgcttggctttatcttcatccagcatcgcgcaagcagcgtcatacacctgctgagcctgccttgtctgactgcgagctgattccaaatccatttcaagttgcccgcgtttggcgtacaactccttctcgtcgtgcagcacaaaggctgcgcggtcatgccactctcgcaagaggcgcaagtcttcatcaacacgcttccacactgtgaggcgatcttctgtttgtgctgccaaagccttgtagtaacgctgcaaggatgcatgccccacgaaggcagcgccatcttcggtcactttgcgttcgttccgtgccaaacgcactacgcgcaatgaaccgtcatggctcagcctgtccagtgcgttgtctacggcggtatgcgcctgcgatgccagcaacacccgctgcccgcgccgagctagttggacgatggcctcggcaatcaccgtggtcttgcccgtgcccggcggcccttgaaccaaacacaaatccggcgcagaaagaattttaaccacggcttctttctgtgctgggttgagcttgtcgttagcccactgcgccactggctccagacgctgtggcacggaaacctgagcagcttcgaacagataatcagtcaggtatggcgcataaccaccttgttcctgtaactgtcgcagcgcctgttgatggcgtttgatcaggctcatgtcgcctgcggttgaaatggacagaaagccggactccggaatttgattcagaatgcgttcgcgcacaacttctggttcctcggcattagcaagatcgttcgcgtattcttcagtcaacgagacaatcagctcggcaagcacgggcgtaggccaagggcattccggcaagttttcgtccttgggtaatttgctatctttcggcaacgttgtgggctccgagagtttgcctgcctgccccagtcgaggaaggcgacgctcctccctttcaggcaatccgaacacccagggatctttagattgtccaacctgaaaagccactaggtcgtcccgccccaaggccttgcggtctttttgcatggtttgagtgctttgcgaaatcaaggaaaaaaccagctgttcgtcacgccatttacggctgatgtagcgcaaaccgcgcgatttgtggcgaattaggctttctttccatcgaagaaattcggtccactcggtcaactgtttttcggtttgctgcgtgattggcggcaagtcggccagcaattgcggtgtgagtaggttattgacgcgctgaatgcgttgctggcccggcgccgattgcaagctgtcatgcaccgcaaatgcagtgaattcacgttcgaaagagcgcgcaggcaggtcagccgtctcaataaaaccgttgattaggaagagtggcgaaggtgattcggttggccaacttcccgtggcgatgaaggagcatccctcccgaaagggccattctctccctgctgcgttaacccgaattgccatctgcgcgtatcgtgggttcgatttgtctctctgcctattagaaacataacccgtaataggcatgttatttgggaaaagcaactcgtatagtaattcttctgggttacgaccagaacacaaatctctaaactcctggtgcctcctcaagatatcagacaaagctcgctcaattttttttatattagagtgatcgagggaaacataaagattcattgtttagataatccattacaaattttgacaaaatccaatagtgtagcaccaccaactaatatcactacaatttaaaatttagggtatgctaaaagtgcatttttattagactttgatgttatcaaaattatgcaacactaaacaacataaagaatttatcattcccaaaacctatgctacacaatttgttttcggagctcttaaatttaaaggcttctgggaaaaatgcctatatctctattgcttttaaaacactcaatatcagcgaatctgttggtctgtaagttccccagaaaaaagtaccattcattttcaggagtccttatccatacagctcaaataccttacatatttcataatataaaaaataaaacacatcgctatagccatctttgcgacaaggcgcaaagatggctatttaatgttgcttagaattcatattaacaacattattcaaacttccctccaattcatccatgtagtctgcataccactgcatcatttctcttcgtccttccataaactgagcatgattaatacgtaccacggatcgcattcttgtcgatatgcgcgagctgagtttcaatccacgctaannnnnnnnnnnnnnnnnnnnnnnnnnnnnnnnnnnnnnnnnnnnnnnnnnnnnnnnnnnnnnnnnnnnnnnnnnnnnnnnnnnnnnnnnnnnncgctttatgaatgtaagcagcacgaacagaatttcgttcctgatggctcatctgtctttctactgcatcttttgaccatactcctgattcgattaatgaactgcatgccattgtcctgaaaccatgcccacaaacttcagtttttgtgtcataacccatagcacgtagtgcattattgaccgtgttttcactcattggctttcggggattgtggtcaccgataaaaattaattcatgatcgccacttaactgttggatctgctttaatatatttatagcttgttcactcagtggaaccaaatggggagtacgcattttagatccacgataagaaaatttaacaccttcaattggttgccgctctgctgggatcgtccacattgcattagtgaaatcaatttcttcccatcttgcaaaacgaagttcactggaacggataaaaactaataatgtcagtttaacggccagtttagtcagtagtctgccagaataattttctatcctttgcaaaaactctggtagcctattaagttcaagggctgggcgatgtatgcgctttccggctgatatagccccagccatatcctgcgcagggttatagtcaattaatccgctttgtacggcataacgcataatagctgtcacacgctgttgtaagcgtgctgcaacctcaagacgtccagacatctctacggctttaatgggttctaacaggtctcgggttttcaattcggcaatattacgtttaccaatagcagcaaagatattgtcctcaagacttttgagaactcgatggctatgcccttccgaccacttcttattggttgcgtgccaatcacgagcaactttctcgaatgtattaaattctttttgctgctcttcttttaattctttcttgagttcacgagggtcgatacctaaagcaacttgctttctggcagcatctcttctttctcttgcatccgctaaagaaatctcaggatatacgccaaaagccattaaatgctgtttaccgccaaagcgaaaacgaaagcgccagtatttggaaccattggggtgaacatagagaaacaagccatcactatctgtcagcgtataagctttttcgtctggtttagctgcacgaactttcgtatcggttaatgccatattctttgtcctcttcaccccaaagtgagcatataaacgagatatctcagattactgttgatgatttcgagttacatagccagttatgtgcctacgccacaggctgcgcctgtattgctctaacatcgataattcgaggtaaaatgagtatacattcattatcgaagcgatgtatatactcagatgtatactcacccggaggttgatgtgggttgagttagattgatatgcattgactgaaaacgcggggaaagccttgctgatactggatttcaggcacaaaaaaagacgtctgttgacgtccattgatgttcttatggtgccgaaggccggaatcgaaccggcacgcccgtgggcggttgattttgaatcaactgcgtctaccaattccgccactccggcacagaagtgtgttctggaaaacgtcgttattatacttgcggcactctgtggtgcaacaactatcacagaggcggtttgctgaatggttaaaaagacggcggttcagcaggatacgggatttgtgcggtgacgggagaatcccactttatttccgcactgaataataatatttttttatttaccgcgattgtgccccggatgaatagacatcaatacaattgcttatataatcctctccggttcccgataaatgtgaggtgggtatgggctttgccggatgggttgcgacaggtatttttattggtatcgtcattggtatcctgttacgtatcttcaaaaaataactgacttacagtgtcatatccctgtgtctgcatggaaggctgttgaattatcatgagtaaattacaccgtcatattgtgcgcctgatgccgttatcgctgctggctatcgcgctgtccgcctgttcttcgcagccggagaaacacagtacagcgtctgccgaacgtccgccgcttgactggtctattgttgaaagcaatccggaagcactgaagctggcaccacagctggtcgatgagatcggtgagaagattttctccgaaaccgatgcccgcggtatgtttatggtggtgattgataataacgaagtttttcaccgcagctacggcgagacccgtcccggaaatggtattaagccacggacggattcgctgatccgcattgcgtccgtcagtaagctgatgaccagcgaagtgatggtgaagatggcagatgacggcctggtgaatctcaatgatccgctgcagaaatacagttataaacagtcctccgtgccgtcctataacggcaagccgatccgcctgttccacctggcgagtcataccagtatcctgccgcgtgagcagcccggcggaaaatggggtcgtccggtgtttacctggccgagccgtgatcagcgctggacctggctgaaaaccgccaaactggcggcccagccgggaacagaagctgcgtattccaatctggcctatgatttactggcagatgccctggaaaaagccggaaatcgtccgtacagcgaactgttccgccactatgtgacacaaccggcgggtatgacagataccacctataatccgtctgccgcgcagtgtaagcggctgatggtcgggtttaaaccgagtgattgttacagcacgctggcggctatcggcagcggcggtgtgtattccaccccggcggatatgcagaagtggatgcagcgcttcctctcttccggcaacacgcagcgcaaagcgacggctaccaaagagcagactatctattttaaacgtggtcatctgaatgagatcaaagggatggacgttgccggtgaggctgacggtctgggtctcggctgggtgtatctggcaccggtcggggatattccggcgatttatcagaaaaccggcggcggcggcggatttaatacctatatggcgatgataccggagaaaaatatcggtgtgttcgtggtgatgacccgcaaagacggcagtaaattcagtccgttaccaaatggtgtcaatgacctggtccgctcactggcagatctgcatacccgtaattacctgtgatacaaaagaacatgcccgcatcaggtgcgggcatgctctgtatatgcagtgctgtttccttaccccttcacacacaccacctgacgcagtgtatgcacaatttccaccagtgatgactgtgcggtcatcaccgcatcgatatctttgtacgccatcgggatctcgtcgatcacatcgctgtctttacggcactccacatgggcagtggctcgctgctgatctgctactgagaagcgtttttttgcttcggtacggctcatcacgcggcctgcgccgtggctgcacgagcagaagctttcttcgtttccgcgtccgcgcacaatgtagcttttcgcccccatagagcccgggatgatccccatctgccctttttgtgctgataccgcaccttttcgtgttaccagaacttcctcaccaaaatgctgttctttctgcacatagttatggtggcagttcacggcttcctgctgtgtggtgaacggtttggtgatttcgcgggacagcgcttccagcacgcggtgcatcatcacttcacggttatgacgggcaaaatcctgtgcccagccgaccgcttccatataatcgttaaaatgcacgcttccttcttcgaaatacgccaggtcgcgatccggcagattggcaatgtgcgtctgcatatctttttgtgccagcgagataaacaggttgccgatggcattaccgacaccgcgtgaaccgctgtgcagcatcacccagacgaaatctgcctcatccaggcacagttcgataaagtggttcccggttcccagcgttcccagatgtttatagttgttggtattacgcagtttcgggtatttatcgcagatacgacggaactgctcatccagttgcatccagtggttatcaacaatatccgggacatttttccaggttcccttatcccgtccgtggcgttcagtagttcgtccgtgcggtaccgcggcttcaatagcaaagcggatattttgcaggctgtccggcagatcagacgcagttagtgaggttttcaccgcaatcattccgcagccgatatccaccccgacagcggccgggataatcgcacctttggtcgggataacactgccgatcgtcgatcccttaccgacatgcacatccggcattaccgccaggtgtttaaaaataaagggcatttttgccgtattctgcaattgcagtaccgctttcggatccaccggcacaccgtttgtccacaattttaccggcgcactgttttcctgaatcagttcattaaaatcacgatttatcatttttacattcctttcgtttggtaccggtagtattgcgataagtgtgccagttttgtttaatcaaaaaaaatttatttatctttatgatatttaacgaataattaattcaatctatttttaagataacatcctgccctgaaatcccgtatgctgtttttatcttttaatatcgtcttttatccggaaagataaatcatgtcatccgcaaagaaaaacgttgtgattggtgttctcggcacggtgctcgaccggcgcggcaagaaagccaaccgctggcataaatggcggccgagtatcgggctgtgtcagcagccggatctgcatattgaccgctttgagctggtttatcagccgggtgatatgcagaccgcaggccgggtaaaagaggatatagagcaggcctccccgcagactgaagtgatgctgcgcgaagtggatattgccgacccgtgggattttgagcaggtatataccgcattgctggattttgccactcactacccgtttgatactgaaaatgaagagtatctggtgcatatcaccaccggcactcatgtggtacagatttgctggttcctgctgaccgaagccagctatctgcccgcgcgtcttatccagactgccccgcgccatgatgcacgggataaagatcctgccggggtgtataccattattgacctcgatctcagccgttatacacagatcaccggacgctttcagaaagagcagcaggcacaggtcgcgtttctgaagtccggcatcgccacacgcaatgccgggtttaataccatgatcgataaaatcgagcgtgttgctctgcgctcctccgcccctgttttactgaccggcccgaccggtgccgggaaatccttcctggcacggcggatttatgaactgcgccgcagccgccatcaggtaaaagggcgttttgtggaggtcaactgcgcgacactgcgcggcgataatgccatgtccgccctgttcggccatgtgaaaggggcatttaccggagcaattcaggcgcgcggcggactgctgaaagaggcggacggcgggatcctgtttctggatgagattgccgagctgggcgctgacgaacaggcaatgctgctgaaagccattgaggaaaaacgctttttcccttacggctcggatcatgaaacagagagtgatttttccctgatcgccggtacacaccgcaatctggcacagcgggtcagcgaaggtctgttccgtgaggatttatacgcccgtatcaatatgtggacctttgcactgcccgggctggcgcagcggcgcgaggatattgagccgaacgtggattatgagctggcgaaatacagccgcgatcagcagacccgtgtccggtttgatactgacgccaggcagcactatctcgcctttgcctgctcaccacaggctttgtggcgcggtaattttcgtgaactgagtgcctctgtcacgcggatggcaacctttgcagagaacgggcggatcaccaccgcactcgtgcaggaggaaactgaacggctgaaaaaccagtggcacggtacagaaacatcggtgacgttgcctgccggggtgggtgagattgatttatttgatcgtcagcagctggaaaccgtaattgccgtctgccgccgttcacagacactttctgatgccggacgcacactgtttgccgtttcccgtcagcagaagaaacaacccaatgatgctgaccggctgcggaagtatctggcccgctttaatctcagctgggaacagattaccggccgctgaaatgacagagccggtcagcatgcactgaccggctctgtataccgatatctgtaacggcttacttacgttttatcagcatatataagctgatcgccaggaacagcaggctcggcagcagtgcacccagcaacggcgggaacttgtaggtcaggctgagagagccgaaaatctcattggaaacgtagaacacgaatccgcaggcaatccccgtcacaacccgcacacccatcgctaccgaacgcagcggcccgaagataaacgacagcgccatcagcatcataactgccacagaaagcggtgcgaacacttttttccacaggttcagctgataacgtcccgcgtcctgcccgctctgctgtaagtaatcaacatactgatacagcccgcttatcgacaatgcttccgggtccagtgcggccacactcagtttttccggagtcatctgcgtctgccaggtcatcgacagcttctgctcaccggcaatcacataggtatcctgcagaatggattcctgtacctgactcagtgtccaggtatcggaatcagaattgtagtccgccgccgccgcactgaggatagatttcagtttgtggtcgtcgttcatccggtacagcgtgatgcccttaagctgggtttcgctgtcaacgcgctgaatatagataaagtcactgccgtctttggcccacatcccgcggttggttgccagcagagacgcgccgcttgttttctgtgcacggtagttacgtgcccactgctcaccggacggcgcgagccattcaccgacaatcatggtcaggatcaccagcgggatagcggttttcatcaccgaacccgccacctggaggcggctgtaaccggaagcctgcatcaccaccagctcactgcgggtcgccagtgcgcccagtcccatcagtgccccgagcagtgctgccatcgggaagaaaatctgaatatccttcgggatactcatgatggtatacagcccggcatcccaggtggagtattccccctggccgactctgcgcaactgatcgacaaatttgataatcccggataatgacaccagcataaacagggtcatcatgatggattgcagaatcgtccgcccgatgtagcggtcaagaacaagtactttaaacatcaggcaaccccctgaacacgggcagagccaaagcgcagacggcggacggctgtggtattccacagattcagtaccaccgcgagagccagataactgagattaaccacccacggccagaccatcggatccagcttgcccttctcgccgcttgaacgcagcgagctttgcagcaggaagaaaatcagatacagcagcatcgccggcagcatactcagtacgcgcccctgacgcgggtttacctcggagagcggtactaccatcagcgccatcaccaccacggagaaaatcagcgtcagacgccagtggaattccgcacgggctgctttgtctgtctctttccatagttcagacaaggtcatctgctggtagttactgtcaccggtttttgcatcacggtgatcaacaatcgcctgataatcggtaaaatctgtgatccggaaatcacgcagatacgcggttccctcataacgggtgcctttatccagcaccaccacctgattaccgttctctttttcggtcatatggccgccgtccgccaccacaatggacggacgctgttcgtttctcgcccagagctgggcaataaagacattagtgaacttattaccgtcaacatccccgagatagagcaccatactgccgtcatcagagactttaaactgcccgccgaccatcgcggtcacaccagggttagctctgacttcctccagtaccttttcctgatactgggatgaccacggtatcagccagactacattgacagccgccacgatggcggtaaagaacgccaggatcatagcggctttcaccagcacattattacccagaccacaggcatgcatcacggtgatttcgctttcggtatagagcttgctgtaggtcatcagcaacccgaggaagagactcagcggcagaatgagctgcgccatctccgggatacccagccccagcagtgacacgacgagtccggccgggatgctgccttcaacagcggcacccaggacttcaaccagtttttgacaaaagaagataagcaacaggataaacagaatcgcaatctgtgcttttaatgtttctcttaccagatatctaataatgatcacgcttaatacgcctgtgaaaacttgtgtttttgcatgaaaatagctaacttcgttctgtgttgactatttgtgtgcattattttgccggcctgaggatgattccggtatcagactacgtattttccttcctgtcaggaaagaaacggaattttcatgagattcaggactcataaagtgcgcacacagcttatcataaactgtttataatcgatggtgcagattagtgcgaacgctacattttagcggcaggggttgtctttgtctttaagattcannnnnnnnnnnnnnnncagttgtctttgtctttaagattcaggagagcgcatggagtttagtgtaaaaagcggcagcccggaaaagcagcgcagtgcttgtattgtagtcggggttttcgaaccgcgtcgtctgtctcctgtggtggagcagctcgataaaatcagcgacggctacatcagtgctctgctgcgccgcggcgagctggagggcaaggtcgggcagtctctgcttctgcaccatgtcccgaatgtcctgtccgagcgtatcctgttaatcggctgcgggaaagaacgtgaactggatgaacgccagtacaaacagattatccggacgaccatcaataccctgaatgaaaccgggtcaatggaagccgtctgttttctgaccgagttacatgtcaaaggccgcaataactactggaaagtccggcaggcggttgaaacagccaaagaatctctctatgtctttgatcagctgaagagtaacaaaaccgaattacgccgtccgctgcgcaagctggtcttcaatgtcccgacccgccgcgaactgccgaccggtgagaaagcgatcagccacggtctggcgattgccgccggtatcaaagccgcgaaagatctggccaatatgccgccgaacatctgtaatgccgcttatctggcatctcaggcgcgtcagctggcagacagcaactctccggtgctcagtacccgtgtcatcggcgaagagcagatgaaagagctggggatgctggcgtatctggccgtcggccagggatcacgtaatgaatccctgatgtcggtgattgaatataaaggtaatccggatccggaagcacgtccgatcgtgttagtcggcaaaggcctgacctttgactccggcggtatttccatcaaaccggctgatggcatggatgagatgaaatacgacatgtgcggcgcggcaaccgtctacggcgtgatgcgcgtggtggcggagctgggtctgccgctcaatgtgatcgggatcctcgcgggctgtgaaaacatgccgggcggcaatgcctatcgtccgggggatatcctcaccaccatgtccggccagacagttgaagtgctcaataccgatgcggaaggccgcctggtactgtgtgacaccctgacctacgccgaacgttttgatccggaaaccgtgattgatatcgccacactgaccggcgcctgcatggtcgcactcggtaaccacttcagcggcctgatggcaaaccacaatccgctggcgcacgagttactgaatgcctctgaacaggcgggtgaccgcgcgtggcgtctgccgctggcagaagagttctacgagcagatcgagtccaattttgcggatctggcaaataccggcggccgtctcggcggcgctatcacagcgggctgcttcctgtcccgttttgccacccgttataactgggcgcatctggatatcgccggaaccgcatggcgctccggaaaaaacaaaggtgcgacaggtcgtccggttgcactgctgtcacaattcctgttaaatcgtgcgggtatcagcaccgacgactgaccggaattaccgggcctttgcggcccggaaaaagcataaaggtaacggggggattgtgctatcctgagcaatccccttttctgctatcagagatattatgaaaaacgccaccttctacctgatggaacagccatccccttttgatgaccttgaggcccacgagtggctgacctgtcatctggcgggtgaagcctggcgcagcgggaaacgggtgcttatcgcctgtgagtcacaacagcaggcggagaaactggacgaagccctctgggcgcgggagcccgatgcttttgttccgcataatctggccggagaaggcccgcgttacggcgcaccggttgaactgtgctggccgcagaaacgcggaaattccccgcgtgatttgctgatagccctgctgccgcagttcacagattttgcgacaaccttccgtgaagtgatagactttgtgcctatcgatgaacacttaaaacagttggcgcgcgagcgatataaaatctatcgcagcgtcggctttacgatgaccatggccacgccgccagcttactgataaacaaagattaaaaatggaaaagacaaccgacaaccaacaggcctgcgagccgtccctggataaaacctataatccaacggaaatcgaaggtcctctttatacccactgggaaaaaagcggctatttcaaaccgaacggcagaacagacaaagaaagcttctgtatcgtgatcccgccgccgaacgtcaccggtaacctgcatatgggccatgctttccagcagaccattatggataccatgatccgctaccagcgcatgcagggcaaaaacaccctgtggcagtcagggactgaccacgccggtatcgcgacacagatggttgttgagcgcaaaatcgccgcagaagaaggcaaaacccgccacgattacggccgcgaaggctttatcgataaaatctgggaatggaaagcggaatccggcggtaatatctccaaccagatgcgccgtctgggtaactccgtggactgggagcgcgagcgcttcaccatggacgacggcctgtcagctgcggtaaaagaggcgtttgtccgcctgtataaagataacctgatttaccgtggtaaacgtctggtgaactgggatccgaaactgcacaccgcaatttctgacctggaagtggaaaaccgcgaagtcaaaggcttcatgtggcatatccgttatccgctggcagacggtgcgaaaaccgcagacggtaaagattacctggtggtcgccaccacgcgtccggaaaccatgctcggtgataccggcgtggccgttaacccggaagatccgcgttacaaagatctgatcggcaaagaaatcattctgccgatcgtcaaccgccgcattccgatcctcggtgatgaacacgcggatatggaaaaaggcaccggttgtgtgaaaatcaccccggcacatgacttcaacgactatgaagtcggtaaacgccaccagctgaccatgattaacatcatggacttcgacggcaacatccgtaccgaagccgaagtgtttgataccaacggcgaagtaactgacgcctgcagcagtgaaatcccggccgcttaccgtggcatggagcgtttcgccgcccgtaaagcgatcgtcaaagagttcgaagagctcggcctgctggaagagatcaaaccgcacgacctgaccgtaccttacggcgatcgcggcggcgtggttatcgaaccgatgctgaccgatcagtggtatgtgcgcactgccccgctggcaaaagaagccatcaaagcggtggaagacggcgatattcagttcgtaccgaagcagtacgaaaacatgtacttctcctggatgcgtgatattcaggactggtgtatctcccgtcagctgtggtggggtcaccgtatcccggcctggtatgacaatcagggtaacgtgtatgtcggccgcgacgaagacgaagtccgccgcgaaaacaatatcccggcgatggttgaactgcgccaggacgaagacgtgctggatacctggttctcctccggcctgtggacattctccaccctgggctggccggaaaataccccggaactgaaagcattccacccgaccagcgtgctggtcagcggcttcgacatcattttcttctggatcgcccgcatgatcatgatgaccatgcacttcatcaaagatgaaaacggcaaatcgcagatcccgttcaaaaccatctacatgacgggtctgatccgtgatgaggaaggtcagaagatgtcgaaatccaaagggaacgtcattgacccgctggatatgatcgacggtatctctctgcctgaactgctggaaaaacgcaccggtaacatgatgcagccgcagatggcggaaaaaatcgccaagcggactgaaaaacagttcccggaagggattgaagcccacggtaccgatgccctgcgctttaccctggcggcactggcctccaccggccgtgacatcaactgggatatgaaacgtctgtccggttaccgcaacttctgtaacaagctgtggaatgccagccgtttcgtgctgatgaataccgaagagaaagactgcggtcagaacggcggtgagatggaattctccctggccgaccgctggatactcgcagaatacaacaataccgtgaaagcataccgcgaagcgctggatacttaccgctttgatattgcgtccaatattctgtatgaattcacctggaaccagttctgtgactggtatcttgagctgtccaaaccggcggttcataaaggcaccgatgcacaaaaacgtgcggcgcgtcataccctgatcaccgtactggaatccctgctgcgtctcgcacacccgattattccgtttatcacggaaactatctggcagcgtgtgaaagtggttaccggcgcggaaggcgataccatcatgctgcagccgttcccggaatacgatgcttctctgaacgacgaacaggcactacgtgacctggagtggatcaaagagacaatcgttgcggtacgtaatattcgtgctgaaatgaatatcgcaccaagcaagccgctggaagtgatgctgcgcggagcaagtgctgatgcacagcgccgtgtcgcggaaaacagcaacttcctgaaagcgatggcgcgtctggaatccgtccgtgtgatggccgaaggcgaaaccgcaccggtttgcgtgaccaagctggtggaaggcgcagaaatcctgatcccgatggccgatcttatcaataaagacgacgaactggcgcgtctggataaagagctggaaaaaacggagaaagagatcgcggctatcgaaagcaaactggcgaatgacggttttgtcagccgtgcgccggaagctgtggtggccaaagagcgcgagcgtctcgcggcaaaccgtgaagcgaaagaaaaactgattgctcagaaagccacgatcgcagcactgtgatcctgaccttatgagttataaaaccagcctccgggctggttttttttatctcttatttcgcctgtttactttgcgtgataattatttattatcatatttatcgtttcatacgatatccacagtaatcgcccctcaggtttattcccccggctttacttttcacaataaaaataatgagataatgatatccatgacaaacagcacaacagaaaaccacaccctccgtctgatccgtccggaagataaccccggtatcgcacaggttatccgtgaggtctctgccgaacacggcctgaccgcagacaaaggctttgcggtcgctgacccgattctggacacgttatacgaggtttacagccagccgcgtgccgcctactgggtcattgagatggatggggagatcctcggcggcggcggtgtttccggccttgccggtggtgacgggaaaaccgctgaattacagaaaatgtatatctcttcccgcctgcgcggcaaaggtctggcaaaaaaaatcgccctccgggcgctggaatttgccgaagcggaaggttacaaccagtgctatctggaaactaccgctgacctgcaggccgctattaagctttatgaaaaactcgggtttatcttccttgatgccccgctgggtgacaccggccacagcgactgtgaagtccggatgctgaaagtctttactgcctgacatacagacacaaaaaaacctgccgcggcaggtttttcagtcatggcagatgattagtgtaacggcgcctcatcagcatcgtcgtcatcatcctcatcttcggcatccgggtcttcgaaataggtgccccagccgtcgtaatccacatccattttttctgccagacgcgccagctgctctacctgagcatcgatatgttccgccgtcagcccgcattcactgatgatatcgcaacataacaccacctggccgccttccacttccagctcctcggcatctgtcacttcataacccagtttgaaagcttcaactgccgctttttccagcttgtcgtaattctcactcgaaaaatggtgttcaatggtgtattgcgcatcaggatcgctgccgtcttccagcagttctgcaataatcgcacgggtttcttcgcgctgttcttctaaaaacgcatctaattctgacatggccatgtcctctgataagtgatacccgcgcattctcccacagccgcgccaattgagccacccataataaaaaagaatttcccgccggtgttgcaattgaatttttattgatttatgttgaatataaattcatcggagatacgaatatgaacccattttatcaacagtcatttttgcggttgcttgactataaacctgccgacatcgaagaactgctcaatctttctgcttatctgaaacatgccaaaaaaaccggctccgaaaagccgctgatgaaaggcaaaaatattgcgctgatttttgaaaaagactccacccggacccgctgtgcctttgaagtgggtgcttacgatcagggcgcacaggtgacatacctggggtcatccggcagccagataggccataaagagtcgatcaaagataccgccagggtactgggccggatgtatgacggcattcagtttcgcggctattcccagaaatccgccgaagcgctggcgaaatacgctggtgttccggtctggaacgggctgactgatgagtttcatccgacacaactgattgcggatttactgaccattcaggaacatgtgaaaaaaccgctgtccgaagtgaaatttgcatatttaggcgatgcccgtaataacatgggcaataccattgctgaaatggctgccgtaaccgggatggatgtccgcctggtggcgccggccgggtgtcagccgtcagaagaccttatcgcgcagtgccgcaaagccgctgaactcaccggcggtaaaatcaccctgaccgccgatgtggcagagggcgtgaaagatgcggatgtgctgtacaccgatgtgtgggtctccatgggcgaggcgaaagaggtctgggctgagcggatcaaactgctgacaccgtatcaggtgaatcaggatgtggtggataaaacgggcaatccggatgttatctttatgcactgcctgccggcgttccacgatacggaaaccaccatggggcaatccctcgcgaaagagtacggttttaccagcggtattgaggtcaccaatgatgtgtttgaatcaaaacacagtgtggtatttgaccaggcagaaaaccggctgcattccatcaaagcggtgatggttgcatctctttcaaaaaacatacaattttgaatctgcccgcagcgttgcataaatttcactcaaaaaagtgatgccaaacgcttgcgcccggttgcaggttgcgtataatgccccgcaattttgtcgggaggaaacaatggtcattgtgattatcagcaccgtaaaaccggtgccggacaatgtgacatatcacggacagccgcagcgcggcgatgtctgccattcccccgtatttatttcagaacccctcaattgaggggtttttttttgcctggccgaacacatgaggagaccccaatggcaaatccgttatacctgcgcgatatcatctcgattaacgatctcagtcgtgatgagctggaactggtattaaacactgccgcggcgctgaaacaacgccctcagcctgaattactgaagcaaaaggtgatcgccagctgcttcttcgaggcctcaacccgcacgcggctctcttttgaaaccgccattcagcgcctgggcgcgtctgttgtcggcttttcagacagcagtaacacctcgctgggcaaaaaaggcgaaaccctggcggacaccatgagcgtgatcagtcagtacgcggatgccatcgtgatgcgccacccgcaggaaggggcagcacggctggtgtctgagttttccggtaaggtaccggtgatcaacgccggtgacggtgcgaaccagcatccgacacagaccctgctcgacctgtttaccattcaggaaacccagggccgcctggaaaacctgcatatcgccatggtcggtgacctgaaatacggccgcactgtacattcgctgtcacaggcgctgtcaaaattcagcggcaaccacctgcattttattgccccgcaggcactggcaatgccgaatcacatcctgcatatgctggatgaaaacggtgtggcgtacagcgaacatcattctattgatgaggtacttccgcagctggatgtgctgtatatgacccgcgtgcagaaagagcgcctcgacccgtcggaatacgccaatgtcaaagcccagtttgtgctgcgtgcggctgatcttgccaatgtgaagacaaacctgaaagtgctgcacccgctgccgcgcatcgatgagataaccccggatgtggataaaacgccttacgcgtactacttccagcaggccggtaacgggatctttgcccgccaggcactgttatctctggtgttaaacgaaactttcccggcttaaggagcacatcatgactcaggatcataaattactggttgaagccatcaaatgcggcaccgttattgaccatatcccggcaaatgtgggatttaaactgctctcctttttccgcctgaccgagacggacagccgtatcactatcgggctgaatctgccgtccaacaatatgggccgtaaggatttgattaaactggaagataccttcctgacaccggagcaggccaaccagctcggcttttatgcccctaaagctacaattaatattatcgaagattatcaggtggttaaaaaactgccgattaacctgccggaacgcattgaaggggtgattgtctgcccgaacggcaactgcatcagtcacaatgagccggtggaaagcagctttactgttaagtccattgcacaggaaattgtgttaatctgtaagtactgtgagaaagaatttgatcaccacgcaatcattaataaccaataagatagatccaggtcagttgtccgggaaaatcagacgattataatgatggcgtttttaaaagcttaacagcaataatcatcctacaggagtccgtaatgactaaagtaatcgcaacagaaaacgcaccagcagcaatcggcccgtatgtacaggcagtagacctgggtaacatggtaatgacttcaggccagatccctgttgatccgaaaaccggtgcagttgccgacgatgttaaagctcaggcacgccagtcactgaacaacatcaaagctatcatcgaacaggctggtctgaaagttacggatatcgtgaaaacaactgttttcgttaaagatctgaacgactttgctactgtgaacgcagaatacgctgctttctttgatgagcacaaagcagtataccctgcacgttcatgcgttgaagttgcgcgtctgccaaaagacgttaaattagaaatcgaagcaatcgcagtccgtaaataatcactgcgctttctgagaacgataatgaaaaccccgcactgtgtgcggggttttttgatcagaactgccagcggataccgatattgccgctgaccccttcactgtcgccccggctgctgccgagtgagtgagagtaacgcacatcggtatacataaaggcatcgccgcccagcggcagttgcagacctgcccccagttcgccggttgtgcccggtgttttctctttcacataactgttgccgacccgggtacccttatccgcattcacaaaatcctgaatcacattagcggtgaaatagagtgttcccggcgccgtgcccggttgatcagagtgccgtgccagccttaccccggcccgtccgcgtaatccgtggcggttatcctgatccaccttaatattatgatctgtggtaaacgaactgaatgtccggtactgccagattaactgagcctgcggctcaattatccagctgctgccggtctgctcatcctgtgtcagcgtaaatggtttaccggcctcagcggacagcaccatcccccacgagtggttgctgctttccgattccctgcccgaggtgtatttgttacggctgtaatcaaggtttgccaccaggtcagtgtacgccccctctgcagtgtatgctgtggtgtatgcgccgacagcaacagtatcagtctgccctttaccgctgcgggcttcatagctttcatactcttttgctgctttattaaagcggacagatttccggtcatagaagttcagattatctttcaggtaggtcaccatcacaccactgtgacggcgggctttggtttctgcatcttccgtgatcaggaaatcatagccgaactgcgcaccccataatttggactgatatccgtaacggtttttcccgtcggtactttccagattaccgatgagttttccccacacctggttatcaccctgtgcggaagccccccaccgggcggtctgctgctcgccgctgcgctcatgcagagaacggacaagattatagcccagttccatattggcacgcggcatcaggttaaaggccggtacctccggttttaccggatcaggttgttcgggatccggtttttcaggatccggtgtgccgggatccggttttcccgggtccggtttgccgggatcttttttcggcagacgccagacataattattatcatctttctgcaccagtaccgcctgcccggcccctgccgtatctgcaaaaccgtaaaaagcattcgatcctgcggtatgatcactgacggtcaccaccggtacagaaaatttatccgcgctaccctgcgccacattgccgataatcccgttcttaatgtccacacgggtgaaaccatccgccgtgccgttaatgttcagcttatcggtatacgaggaatcatcactgttccagagagtattgacccgcagcacaccattaccgccgggatacgcattatttgtatccggttttgcggcaccgcccagataattcccgctgaccgtaaaggtggtcagcttatctgttgctgtcagatctttattacctgtcagatcgataatcccgctgtggttgttcacattcccggtcagcgtcagcggagtcaccacattatctttctcatggtgcgccagcagaacagccccgtctgtcagcgatagctgtgtcagcgacgagtccccggccagttgccagcggctggcagcgccgtttacggacaaatcaatcaccgactgatcattatcaatgcgggtcataccgttaaaataagaaccgtcccgcatattcagtgcaatcgtccccccctctgatgccagcagggtgccgtccagcgtgaatttaccgccgctctcctgaatatttttctgaatatttaaaccgtctttatctatctcatacgccagatagccgcttttaatcagcgatttttcgcctttactgtgcatgaccacgctggcggtatctgccacatccctgaaggtcacatcgccgttcagcaaaatagtgcccggccgtacctctgccgtatcattggcgttgttggtaccagggttttgtttttctgcggaggcaaaaagataatattcgccggatggcgcactgacagtgacattattccccaactgaatcagcccgcctttattggcatagactgccgcactgcggtaattccggctggagattgaggaagaagagatagtggcatcgctgccgataatgacataagagtcacctttgttattatttcttttcccgaaaaccatatcccagaaaccaaacccgccgacgtcctcatcacggttaccggcataaaccgcataaccggttccttccgtgctgttatcggtctctttgccggtttgtctgatggtataaccgtcccccagcacgataacactctgtgagcccttacccagattattattcgcacggacgcccataccttccgcttcaataacaccgtttttacccaggaaagtgacgatattcaccgacggtgaaagcgatccccgcggtccgccgagggttcctaaattaataccgtccgcactgttaccggtcgtttttatattgacagtaccggcggaaataaaccggctgccgttattgccgttactgaatataccatcggcctggccgccggttgtggtaatagtaatattcttcaggttatatctgctgttattcagatagacaccatagccctgtaatggcgccagaccagcggttttatccgttgtcaccaccacatcatcaccctccgcactgctgcagaaatagagtgtggtgtcacaggtaatcgtggccgcatggcccgtcagcggaagcagtacaggaaggatataaaagggaagcgtattgatcgtctttatcttcatattatcaccaccttctgatgattaattgtgccagataaactacgtggtttatttatgtataaatcccggaagcggattttgaaagataaataatgaaatgacgattaattcaggtgtttatacgtaagacgactcttttagaactatttaatcacttttaatttattgattttaaatgataaaaaatctgttaaattacgatataaatttaacgtatttcgttatgttttatcactttattgagctgattaaataacaggatgtttattggtgataaatcttaatattaaaatttatcacctccttttatacccgtaaattttccagaagctgatcaaaagagactctgaccttttcataagtggcctgcggatcatcactgtgcacaatccacatcgcacattcatacagcccgccattaataaacagtgccagcacatccggtgccacctgttttatccgtccggtttccatcaggtgtgtcagacgacgggagatcccctgcacacaggccagttcgtgggatttgagaatggaaaagtccagtaccgaggccgcatcgcggaacataatccgctggacttccggctccagactcatcgccagatagccctgacagcgggatttgaaagctgtccactcatcggcctcatctttttctgcggtatccaggcgcgcatccagctcccgatccaggtcctgcagcaccgccagaaacagcccttttttatcaccaaagtgatgatacagcgccccccgggtgagacccgcctgagccgtcagatcatccatcaccgtcgcggcgtacccggccttaccaaactgctggcgtgcagcacggataagcttggtccgcgtttcttctatcatctctgcacgtggcttgtggctcatttcattactcctgcggtcagctctttcagccgaggattatagcacttttttattgacatacatcgcgtatgtcaatagattcacatacgcaatgtatgttaattgcattacagccggctatctccggcagttaaaaattatatccgcctgtaatataacggatatctgtgaggttgttatgttcagctcttatcgcgtcatctttcagcatcccggcaccaaagccttttcaggggcgggatttatcgcgcggatgaccgtctccatgatggggattgggatcattaccatgattgcccaattgcgtgattctttctttatggccggggtaactgcggctgtttataccttttcggcggcattctgcgccccgctgatcgcccggctggtggatcgctacggacagagccggatcctgccgaagacgctggtgatcagtgttcccgcgactgccgccctgctgttatgtacggtttatgatgctcctgactgggcaatctggctgtctgctgtttttgtcggggcgatcccgagcatgcctgccatgatccgctcccgctggacacatatctataaaggtgacccgcgtttacagaccgcttactcctttgagtcggtgctggatgaaatcagctttattatcgggccgccgctgtcagtcacgctctgtatcgccctgttcccgcaggccggtccgctggcggcaattatttttctgataatcggtaccgcgctggtggtctgtcagaaacggactgaaccgccggtgcacaaacgcgacgggctggcaaaaggcaccgtgctgcgcctgcctgcgattcagctgctgatggtggttctgcttgcgctcggggtgattgtcggaacagtggatgtgctggctgtcgctttcgccaatgcacagggatatccggagggtgccagctacgttctgtccgtgtatgccgccggttcctgtatcgccgggtttatcttcggtgctgtccggctgccgttcagctacacaaaacagttcgtctttaccgccgccgccacactgctgaccactctgccgctgctgctggtcaccaacctgaccgggctggggctgaccatgtttgtcgccggtttcttcttctcgccgaccatgatccttgctatcggctttgtcgagcgtgaagcaccacctaatatgctgacagaaggctttacctggctcatcaccgggctggcggtcggtgtggcactcggctctgccggagtcggtatgatcattgatacttacggcatcgatgccgggttcctgctggctatcgctgcggggatctgcgtactgctcaccgcctgcatcggttatgttttcgtcttcaaagatgataaaaacagcgctgataagtgacagaaataacttttaatataattttcagcaatcaaaccgcacatttttacacttaaccggagtgtgcggtttgcctgatgtcgccagaattctttgacttaaatcaatttcaatcgccttattccggagtaaatctatatctagtgctatataatacaaagcacactagatatagtatttattcacagtgttatccacaacgccatgaagccgcattatgacaggttttgccctgtggataaccaaactgccggagagaagcaaagtgcacactatcgtgattaagcgtgatggatgtcaggtaaattttgatgaatcacgcatacgggatgccattaaaagagccgccaaagccgcacgtgttaatgatgatgactactgctctcaggttgcctcccgggtagcctcccagctgggtgaccggaaaaaggtcgatatcggtgagatccaggacgccgttgaaaaccagttaatgtccggagattacaaagagttagccagaacctacatcgaataccgtcatgaccgtgacgtggcgcgtgaactgcgcggccgcctgaataacgagatccgcggactggttgaacagagtgacatgtccattctcaacgagaatgccaataaagacagcaaggtgatcccgacacagcgtgacctgctggcaggtatcgttgccaaacactacgcaaaacagcatattttaccgcgtgatgttgtaatttcgcacgaacgcggcgaaattcactatcacgatctggactacgcgccgttcttcccgatgtttaactgtatgctgatcgatttaaaaggcatgctgactcatggctttaaaatgggtaacgctgagatagaacagcctaagtccatctctaccgcgacggcggtaacagcacagattattgcccaggtggccagccatatttacggcggcaccaccattaaccgtatcgacgaaattctcgcaccgtttgtcactgccagctataacaaacatctgaaaactgcaaaagagtggcagatcccggatgcggaaggttatgccaacgcccgcacagaaaaagagtgttacgacgccttccagtcactggaatatgaagtcaatacactgcacaccgccaacgggcagacaccgtttgtcaccttcggcttcgggctgggcacctcaaaagaatcccgcatgatccagcaggcaattttacgtaaccgcatcgccggtctgggtaaaaaccacaaaacagcggtattcccgaaactggttttcgccattaaaaaaggtctgaaccaccagtacggcgatccgaactatgacatcaaacagctcgcgttagagtgcgccagcaagcggatgtatccggatatcctgaactacgaccaggtagtgaaagtgaccggctcctttaaaaccccgatgggctgccgcagcttcctcggtgtctatgaagaaaacggtgaaatgatccacgacgggcgtaacaacctcggggttatcagtctgaacctgccgcgcattgccattgaatcacagggcagcgaagcggatttctggtcactgctggatgagcgtctggcgcttgccaagaaagcgctgatgacccgtatcgcacggctggaaaatgtcaaagcccgtgtcgcgccgatcctgtatatggaaggtgcctgcggcgtacgcctgaaagcggatgattccgtcaccgaaatctttaaaaacggccgcgcctcgatttcactgggttacatcggcatccatgaaactatcaatgccctgaccggcactgaaacacacatgtatgacgacgaacagcgccgcgccctgggtgtcgccatcgtggaacgtctgcgtcgtgcaaccgacgagtggaaaaccgaaaccggctacggtttcagcctctacagcaccccgagtgaaaacctgtgtgaccgtttctgccgcctggataccgccgagttcggcattatcccgggtgtgactgacaaaggctactacaccaacagcttccacctcgatgtggagaagaaggtcaatccgtacgataaactggatttcgaagcaccgtatccgccgctggcgaacggtggtttcatctgctacggcgaatacccgaacctccagcacaacctgaaagcactggaagatgtctgggattacagttacgaccgcgttccgtactacggaaccaacacgccgattgatgagtgttatgaatgcgggtttgccggtgagtttaactgtaccagcaaaggctttgtctgcccgaaatgcggcaaccacgatgctgcccgtgtttctgtcatccgccgtgtatgcggttacctcggcagcccggatgcccgtccgtttaacgccgggaagcaggaagaagtgaagcgccgcgttaaacacctgaataacggacaattaggctgagttgtgaattatcatcagtattatcccgttgacgtggtcaacgggccgggtacacgctgcaccctgtttgtttccggctgtgttcatcagtgccgcggctgctataaccagagcacctggcgcactgattccggtgtgccgtacacccgggaactggaagatacgattatcgccgacctctgtgatacccgcgtaaaacgtcaggggatcacactgtccggcggtgatccgctgcatccgcacaatgtgccggagattctggcactggtgcagcgcatccgccgcgagtgtccgccggaaaaagatatctggatgtggacaggctataaactggatgaactgaatgatgcccagcgggaagtcattgggcatatcaatgtgttagtcgacgggaaatttgtgcaggatctgcatgacccgatgctgatctggcgcggcagcagtaaccaggtcattcactatctgcgctgacacccgcgctgaaccgcgaccagtgcagtttctttccgaaccccagcgtattattcaccatctttatctcatccagccgcagcccccacaacggggttttggcggcgacagccaccggaaagcggcggcagtaaacggctctcacctgcttttcctcttccgctgacaatgtcgtaatctctcctctgaactggatcccgcggatttttgccacggtcaccgtctgtgcggaaatggttcccgccaccagcgggttctgctgcatcagggtaccgtgccgggtatgcggctcagtgaggaaataaagcatcattgcgccagtgtccgcgacataaaagcaggaagcgcaccacaggtcatctccggcggtggcacacagcgtaacgacatgatttttcttcagataagacaggattgaatcgtgcggtaattccatacagtacccccaataaaaccacaccggctgatatagagtatatcatccggtgctggttcagacagtcccgtcagacgggctgtattgtatggcaaatctcagggattatttatagagttctgctgtaccgcccatcaggttttcgccacctgcagaggtgatgcggaaagaagttgcaccagcttcatcagcttttttggataactcagcagtcacatccgccagggtatcaatattgctgacagagacaacaccgaccggagcctgagtgctgtgctgaacttcagttgcagcaaaagaaccaaatgaaacagcacttaacgctaaaacagcagggatgattgcagaaattttcataattttattcctcagaatatcgttagtatcatgagacgtttttgtctctctttgtgatgtgagtcatactatgcgctttccggcggaaagaaaattagctatttttgccatacttattcaattattttgatgataaaaattttaattaatcaccgggaagaactatcatgtgaaatactactgattaattagttacttgcgtgactattacccgactaaaatcaacaaaatattcgcctttcatgcaaacataaaaaggcacgattaaacaaaaatgacgacagcatcagacaaaaatacgtggtttctttacataatcaggacagaatccggatatctttacacagggatcacccgtgatgtcgcacagcgcgttgcgacacatcagtccggaaagggggcgaaatatctgcgggggaaaacagggctgcatgtggtatatcaggcggctctggcggatcgctcaatcgcttcaaaagaagaataccgggtcaaacagctgacaaagaagaaaaaagaaaggctggtcagtgaccagccctccgatttgacgacataccttaacggtggtgattattcacagctgtcaaaatgatgtgagaaattaaccagcccgtgataacggtctgcggcatcattttccagcgggtaaatcaggaaatacggtgcggtatccggccatttgcagtgcagatcaaactctgctgccggtttaaatccccacttaccgtagatttcaggatcccccagcaccacaaccgcgccgtaaccgaactcattgaggctgtccagcccctcataaaccatctgcttcgcaatgccctgaccacggtaagcctctgccaccgcaagcggtgccagtccgacccactgacaatcctcgccttccacatccacgggggtgaaaccggcgtaaccgaccacctgcccttcatcatcggtggcgaccacacccagggtcagcagaccgtcttcccgcagtgcatgcagaagatcggcttcgttgtcacgtccgaacgcgctgcgcagcagtgcatcgataccggcggcatcaaccggaatttctgtgcggatcagcatgaggtcaccactgtctgtgatttatccccgtcttccgccagcccggcctgaataaactcagccagctgcattaatgcgctgcgcagcagcggcggcataccatcgaggtcaatcgagtccatcaggtttttgacatacagacccagctcggtatccccttcaatgcgcagacggcgctggaaaaacagggtatccgggtcctctttgcgggccgcgatcagcaccagatcattagcattaccgctgaagctgacatcttcctgttcatccgcactgaccaccagacggccgtcacggttactgatataccagtgaagcgccaggtcacggacttccaccttcagccatttattttccagaaaatcgagatcaccttctgtcagcgcctcttcaaactgacgcgccagaacctgctgaagaacctgtttttgcagggtaaacggcgttaatttcagcggaaaccgcaataacgccggcccgttgtgtacgagcgaggaacgaattttggcaaacaccgtactgactccttaatctgaattactgcgtcattgtgccagaatctgcggaaataactcaggattccggtcaatttttcgtgtcattgtttctattatatacccgattttcttcctgccgcagagaacatcccgcttttatatccgcaaaccgggtgattttttgcggtaaatgttcactaacctgcctcaggtcaataccttttttagcctgccatttacaatttccgatcatttttattattcagtctgagagtctcaccatggaactattgtgtcctgccggtaatttacccgcactgaaagccgccattgataacggcgcagatgcggtttatatcggcctgaaagatgatactaatgcccgtcacttcgccggtctgaattttactgaaaagaaactcgccgaggcggtggattatgttcacagccaccggcgtcacctgcatattgcgattaatacctttgcccatccggacggtttcagccgctggcagcgggcggtggatatggctgcacagctgggggcggacgccctgatcctcgcggatatcgccatgctggaatatgctgcggagcgttatccgcacattgagcgtcatgtctctgtgcaggcatccgccaccaataccgaagctatccgtttctatcagcgcaactttgatgtgcaccgtattgtgctgccgcgtgtgctctctatccatcaggtaaaacagctggcacgcaccagcccggtgccgctggaagtctttgcgttcggcagcctgtgcattatggcggaaggccgctgctacctctcctcctacctgaccggggaatccccgaataccgtcggtgcctgctctccggcacggtttgtccgctggcaggaaaccccgcaggggctggaatcacgcctgaatgatgtgctgattgaccgctacggcgcggatgagaatgccggttacccgacactctgcaaaggccgttactgcgtggacagcaagccttaccatgccctggaagagccgaccagccttaataccctggaactgctgccggaactgatggcggcgaatatcgcctcagtgaaaattgaaggccgccagcgcagcccggcttatgtgactgatgtggcgaaagtatggcgtcaggccatcgaccgctgcaaagccgatccggacaactatgcgccggatgccgcgtggatgcagaccctaggcggtatgtcagaaggacgccagaccacactcggtgcctatcaccgcaaatggcagtaacggagagaaaaacgatgcaattttcattaggttcagtcctctattactggccgaaagcgacactggaacagttttatcagcaggcaatgcaaagcagtgcggatattatctatctcggcgaaaccgtgtgcagcaagcgccgggaaatgaaaccggatgactggataaatctcgctaaaacagttgccggaagcggcaagcaggtggttatctccacgctggcactgttacaggccccgtccgagctgaaagagatcgccaaactggtggataacggcgaatttatgatcgaagctcatgatttcggtgtgattaatatgctgcacgagcgcgggctgccgtttgtcgccggacacggcctgaactgttataacgccccggcgctgaaaattctgcaaaaacaggggatgacacgctggtgcatgcccgtagagctgtcccgtgactggctggtgaacctgctgaagcaatgtgaagagctggggatccgcgacaaatttgaagtggaagtgatgagctacggccatctgccgctggcctactccgcccgctgcttcaccgcccgttcggaaaaccgcgccaaagatgactgcgaaacctgctgtatcagttacccgcagggacgcaaagtactctcgcaggaaaatcagcaggtctttgtccttaacgggatccagacccagagcggttactgctataacctcggtaatgatctgcgttccatgcagggactggtggatatcgtgcggatctccccggatgcaccggacgatctggccgtcatcgaccatttccgtcagaatgaaaccggcgcacagccgctcgacctggcacaggcacaaaactgcaacggctactggcgtaaagtggcgggcctggaactggtggaataacggaaggaaataaccatgactgatgtttatgcccgtttaaaagcactgaatattgaactgccgccagtcgttgtaccggatgcaaaatttcagccgtatgtgatttttgataacaccattaccctctccggccatttatccaaaaccggggagcagttgaataccggtaagttcggggcggatctgaccattgaacagggtgagaaaattgcccgtcagctggctgttaacctgctcggtacactgcagggcgcggttagtgacctgaataagattaaaaagatcatcaacctgaactgcatgattaacggtacacaggattttaccgaccctcatgtggtggcgaatgcctgttcacaggttttccatgatgttttcggtgagaaaggctatcacagccgtaatgcactgactgtggcacaactgccgttcggcgcctgcatggaaatatcgctgatcgcgggtattgagtaacaaaacagaacgggcgcgatatctgcgcgcccggtatccggctctattttttctgtttcgctttcagcaaatcaatttttttctgtgccggataatgccctgcggctaatgcctgttcgtaatattccagtgcttttgtatcgtcttgtgttacaccttccccgttttcgtacatactgccgatattatataatccgcccgggctgcccgactctgctgctctcttaaacaacgacagtgcttttgtgtaatcctgtttaacaccatatccatacctgtacaatgaaccaaggttgttgatggcaacataaaaatttttgtctgccgataattgaaaataatagaatgctttctgatactcttcgatatcaacataaagcattcctaagttactcatggcaatttcattacctaacgatattgattctaaataatacttttctgctttatttatattatacttttcaaaatcagattcataatacagatccccaagtttattcaacgcctctgattttatttcattatttttattgagtgccgataataataatttctctgatttatcatagtttccggtttcatgataaagttcccccaggttcaaaagagcagcatctgaaccagatatgatgcctgctgataaaatgaaatcgcgtcctcagttcgtttttctttttttgcatacaaccctaagctgttcattgcattggatgatccaagcccggcggctttctgatacaaagaaatacccttcctgtcatctttcttaaccccaataccacgcatataataggaaccaagataaaacaatgccttttcattatcccattccgctgctttttcaaaccagtgacgagcagcctgataattttcagaaacacccagaccttcatcataaataataccaaactgaaggtatatcaaagcattcgctttattaaccagtactatattttcttcatctgaattagttatcactgcgtaaccaggcaagacaacagcgataaataaaacatacactattatttttgccatccgcagcatagttatttctccatcttacttttttgtttatttttcagatgattaatccgttcctgtgaaggataatgccctgcggctaatgctttttcgtaatactcaatggctttgttatcgtcttgttttacgccatccccatgctcatacaggctgcctaagttaaaataaccgccggggctgcccattttcgctgacttttcatacaatgaaattgcttgtgcgtaatcctgttttacaccgtatccgtgctgatataatgcaccaagattattgatagcatccggtaaatttttatctgctgccattttaatataatcaaaagctttgttatattcatcattatgaaaatacagcataccaagattatttagtgacacgtcacttcctaatttaaccgattccaaataatatccttctgctttttttatatcatagtctttgaaattaattctggtataaagtgttccgagtttatttagcgcctctgctctgacaaccctatttttacccaatgctatagtcagtatttcttctgatttagtatattcgccaatttcctggtaaagccgccccagattcaagagagatacatccgatccggctgaaatagcctgttgataaagagaaatagcttcttccgttctacctgcctgttttgccagtaatcccaggttattcattgcatgtgaagaccccagtttcgctgctttttgatacaattgtttccctttcttcacatcttgtaagaccccggtaccatccatataaaattcgccaagagaaaataaagcatctgcattattctgctctgctgatttttcaaaccagtaacgggcaaacatataattttgcggaaaaccaataccttcttcatacaacaggcccatctgaaactggatctgtgcattagcacttaatgctgcagaaatatttttttctacatttgattttttaatttcagaactgacagtatctgatgtaataattccatttgcataactatggcctgtgacaaccaggaaaactgagaaaataactaaacttaaccgtctcctgaattgatatgctaacattattaaacactccattgtaaggatacaaggttatggcaaatattatctatttaaaactggaaggaaagcaacagggtttaatctcaagaggatgctgtacatctgattctataggaaataagtatcaatccggtaaagaagattatatctttattactgaatttgactgtgcagtaacccgtgaccagaatctcagccatcatccgattgattttgtaaaattaattgataaatcttccccgttaattttagttgctatcgcaaataatgaaaaattaactctgacatttgatttcttccggacatcacaacatggcggtctggaaaaatactatacaatacgtcttaatgaggccagtattgtcaattacgcaacccgctcacctaacaatattctgcgcaatgatattcagccggaagagtatatctcggtcaaataccgtgatattacagcatcccatattatggccggaacttccggctacagtattaccgatgataacaattactgacgataacgtgcgataaggctgcgaacctcctgaacaaaggcatcatccgcagacgtgccttccggcttcgcggccagtaccacaaacgttttcagttcttcttccagaaaatagtagatcaatgatagctgtgcacgatctaatgcctgataaaccgcgtagtttctctctttcagccgttgtgccgcacgagccattttttcgatagtcccgtaactgtacagaagcgtagcaataaccaccgaccgtttgatgatcagctctttcttactgaaaagagctggaaatttataggcaacagcggcaataacaccggcagatattgcagtaacgatatatcgccttaatatatagtctcctataattatcggagtataatgtgcactcctttcatcaatataattatttgtaaaaaacataacgtcttcttctaattttctaccgtcaagttttgttacgacttcaccaagtaaactatcaagctttcttcttcttgatgccggtatattctctaaaaccgctgacacgataatctcaatcgcttctttaaaattttcatagggatcagccagaaagcggagaagataaatcgcttccgtgttctctttcagaatctgatatccgccggacaggcgtttgtgacgcaaaaaactcatcggaatatcgataaccggaaaagggaaatcagccagtgtatttatcgtccgctcagcgccgtggtagctggtcaccgcaatatcttttatcagtgcatccggaatacgactcattgccgtttcaacagaaggttcactgtccgcacattggtaataaattgattcacccagtccggtatacggtttacatgatgtttctgtttttctttcagacagtaatttcttcagaaaacgcattatccgtctgataaaataaatccgctcttttgcttcctctgaaatatccgcaatttcaccatcacgacaataaaactgatccatagggtcaaaatcgttacaataagccatatgacctccctgccattattttcagtaatattactgaatgaaacccgatatcataagtatagccggaaatacaaaatatacgggcaaaaaaaaaacccgtgtcagacacgggatttcatttatttaacgggctctttttttccgccggaataaccgtcgcagggaatgcgtaatacgccgtaattccccgtcacgcaacataccgataaataccccgagcagcgtataaataatcccgagcaccagcatcataataatatcgttctgcacgctgctgaacggtaaatccatctgattgatcccggcaatcgctttggtcgcccaggtggacggcaatgcggaagcaataaatcgtacccagtccggcatagcctgtaatggccagatagtacctgacatataaaagaccggtgtggtgacaaaggccagtgtcaggtaaatcatctccacactgcgcaggcactcggtaaccagtttgcccagtcccagtactcccagcaggaacgggaatgtcagcagccatagttcatacatcggcgcttcctggcggtatcccagcacccacggccacagggcaaagaagaccgtggagagaaacagccagataggcagcagcgcactcagtgcccccagatacaccgccagcggcggtttacctttcggcgtgctgcgcaccgcgatactgacacggacacaggctatcagcagggagtgctgtaataacatgaccagcagaccggggaatacaatcgccgcaaagctgacacccgggttatacatagccaccgtttctgactgtatcggtgaaataatcagtgacgcctgttccggtgtatagcccgcatcctgcaaaatacgggtgttatagccccccagtaactcctggtatgccttactcagttcctgctggatctgcccgctggcaagacggttcgtcgcatccccgaataccgggacagtgatatttttaccctggagaatatttcgctcaaaatcagtcggaataataatgatggcgaataactcgcgcataatcatatcgcgccgtgccgtctccaggttgtcataaccgtgcagctccactttggcggttgcatccagctgccggatcagtgagcggctggctgcggaatgatcctggtcaatcacggcgacaggcagatcccacaagaccggccggacatacaccaggctcatcacacacagtgaaaccaccagcagcatccacatcggttttgccagcattcccagcagcactttcaggaacgtctggaaatagagtttcataccgcacctccctgcaatgccagtcgtttcggtaaccggttacggacaaaaaaggcattagccaccggataaatcagcaataatgcgcagacatacagaatatgcagcagtgagacttcgcgcaggaagatatcaaacatcgcattgagtgcatgagtcagcggctcaaggttggaaataatcctggccggcaggatcatagacagctccggcaccgccatgccggaaaacgccatggcgatactgaccagcataccaatcatactgtaagccatcagcgcattgctggtgaaggtgtagagcagcaggccgatactctgtgccgccatcacataaaagaagccgataaacagcatatacagcggtttccccgccactttggcgccggaaaacgtcaccagggcagccagttccaccatcagcagagcggtaaaaaacagggtatacggtgccagtttccccaacaccccactgaacagcggcttaagtgtcagcagcatggtaccgcgcgacatactgtaaatagtcagcgtgacaacaaataactgaagcatatggatggtggcggcaaactgctgataataaatataactgccgctggcgttaaacaggctgtcgtatgacatcgtcacctgtgccagtttcggcagcgttttgcccgtttctgacgcgaggacagtgcggtactgtgcattcagttctgctatcagcccgctgaaatcctgaatcgcatagctgccggaggcataaaataacccgttgtaatacatccggactgtcggctgctttccggccagcacatcactttcaaaacgtttcgggatcatcaggatcgcgtaatcttccgcactgcccatccgctccagtgctgccgaaggatcatcccgcggcgtgatactggcgtgtgaagcagcgttcagattgcgcaccagcgtccgtgacagcgggctgtggtcataatccaccgcagagaccggcagattcagcagtgttccctctgaaaagttcgcgctgatcagtgtgaataagatcagcggaaataaccagctcagccagtggaacaccgggctgcggatggccatccgggtttcctgtgtgaaggcgtggcgaaagctgtaccagataaccggtattctcatcgtgacaccttacttatcccggcgccacagtgcactcatgccgggtcttaacccgtccacaggttgtgccggatagagacgcacctcaaaagttttcaggtcaaaatccccggtggcgcgggtggcgcgtttggtggcgtaatcccccatcggggcgatatagcggacttcagcctcaatttcctgatttttcagtgccggtactgtcagggtgattttgtcgcctttcttcacatccgcgagaatatcctcacgcaggttatagacaaaatacgcttccggcaggcggataatcgtcaccagcggactgcctgcattaaacagttcaccgatttcagccggaaccggcccgatctccccggtcaccggcgcggtaaccgtcagttcatcctgctggacttttaattcagccagtttctgttctgcctggcgcagtgctgcttcgtaacgctgacgctgctcggtgcggtcaccgtttttcgcctgatcgagctgagctttggcagcaagtacaccctgctgcgccacatcacgggcacggcgggactgatcaagctcggtttttgacacataacctttaccggccatgctgctcatgcgctgaaaatcacgctgtgcattcgccagctcagcctgagacttcgccagctgcgcagcatagttgcgcacgctctcttcccgcgtgccgttcagggactcggttaactgcgcctgagcctgatcgcgggcagccaccagcgaggcgacctgtgcttccagctccggactggtcaggcgaatcagcgcctgtccctgtttaacgtcgtcaccgcgctcaatcagacgctcaacaacacgccctttagctttcgaggagacaataacctccggtgcatcgacttcaccctgtaataaaagatactggttgtgggcacgaaaaagtgcagccatcgcaattaagaccagcatcagcaggatcagatagattgttctttttttcattcttgatttcggccttaactatcacttgtgaaactattcgaaatggaatcatcccgaatgaaattgttctggataaaacgatgaagaaaggggaaggtttcagtatcactgatttcagcagaaaccgttaagatatttgtgcgccagatcacagcataataccttcaatcttagcctcacacacctgttacacaactatttttaatataaaatctcagatagttacaaataatcctcctccggcaagtgatccgacagaaaaatgtatgactacaacctgattttcctgctgcttcagcagatgtgtgtgtacctggttatcgcctgggtgctcagcaaaacgccgctggtgctgccggtcttacaggtgactgtccgcctgccgcacaagctgatgtgctatctgattttctccgttttctgtgtcatgggcacctatttcggactgaatatcaatgattccatcgccaacacgcgggctatcggctccgtactcggcgggttgctgggcggaccgtctgtcgggctgctggtcggttttaccggcgggctgcaccgctattctctcggcgggatgacggcgttcagctgtatggtgtccactattgtcgaggggctgatcggcggtctggttcaccgttactatatgaagcgcgggcaaatcaataagctgtttaatccctggacagcggccggcgtgacctttgttgccgaactggcgcagatggcgattattctgttactggcacggccgtttaatgaggccctgagtctggtgaaagatattgccgcaccgatgattatcgccaataccatcggtgccgccatgtttatccgcatcctgctggacagacgtgccatctttgaaaaatacaccagtgccttttccgcccaggcactgaaactggcgatcagcacagacggcgtgctgcgccagggatttaacgagaccaacagccgccaggtggcacaggtgctgtatgatgagctgaatgtggccgccgtggctatcacggatacagaaaaactgctggcctttatcggtgtcggtgcggatcaccatctgccgggcacgccgattgcctcgcgttactcccggcaggccattgcccataatgaggtggtctatgccgacggtaacgaaacgccgtactgctgttcgatcaacccgcactgtaaactcggctctacgcttgttatcccgctgaccggggagaataagcaggtggtcggtaccatcaaactgtatgaggtgaagaaccgcctgttcagctccattaaccgcacgctgggagaagggattgccagcctgttgtcggcacaaatcctggccgggcaatttgagcgaagtaagcagtcactactggaaacagaggtgaaattgctgcatgcccaggtgaatccgcatttcctgtttaatgccctcaataccttacaggcagtgatccgccgcgatgcggaacaggcgcggcatctggtgcagaatctctccacctttttccgcaaaaacttaaaacggccgggggagatagccactctcgcggccgaaattgagcatgtgaatgcttacttacagattgagaaagcccgcttccgtgagcagctcagtgtggatatcgccattccggatgcgctgaaacaggccagtctgccggtcttttcgttacagcccattgtggaaaatgcgataaaacatggtacatcacagatatttgagcagggaaaaattaccataagcgcacgggcggagggcaatacgcttgtcatcctgatcaccgataacgccgggctgtatcagccgaccgggatgagtgacgggcttggtatggggctggtcgataaacgcatcaaagtccgctatggtaaacaatacggcctcagtgttcactgcgagccggaagtaaaaacaaccattattctgaccttacccttcgactcaccggcaggggcggcagcaccgcctgacaactaaaaaaatgataatgacacaatgaatgttttaattgttgatgatgagccactggcccgggaaaacctgcgattactgctcgatgcgtatcctgacatccatatcctgggtgaatgcaccaacgccattgatgctatcggaaaaattcaccgcctgaagccggacgtggtgtttctggatatccagatgccccgtgtcaccgggctggaaatggtcggtatgctcgatcccggccaccggcctgcgattgtctttctcaccgcctttgaagagtatgccttacaggcttttgaggaggatgcgtttgattatctgctcaaaccggtggaaaaagagcgcctggacaaaaccctgaaccggctgcgccaggggcagatccgcccggcggagaccccggaacagacagaacagctgcgctacattccgtgcagcgggcacaaccgtatctggctgatgccggttgaggatgtggtgtatgtcaattcccgtatcagcggtgtgtttgtgatgagcgcacacggccaggaaggatttactgagctgacactccgtactctggaaacccgtaccccgctgctgcgctgccaccggcagtatctggtcaatctgacccgcctgcgggaaatcctgctgggcgataacggccaggccgagctgatcctgagtaacgatgaacccattccggtcagccgccgctacctcaaacccctgaaggaagcgctggggctgatttaataccaaaatccggacgcataaaaaaagcccggcagggatatccccggccgggctttttatgattcagagaatcaattatgcatcattattggtacgacggcgcggtgcggagtttccgccttcttcgcggcggaagctgcggcgctcgccctgcggacggcgatcgctgttgccacggtcagaacgctcaccgtcacggcggttaccaccaccgaaactgcggccaccgttaccaccacggtcattaccaccgctgcggcgttcacggttgaacggcttcgcatcaccgactaatgtcatgttcattggtttgttcataacacgggtacgggtgaagtgctgtaacaggtcagtcggcatacctttcggtaattcgatagttgagtgagtatcaaacagtttgatgttaccgatgtaacggctgttgatatcaccttcgttagcaatcgcgcccacaatgtgacggacttcaacaccatcagtgcggcccacttcaatgcggtacagttccatatcacccacgtcacggcgttcacggcgcggacgatcaccacgctcaggacgatcaccgaaacggtcgttgcggtcattgcggcggcgatcatcacgatcgttgaactcgcggcgcggacggcgtggtgcatccggtggcagaatcagtttgcgctcaccttctgccattttcagcagaacagcggccagggtttccatatcgatatctgcatcagactcatcgctgtctgccggaaccagttttttcagcagtgcacgatactgatccaggttgctgctttccatttctgcatggatagtggcagcgaatttttcctggcggcgctggctgatcatctctgcatccggtaattctacctcagggatggtcagtttcatggtgcgttcaatgttgcgcagcaggcggcgttcgcggttttcaacgaacagcagagcacggccggcgcggcccgcacgaccggtacggccgatacggtgaacataagattccgcatccatcgggatatcgtagttaacaaccaggctgatacgctcaacatccagaccacgggcagcaacgtcggttgcaatcaggatatccagacgaccgtctttcaggcgctccagcgtctgctcacgcagtgcctggttcatgtcaccgttcagtgcagcgctgttgtagccgttacgctccagggtttctgccacttccagggtcgcatttttggtacggacgaagataatcgccgcatcaaaatcttccgcttccaggaaacggaccagtgcttcactcttacgtgcgccgtaagcagtccagtagctctggctgatgtccggacgggtggtgacgctggtctgaatgcgcacttcctgcggatctttcatgaaacgacgggtaatgcggcggatagcttccggcatggttgcagagaacagtgctgtctgatgctctgccgggatctggctcatgatggtttcaacgtcttcgatgaagcccatgcgcagcatttcatctgcttcgtccagtaccagacctttcaggttggataaatccagggtgccgcgttttaagtgatccagcagacggcccggagtcccgacaaccacctgcggcccctgacgcagagcacgtaactggacgtcataacgctgaccgccgtacagggcgaccacattcacgttacgcatatgtttggagaaatcagtacaggcttccgccacctggaccgctaattcgcgggtcggtgccagcaccagaatctgtggtgctctcaggttcggatcaatattgttcagtaacggcagaccgaatgccgccgttttaccactacctgtctgtgccatacccaggacatcacgtccggcaagcaggtgcggaatacattgttgctggatcggggacggcttttcgtagcccagatcgtccagtgcagtcaaaatatcagctgataaaccaatgtcagcaaaagagatttcagtctcagtggtcatgtaaaggtgcctcatacaaaatggcggccagtctacacaacccatcggaaagcatgtcggttgttttcatttaaaagtgtgaactggctcaaataaaattataaaacgaacaaaacatccccccatcactttcgcgatggtgaaaaattaacgggttgaagtgtgttcgtcagctattgtggatctgaatccgtcaggtcctgttcttcatcacctaacagagctaattccaacaatgcgtagcggtgctcaacgaaattgtgtgcgttgttggcaaccgtcagcttgaacagcgtttcagcgctgtccgtatcccccagactcaggtagtatttacctaaatagaagtaggtttcactgagatgttcagcgagcgaagtgttatccgttgagaattccttcagccgatcaagcagtgtcttttcactgatgtcgccgagatagaattcagcaatattccagccccattgtccgcctttcgcctgctgatagcgctgacgtaaatcggtcagtgctttcttcggatctatctctttatcgacgagataaagccacagcgagcggaacggatcgtttggatcatcctgataaaacgccagcaaatcatcccgcgccaccggataccggcccccgtaatacagggcaataccgcggttcatacgcgcgtagttataagttggatcaagctctaatacagaatcatacgcttcataggcagcatcaaagttgcctgcctgcgtaaaataaatgcccaggtaattaaatatctccggaatatccggacgcattgataacgcaacagtaaaatcgttacgtgccaatgcacgcaatccgaggctgtcgtacaacacaccacgctgataaagcagctgggcgtactcgtcctcagttaatgaccggcttgccagtatttgttccattcgggcgaggatcacttcctgctgtaatgatggttgcaggggtactgcaagtaaatccccggagtgccagtttttaccgctgctgcatcctgcgataaaaattatagccgcaatgctccaccaacgcagaaaaaaattcatttcctactcccgaagtcagatccctgaaaggataatcctctgactgacaataaccgagtgcattttgctttttttgccgaatggcgccctttttacaggacgccacgacttacgtcaaattttattcagcgttatttgcatcaggggttgcatccgaagccggagctgcatcctgactgactgcttctttcatgctcaggcggatacgaccctgacggtcgatttccagtaccttgaccggtacttcctgacccatttccagataatctgatactttttcaacgcgtttgtcagcgatctgagaaatatgcaccagaccttctttaccgccgccgatagccacgaaagcaccgaagtcaacgatacggacaactttaccgttatagatacggccgacttccacttctgcggtgatttcttcgatacggcggatagccatcttcgctttatcgccgtcagttgcagcaatcttcacagtaccgtcatcttcgatttcgatagtggtgccggtttcttcggtcagggcacggatcacagaaccgcctttaccgataacgtctttgatcttatccgggttgatgcggatagtgtgaatgcgcggtgcaaactcagagatatcagcacgtggtgagttgatagcctgttccatcacgcccaggatgtgcagacgcgcacctttggcctggttcagagccacctgcatgatttcgctggtgataccttcgattttgatatccatctgcagggcgctgataccgtcacggctgcccgcaactttaaagtccatgtcgccgaggtggtcttcatcaccgaggatatcagacagaaccacgaatttgtcgtcttctttcaccagacccatcgcgataccggcaaccgctgatttcacaggaacacctgcatccatcagtgccagagatgcaccacagactgacgccatagaagaagaaccgttggattcagtgatttctgaaaccacacgcacggtgtacgggaattcttcctgggatggcatcactgccagcacaccacgtttagccagacggccgtggccgatttcacgacgcttcggtgaaccgaccataccggtttcacccacacagtacggagggaagttgtagtggaacaggaaggtgtcagtaatttcacccattacctgatccagagtctgtgcatcacgggcagtacccagcgttgctgttaccagcgcctgagtttcaccacgggtgaacagagaagaaccgtgagtacgcggcagaacaccggtgcggacatccagtgcacggaccatgtctttttcacggccgtcgatacgcggctcgccgttcagaacacgggtacggacaacagatttctcaaccgcagccaggatgtcgctgatttcgtgtttcagttcgccggtcagctcttcgccgcgtgcggcaaattctgcttccagtgcactgatggttgcatctttaatgatatcaacctgtgcgtaacgatcctgtttctcagtaatacggtaagcatcacccagcgctttttcagacagttcagcaacgcggtcacgcagagtctggttaacaggctctggctgccagtcccacttcggcttaccggcttcagcggccagtgcgttgatgttttcgataacaatctgctgctgctcgtggccgaacacgaccgcacccagcatttgttcttcggtcagcagctgtgcttctgattcaaccatcagaaccgcacctttggtaccggcaacaaccagatccagtttgcttaccgctaattcgtcagtggtcgggttcagaacatactggtcattgatgaaaccaacacgtgccgcaccaatcgggccgttgaacggaataccggacagtgccagcgccgctgaggcaccaatcattgccacgatatcagggttaacctgcgggttcacagataccacggttgcgatgatctgaacttcgttcaggaaaccttccgggaacagcggacgtaacggacggtcaatcagacgtgcgatcagagtttcgccttcgcccggacggccttcacgacggaagaagctccccggaatacggccggcagcgtaagtacgctcctgatagtttacggtcagcgggaagaagtcctggcccggtttcatttttttctggccgacaacggtaacgaataccgcggtgtcgtccatgttaaccattacagctgctgtcgcctgacgggccatcatgccggtttcgatagtgacagtgtgctgaccatactggaatttacggattgtcggatttaacaaaataatatccttctgggtctctcaccccggcaggggtaagtagtgaaatggttccttcagatacatcctcgcgactaatgacaaccttttcctgctgccggaaagtgctctcattagccgcgcgaatagctgtaccgaagaatcgttattattgcggcaacagctcagtgtgccgcattcagaagaaaaggggccgtcggcccctttccactgaaacttgtctgaattagcgacgcaggcccagacgctcaagaattgaggtatagcttgctaagtctttgcctttcagatagttcaggagcttacgacgctgagcaaccatacgcagcagaccacgacggctgtggtgatcttttttgtgctctgcaaagtgaccctgcaggtggttgatctgtgcagtcagcagcgcgatctgaacttcgcttgaaccggtgtcgttttcgccacgaccgaaatcagcgacaattttcgctttcgcttcagtgcttagagacataatagaactccaaatatactttgattaataaaaatgagtgccgatctctaattcagcatctcagggaaattgccgcgttattctacgccgcctgcgccctgaacgcaagatgcggcaatgcttattccgtgtattccacaacaagacggcgcggtgccaccagcccgtcctcactaatcaccgcaaggccgataaactgcgcatcatcaccctgcgttacgcgggttaatgtctccggtgccaggtcgtgcggagcccgtaccggctgccccagcttaaaatacccggcagtcacgtccgtcagattgacctgcgggaaatgtgacacggcggtatccatcggcagcagcagcggatccagtgcggtttcgagcggagtttcagactcatccgccacacggcgcatttcctgaagctgttccagtgtcaccatccgttctgccggatacgtggccacctgcaaccggcgcagcatggtcacgtgagcaccgcaaccgagtttctcaccgagatcatcaatgatagtgcggatataggtgcctttcgagcagtgaatttccagttccagctcttccccttcatggcggataaacagcagttcatacaccgtgatcgggcgggcttcccgctctatggtgatgcctttgcgggcatattcgtacagcggacgtccctgatgtttgagcgcggaatacatggacggcacctgtaaggtatcgcccctgaatgactccagagcagccgcaagctgttccgccgtgaatgacagcgggcgctcactgatcacctcaccctgtgagtctgaggtgtccgtacgctgccccaggcgggcaatcacgcggtaacgtttgtcggaatccagcaggaactgtgaaaacttggttgcttcaccgaggcagaccggcagcataccggtcgccagcggatccagcgcgccggtgtgaccggctttggcggcattaaacagacggcggaccttctgcaatgcatcattggatgaaatgtcctgcggtttatccagcaggacaatgccgttgatattacggccacgacgacggcgtgccatcagttaccctctttgtcgtccgcagatttacgcatatcctggtcgtgtttgatcacatcagacaccaggttagacatacgcatcccttcgaccagagagctgtcatattcaaatttgagttccggaataatgcgcaggcgcatctctttccccagcagggaacgaatgtagccggaaatatcatttaagactttgatacctgttttcacctgctctgaattatggtcttcatccataaagttcagaaaggtcacaaatactgtggcataggccatatcgcgggataaatccacgccggataccgttgccatccccacacggggatctttaatttcacgctgcaggataatcgcaatttctttctgaatttcctgtgaaacgcgctgagtacggctgaattctctcgccataatttctctcctgaaaattcggggggccataagccccccaattatatcatgttatgtcataccgtcaggtgatcagatagttcgctgaacttcaatcacctggaagacttcaatcatgtcgcccgggcggacatcattgtagttcttgacaccgataccacactccatcccgttacggacttcagcaacgtcatctttgaagcggcgcagagattccagctcgccttcatagataaccacgttgtcacgcagaacgcggatagggttattacgcttgatagttccttccgtcaccatacaaccggcgatggcaccgaatttcggtgaacggaacacatcacggacttctgccagacccatgatttcctgtttgaattccggcgccagcatcccgctcattgcctgtttgatttcatcaatcaggctgtagattacggaatagtaacgcaggtcaacgctttcgctttcaatcaggcggcgtgctgatgcatccgcacggacgttaaagccaaggataatcgcgttggatgccgcagccagcgtggcgtcagtttcagtgataccacccacaccggaaccgatgattttcactttgacttcatcagtcgacagtttcatcagtgaatcggtgatagcttcacaggtaccctgcacatcggtcttcagaacgatattcagttcagaaaccttaccgctttccatgttagcaaacatgttttccagtttggctttctgctggcgtgccagtttcacatcacggaatttaccctgacgatagagtgccacttcacgggctttcttctcgtcacggacaacggtcgcttcatcaccggcagacggtacgttggacagacccaggatttccaccggaatggacggacccgcttcagtaatatcctgacccagttcgttacgcattgcacggatacggccgtattcaaagccgcacagtacgatatcgcctttgttcagtgtaccgctctgtaccaggatagttgcgaccggaccacggcctttatcgaggtaagattcgataaccacaccgctcgccataccggcacgcactgctttcagttcgagaacttcagcctgcagcaggatagcgtcgagcagatcgtcgataccgatacctttcttcgcggaaacgctgatgaactgagtctcgccgccccactcttcagagaggatgccgtactgagacagttcgttacgtacgcgatccggatcagcttccggtttatcaattttgttcaccgcaaccacaaccggcacacccgctgctttcgcatgctggatagcttcgatagtctgcggcatcacgccatcgtccgctgcgacaaccagaacaacgatatccgttgcctgcgcaccacgggcacgcatggaggtaaacgcggcgtgtcccggagtatccaggaacgtgatagcgcctttatcggtggtcacatggtaagcaccgatatgctgggtaataccgcccgcttcgccggaggcgactttggtggaacggatatagtccagtaatgaggttttaccgtggtcaacgtgacccatgatggtcacaaccggcgcacgtggttcagcctgagcttcacccatatcacggtcgttcaggatcgcttcttccagctcgttctcacggcgcaggataactttgtgacccatttcctcggcaaccagctgtgcggtttcctggtcaatcacctggttgatagtcgccatagcgcccatcttcatcatggttttaatgacctgagaacctttcaccgccatcttgttggctaattcaccaacagtgatggtttcgccgataaccacatcacgggtaaccgctgcaaccggcttgttaaagctctgctgcagtgagctgcctttacgctgtttcttaccgcgcggcagttgcgcacgggcttcttcgcgatcggctttctcagagtgacggttgtttttcttctggcggacatttttcgcgccacggccgcggccgcggttatcgccttcaactttcgcatcactttcatcttccgcttcacgggcgtgagcagaggtggtggtgtgatagtccgcgctttctgtttcttcgctgacaggagcagaccatttctcgccgttttcttcggccagacggcgcgcttcttcagctgcacgtttcacttcagcttcaagtttgcgctgctgttcttcttcagctttgcgtttgatttcagcggcttcggcttcgcggcgcactttttcgctgttttcccgggtatcagccggggctgatttcgctttattttctttcacgttattcttttccgctgcttcacgcttagccggttctgccgcttgttcagttactttcgctgctgccgcttcgcgttttgccttttcttcagcctcacgtttggcttgcgcctcttgtttagctttttcttcggcttcacgacgggcctgctcttcagcttcgcgtcttgcctgctcttccgcttcacgctgtgcctgctcttccgcggcttttgcctgttcagcggcatcgcggtttacatatgtgcgttttttgcggacttcaatattaaccgatttgctcttgccaccggttaccggaacactcagcgtactgcgagttttgcgctgaagtgttaatttacccggctgacttgccccgccctgttcgcggttcagatgggccagcagggcctctttttcttgctgggaaacgttatcagacgccgtttttttgatgccggcatcagcaaactgctgtaccaggcgctctacggaagtctgaatttcgtctgccagtgattttaccgattctgtcatgctgctccttcccgctacaaattaagatgcatcgtcgccaaaccaacagatattacgcgctgccatgatgagttcacctgctttctcatcattcagaccttcgatatccgtgaggtcatcgataccctgctctgcgagatcttcaagggtacaaataccacgggaagccagggtgaatgccagtgtgcggtccatgccttcaaggtttaacaaatcatccgccggtgtggtacctgactggctctctttctgtgccagttcgagcgttgttaaagcggcttttgcacgttcgcgcaggacttcaacggtttcctcttcgaggccgtcgatttccagaagttcgctgaccggcacatacgccagttcttccagtgtggagaaaccttcttccactaataaggttgcgaaatcttcatcgatgtcgagatgcttaacaaaagtttcaatggaagcgtgtgcttccgcctggtgtttcgcgttaagttcctccgcggtcatgacgttcagttcccatttgtcatcaccacgatgttttttcagcagttgtgcagcgagacgcacattctggccgttacggccaatggcctgtgcaaggttgctgctttccacagcaacgtccattgtgcatttgtcttcatcgacaacaatggatgcaacatctgccggagccattgcattaatcacgaattgcgccgggttgtcatcccacaacacgatatcaatccgctcgccgcccagctcaccggaaacggcctgaacgcgggcgccgcgcattcccacacatgccccgacagggtcgatgcgtttgtcattggttttcaccgcgattttcgcacgggaaccgggatcacgggcagccgctttaatttcaataatctcttcgccgatttccggcacttcgattttaaataattcgaccagcatttccggacgggaacgggtcacaaataattgtgcaccacgggcttccggacgaacatcatacagaactccgcggatacggtcacccggacggaagttctcacgcggcagcatatcttcgcgcataatgactgcttccgcattattccccagatcgagggtaatgttttcgcggttcacttttttcaccacaccggtgatgatttcgccctgctgctcgcggaactgatcaaccaccatcgcacgctcagcttcgcgtactttctgtacgataacctgttttgcggtctgagtggtgatacggtcgaaggtgacagattcaatctgatcttcgatatattcgcctaactgaatgcccggcgtttcataatcagccgcttccagtgtgatttcacgggtcggctgagtgacttcttctaccaccatccagcggcggaaggtatcaaaatcaccggatttacggtcgatttccacacgaacatcaatttcctgttcgtattttttcttggtggcggttgccagcgcagtttccagagcctcaaaaattttctcacgaggaagcgatttttcgttagaaactgcctcaacaacagccagaatttctttattcatcctagttgcctcttttgaactttatattaaaagtggggtaccaggttagctttctggatgttgccaagtgcgaacacttcgtctttgccatccactgtaaccgtgatcatttcaccgtcgacggctttgataataccctgccatctgcgacggttctgcattgcgattcgtaaagtcagtgagacttcctcaccggtaaaccgctgataatgttcagccgtaaataacggacgctccattcccggagacgaaacctcaaggttataaacggttgtaataggatcttcaacatcaagaacggcactgacctggtggctcacgtccgcgcaatcatcaacagtgataccctcttcactatcaataaaaatacgcagtgttgacacgcggccgcggataaactccacgccgacaagctcaaaaccgagtgcttcgacaggtgcagtgaccatctctgttaatttctgctctaatgtggacaagaccacccccgggacataaaaaaagggcataacgcccagtatctctgttgactgataacaaaaaaccccgaaatttcggggctttatgcaactggaccctgtgtacatcacacttcttaatcttttttccaaatcagggataacgtaagagttgttgatacaatcaacattggaaaaaacgatttgttataagaagtggttgcgggagccggatttgaaccgacgaccttcgggttatgagcccgacgagctaccatgctgctccatcccgcgttcgaaacgtgaaaaattctacgctgatcacctgcaaaacgcaagtgtgaaactaaatggtgccgaggacgggacttgaacccgtacgcccgttttgtaggcactaccacctcaaggtagcgtgtataccaatttcaccacctcggcactgaactgctcttttttacgggactgactgatggtgtgtatcaatcccgtttaaaacttttacttcagacttgcaacaatcagcgcggaatatcgctgttaggagctgctggtgctgcgggaacatctgttttctgttctgtctgcaccggctgagcgagattatcaaacttgctgcctgtaccggttttattactggtcatgttgcccagaaccaaactcagtacaaaaaacagtgttgctaaaatgcctgtggtacgggtcatgaagttacctgaacccgaagaaccaaacagtgttgcagacgcgcctgcaccgaacgaagcacccatgtccgcaccttttccctgctgcattaagatcatgccgactaaggcaatcgcaacaagtaagaaaacgactaagagagctgtatacataaacgtgtacctattcctcgtacggtataccgactgattcggtatcaatctgcacactcacaggtaaatctgattaccttactgagcgggtcagaatactaaccaaacaaacgcgcacgcgcaagtctattttaagccaggcgcaccggttgcggaaaaaaacaacaataaggggcggattctgacagagccggggagaaaccgcaataattttttccggctctgtcattcacatcataaataattatacgcgtttcaccgcgtctgcaatgcggtttgccattgcagtgacctgcgcttcatcttccccttccaccatcacacggatcagcggttcggtaccggatttacgcagcagcacacggcctttgccgttcagctctttttccacttcctgtgccacgcgggtgacttcctcgcttgccagcgggtcgtgctgaccggcaaagcggacattcaccagcacctgcggcagcagtttcatgccgctgcacaggtcgtgcaggctcatgttgttgcgtaccatggcactcagtacctgaagacccgccacaatgccgtcaccggtggtggttttgtccagcaggatgatgtggccggagttttccgcacccagacgccagcctttttcctggagtttttcgagcacgtaacgatcgccgactttcgcacgctcaaacggaatacccagctgtttcagtgccagctccagccccatgttactcatcagtgtgccgacagcaccaccgcgcagttgtccctggcgcagtgcttcacgggcaatgataaacaggatctggtcaccgtccactttctcacccaggtgatccaccatgatcaggcggtcgccgtcaccgtcgaatgccaggccgacgtgcgcaccttcagccagaacacgttcctgtaactgacggacatccgttgcaccgcatttttcgttaatgttgataccgttcggatcacagccgatagcaatcacttccgcacccagttcacttaatacgttcggtgcgatgtgataggttgcgccgtgtgcgcagtcgatcaccattttcagcccgttcaggctctgctcgttcgggaatgtccctttacagaattcaatataacggccggcggcatccacaatacggtttgcacggcccagctcggcggattccacacaggtcagtggtttttccatctcggcttcaatcgcttcttccacatgatccggcagtttggtgccgtcgatggagaaaaatttaataccgttgtcataatacgggttgtgagaggcggagataacaataccggcctcggcacggaaagtacgggtcagataagcgaccgccggtgtcggcatcgggccggtaaatgaggcggataaccctgcggcggcaagaccggcttccagtgcggattccagcatatagccggaaatacgggtatctttgccgataataattttacgtgagccgtgacgtgccagcactttcccggccgcccagcccagtttgagcacaaaatcaggggtaatcgggctgtcacccacttttccgcggatgccatcagtaccaaagtatttgcgatcactcattgtcgtttgtttccttcgctaaacgggttgcttccaccactttcatggcctggacagtttctttcacatcatgaacacggataatctgtgcacctttcatcgcggcaatcactgcacaggccacactgccggcaacccgttcatccgggggaatatccatcagctggccaatcatagattttcgtgacattccggcgagaaccggtaatcccaggttatgaaacaggtctaatttatccaataactgataattatgcgccagtgtttttccgaaaccgaagcccggatcgagaattatgtgatttttttcaattccggccgccacacagcgtgccacctgcgcttcaagatacgtatacacctcacgcaccacattctgatagtgcggtgcctgctgcatggtacgcggttctccctgcatatgcatcacacaaaccggcaggccgctctgtgccgccgcctgtaatgcccccggctcactgaatgagcggatatcattgagaatatgagcccctgcgtttgcggcttcgctgatcaccagcgcttttgaggtatccactgaaatccagacgtccgattcacgggcaatcgctgccacaaccgggataacccgctccgcttcctgctccggactgacttccgccgctccgggacgggtggattcaccgccgatatcaataatggttgcaccttccgcaatcattttccgggcgtgttccagtgctttggcgggggtgttgtgtgtaccgccgtctgagaatgaatccggggtcacattgaggatccccatcacctgcggcgttgccagcgaaagtgtctgaccgcgtgcggtaagtttcataatccggccttcttactgtttattatttcaatcgtaatgtgattgtaatgcctgactccggcgggataaagatataaaaaaacccggcgaattttccgccgggtttttcatattactgattcatacaactgaatgatgaattatgactgcttgttgtcgtcttcagacggcgcagcattgttgtcatctgatgattcaggtgcttcctgaaccggaacctggttactgctttccggcggacgggtatccgctttcggcttgtcaccttcccagcccgcaggttcgcggaccggcacacggttcatcagatcatcaatctgtggtgcatcaatggtttcatatttcattaatgcatctttcatggtgtgcaggatatccaggttatccatcaggatctgacgcgcacgtttgtagttacgctcaataatcccgcggatttcctcatcgatagtccgggcagtttcatcagacatgtgctgtgcttttgacacagaacggcctaagaacacttcaccgtcttcatccgcatacagtaacggccccagtttttcggagaagccccactgcgtcaccatgttacgggcaatgttagttgccactttgatgtcgttggatgcgcctgtggacacattttccggcccgtagataatctcttccgccagacggccaccgtacagagtggagatctggctttcaagtttctgacggctggcgctgatctgatccccttccggtaagaagaaggtcacacccagtgcacgtccgcgcggaataatggtcactttatgtaccgggtcgtgctccggcaccagacgaccgatgatcgcgtgaccggcttcatggtaggcagtcgaggctttctgctcttctgtcatcaccatagagcggcgttccgcacccatcatgattttatcttttgctttttcgaactcgaccatggtcacaacgcgtttgttaccgcgtgccgcaaacagcgcagcttcgttcaccaggttagcgagatccgcaccggagaagcccggtgtaccacgtgccagcacagacggttcaacgtccggcgataacggcacacggcgcatatgcactttcaggatttgctcacggccgcgcacatccggcagaccgaccacgacctgacggtcgaaacggcccggacgcagtaacgcagggtcaagcacatccggacggttggttgccgcgataacgataataccttcgttaccttcgaaaccatccatctcaaccagcatctggttcagtgtctgctcacgttcatcgtgaccaccgcccaggcccgcaccacgctgacggccgacggcgtcgatttcatcgataaagatgatacatggcgctgctttcttcgcctgttcgaacatatcacggacacgggacgcacccacacccacgaacatttcgacgaagtcagaaccggaaatggtgaagaacggcactttcgcctcaccggcaatcgcttttgccagcaacgtcttaccggtacccggaggccccaccatcagaatacctttcggaattttaccgccgagtttctggaagcggctcggctcacgcagatactccaccagctcgccgacttcttctttggcctcatcacaaccggccacatccgcaaaggtggttttgatctgatcttcggtcagcatgcgtgccttacttttaccgaaggacatcgcacctttaccgccgccgccctgcatctggcgcatgaagaagatccagacgccgattaacagcagcatcgggaaccaggaaatgaaaatggttgtcaggatacccggctcttccggtggttcaccgaccacagtgacgtttttgttcagcatggtgttaagcagctgattgtcctgcatcggcaggtacgtcgtgtatttggagccgtcttttttactgacgttaagatcacgattggaaatacggacttcgcgcacctgatcctgtgctaactcagtgatgaaggtagagtagtccaccttacgactgtttgaatcgcctgggccaaaactctggaacaacgacatcagcactaccgcgatgaccagccagagaattaggtttttcgccatgtcactcaagggattaacctcttattacatctgtgttaacaaataacgcacagggtactacactttccaccctgtcgctacaatgtatacttcacgcgatcgggcccgcgaagcatcgggtttacggattttcactttcgtgaacagggagcgaacctcccggaggtactcgtcaaagccatctccctgaaagactttaacaataaaactgccccccggtgccagaacagaacggcacatatcaagtgccagctcaaccagatacatcgcgcgcggaatatcaacagccggagttccgctcatatttggtgccatgtctgacataacaacctggacttttttatcccccacgcgccccagcagagctttcagcacgttttcgtcacggaaatcgccctgaaggaaatccacgccgacgatgggatccatcggtaacaggtcacaggcaataacgcgcccggactgaccgatgtgattaacagcatattgtgaccagccgccgggtgcagcacccagatccacaatagtcatacccggtctgaaaatattatcgccctgctgaatttcttcgagcttaaaccaggcacgagagcgaagcccctttttttgcgccatctgaacatatttatcactaaaatgttcctgtaaccagcgcccggagcttgctgaacgttttttattggccattgtgttttccgactaacctgttatttctgactcagttttttcgcataaccggacgaaaagtcccgttaccgcagacagtactcctcacctaatgatggtgataagcatgatatggcggtagaatacaccgttttcaatagttattaagcaaaaaaaacgatgaacctcactaaaaaacaagtccagcacctgaaagcactcgctcatcatctgaacccggttgtcatgattggcaacaacggtctgactgaaggcgtactcgcagaaactgaagtggctcttgcacatcatgagcttatcaaagttaaaatcgcgggcgaagaccgtgaaatgaaaaccttgattgcagatgcgattgtgcgtgaaaccggtgcttacaatgtgcagattatcggtaaaattctggtgctctaccgtccgtcggaagcccggaagatcattttacctaaatgataattgcatatttataaaaaaatgccaccggcagatgatttctgacgatatcgtccggccggtggcattcctttcagattttcttcatatccgggccgcctcagtactctgccacccgaatgtaaagttcagtaaaaacgcctttcactgcatttttctgatgaaatatccgtattgtgctgtttttttacgacgcagcttacaggtattccacattgatgacttcatactcaacttcaccgcccggtgtctggatgacaaccacgtcgtcaacctctttaccgataaggccgcgggcaatcggagagttcactgacagcaggtttgatttgatatcagcctcatcatcacccactatgcggtaagtctgctcttcatccgttgcgacgttaaaaacggtaacggtcgcaccgaaaataatccggccattgttggtcattttggtgacatcaatcacctgcgcattggagagcttggcttcgatctcctgaatacggccttcacagaagccctgctgctcacgggcggcgtgatattctgcgttttctttcagatcgccgtgctcgcgggcttccgcgatatcagcgataattttcggacggcgctcatttttgagaaattctaattcttcacgcagttggtctgcgccgcgtaccgtcatagggatttgtttcattctctacctctgaatcattcctaagtaatagtcatatcatcctgattaaacgataacagtaccttatgcgccatgtgtggcacactactattaagtaaaaccgtgtaaatctgcgctgatacggccatcgcactgcggatgctgtcagcgcggttgacgcgttatccgcgcgggctgaactgagatcctgtcccggtattctatcccggagcgcaatgcgggtcatcgtttacttttaccggtccgtggctttagtataacgggctctcacccccgattgtgatggataggtcgctcaatgaatgtttttacccggctcgcatatgcgatgggattgtcagtattactggctgcaggtgcagcagccaccccggtcgaacaatatacccaatatctgcccgccggtacaaacctggcgatgattgcgcagcgggtgggcgattctcagccaatcgtggaataccaggggcaacagatggcactgcccgccagtacccagaaagtggtgacggcgcttgccgccctgttacaactggggccggatttccgttttaccaccagtctggaaaccaaaggacatgttgagggtaccaccctgaaaggggatttaatcacccgttttaccggtgatccgaccctcacccgtcagcagatccgtaatatggtcaatgaactgcgtaaagccggggtacaggccatcgacggtgatctggtgatcgatatctctgcctttgccagtcatgacaaagcgccgggctgggtgtggaatgatttaacccagtgcttcagtgccccgccgggtgctgcgatcatcgaccgtaactgcttttctgtaacactgtacccgggggaaaaacccggcgatacagcctatatccgcacctcggagtattatccggtcaatatgttcagtgaggtcaaaaccctcgaacgcggctctgccgaagggcgtttctgtgagctggatgtggtgccgggtgaactgaaccgctataccatcaccggctgtatgaatcagcgcagcgagccgctgccgctggcattcggtgtccagaacggcgcaagctacgccggggcgatcgtcaaaaatgaactgatccacgccgggatcaccctgagcggcaatgtccgccgtcagacccacccggaacaaccgggcaccgtactgatacaaacccaatccgctccgctgcatgctctgctgaccaaaatgctgaaaaaatccgacaatatgattgccgatgaagttttccgcaccatcggccgcagctattacggcgtgccgggcacctggcgttccggccagcaggccgtccgtcaggtactgaaagaaaaagccggtattgatatgggcaataccgtgatggtggatggctccggattatcccgtcacaacctgatcaccccggcaaccatgatggaagtgctgcaatttatagccaaacatgatgatcagctgcagtttatcaaaatgctgccgctctccggctatgacggtacactgcaataccgcggcggcctgacagaagcaggcgttaacggcaagctctccgccaaaaccggttcattacagggcgtatataacctggccggattcctcaccaccgccagcggtcagcgcatagcgttcgtgcagtttatttccgcttatgccgtcccgcctgccgagcagcgcagccgccgtgtgccgctggtccgctttgaagggcatttgtataaagatttataccgcaattactgagttgctgaaaaactaacggcaataaaaaacccggcgtattcaccgggtttttctttgctcaggattctgacgattatttctgccagatgaactcgacaccttcttcgtcgtcttcatcccagtcgtcgtcccagtcatcatcgtcttctgcctgctcaagctgctctttgtggtaatcgtcccacataaagtccactttcgcgtctgcagccggcacttcggccacggcttcgcgggcatgggtgttgaggaattccatcagatcccagcacagcgctttcacaccttcgtgattgacagcagagatcatatagaatttatcttcccagccgagcgcatccgcgatcgcctgagaacgggctttcgcttcttcaggatcaatcagatcgactttgttgaagaccagccagcgcggtttctcagccagcttctcactgtatttttccagttcgccgacaatgatcttcgcattttccaccggatcactttcatccaccgggcagatgtcgatcaggtgcagcagcacgcggcagcgttccagatgtttcaggaaacggatccccagaccggcaccgtcagatgcgccttcgatcagtcccggaatatctgcgaccacgaagctctgtgagttatccatccgcaccacacccaggctcggtaccagtgtggtgaacggataatccgccacttttggttttgccgcagagacagaacggataaaggtggatttaccggcattcggcatccccagcatcccgacgtcagccagcagcatcagttccatcatgagttcgcgggtttcgcccggtgtacccatggtgcgctgacgcggtgcacggttaacggatgatttaaagcgtgcgttacccaggccgtgaaatccgcccttggcaaccatgtgacgctgtccgtgctgcaacatgtccgccagtacctcattggtggtcatatcgcgcacacgggtgcctacaggcacgttaatcgtgatatcgttgccccgtttaccggtacagtcacgactctggccgttttgaccccgctcagcgcggaatgatttttcaaaacggtaatcaatcagggtattgaggttttcatcggcctggaggtatacatcaccgccatcgccgccgtctccgccgtctggtccgcctttcggaatatatttttcgcgacggaagctcacgcatccgttgccgccatctcctgccacaaccaggattttagcttcatctacaaatttcattacttttctccgtaacgttgccgtgtccggactaccggttcagtatgacccgggatgacgttttacgcatataaaaagccctgcaaaaggtttgcagggctttcggactcggttaagacgtgaaaaacttattcagcttcgatgctgatgaatttacggtttttcgggcctttaacttcgaatttgacttttccgtcagctaacgcgaacagagtgtggtcgcgaccgcaacctacgttgctgcctgcgtggaatttagtaccacgctgacgaacgatgatgctgcctgctaatacagcttcaccaccgaaacgttttacacccagacgttttgcttcagaatcgcgaccgtttcgagtcgagccgccagcctttttgtgtgccattgatctgctctcctattaacttaagcgataccggtaattttaacatcagtgaaccactgacggtggccctgctgtttccggctgtgtttacgacgacggaacttaacgattttaattttatcgccgcgaccgtgtgtaaccacttcagctttaattttaacaccttcaacgactggagcgccgatcttgatgtcttcaccatttgcaaccatcagaacctggtcaaactcaacagtttcacctgttgcgatgtccagcttttccaagcgaacgatttgaccttcgctgacccggtgttgtttaccaccactttggaaaaccgcgtacatattaactccgctttccgcacaccccataaaatttgattctcagagtgcactataaaattattcacaatagggcgcggattttacgcaaaaacgctgcaaatgacaagtactgaaaacgatctaatggtaaaaaaacgtcactttacagatagccgtttatttgcagcttttttacagtacaatcataaaatataaaaaaacgctgctatcataaaccattacctttgatcgggatgtcaaaaacaaggttaaagcaagtcatatgaactcagaacaaataatcgcgctgactgcggatgatatggccgcagtcaatcaaaagattcaaaaacagctgacctcggacgtatcgcttatcaaccagctgggttactacattatcagcggcggcgggaaacggatccgcccgatgatcgctgtgctgaccggccgggctctgggctatgacggcgacaaacatattcaggtggcggccctgatcgaatttattcataccgccacgctgctgcacgacgatgtggtggatgaatccgacatgcgccgcggcaaacagacagccaacgaagtgttcggcaatgctgccagcgtgctggtcggggattttatctacacacgatcctttcagatgatgacggatctggattccatgcgtgtgctgaaactgatgtcagaagcgacaaacgtgatcgcggaaggggaagtgcttcaactgatgaactgcaacgatccggatatcagcgaagcggattacatgcaggttatctacagcaaaactgcccgcctgtttgaagctgcctcacagtctgcggcaattctggccggtgccacaccggagcaggagaaagcgctgcaggattacggccgctttctcggtaccgcgtttcagctgatcgatgatgttctggattatgatgcggataacgcgacactcggcaaaaataccggggatgatctcgacgaaggcaaaccgacactcccgctgctccacgccatgcacaacggcaatgcggaagaatccgcgctgatccgtcaggcgattgaacagggtaacgggcgtcacctgctggagcaggttcttgcgaccatgaagcgctgcggatctctggcttacacctatgcccgcgccgaagaagaagcagacaaagctatcgcagccctgtccgcactgccggactcacagtacaaagatgcactggccggcctggcccatatcgcagtccgccgctcagcctgatcattgcatgagaaaacgggatcttcacagatcccgtttttttattccggtttttcgtccgtctcccggctgcccggaagctcctgtgcatcaagatgctggatcagtttagccagcccttcccgcagaatgaacgtgacgattttctcccgttcctctctggtcagctgataataggcttccacccagatcagaaacgcatcctgccgtttcgcctgatagctcgcgctgttatcacatgcatgcaggatcgcctgaacttcatccggcagactatcgatactgtattcgactgcttttccctgtacgccgcgcttgcgccgctgatgccagccttcccgtctcgccatcaggttgacaccttgaggagatgatggcaagcccgccaaaccaaccaattccttcgcggaataccattcttttttcatcttttctcctgcaacccattttcagcaaaaaatcggcaatttccgtgcttaaactgcgtgaatttgccgggcactttcctaaaaatgacaaatgctttagctacactgaattttttaacagcttccggattcataccgattttcacgagaatattttacaaacgcaaggataaaacatcatctttttgtgaataatcggcatattttattacaacaacggtaaacactgactacaatgaccaccgggcagaaaatgagatccgactcagtgctgctgctggcgtatcacgcctgataacaggtaaaaaccgcttttgtttcatcaacaaactccttatgttaagtaagtaaatatgcttacttcattcattcctttgtgttacctgcccattttcattctgtttcttaattctgtaacagagttcaaaaaagatatttttaagaaaaaatttaagaaaatatttagaaaaataatggtattttattttcttaataacgaattgggttcatctttaatgtgatggcaacccgttatttataccactaacacaacattaatctaaaataaaaaggactcaatatatggattccggtaaatctgactggcaccctgctgatataattgcatcgctgaagaaacgggggacaaccctggccgccttgtcgcgcagtgcgggactcagctcctcaacgcttgctaacgcactttcccggccgtggccgaaaggtgaatggctcatcgcagactttctcgccgtccatccgtcagagatttggcccagccgttattttaattctatcacaggtgaattattagataggaaaataagagtgaaggtaactaattaatttcaatatatacttataaaaacaataaaaccgctaatcgtaattagcggttttatttacggctcaaaaaaataaatacaactatttaataattcagctgttaataaatttctcaccaagcgcaatatcggccttcagcacatccagcatgccgttcagtgctttctcttcatatgcactgagtgaaccgatgtccagacgcttctcaacaccgttcttgcctaacacgaccggctgggcgaagaaacgggcgtatttgccgtcaccttcggtataagtgcattccaccacattgctctcgccctgcatggcgcgaaccagtgacaggccgaaacgtgcagctgcctggcccatagagagcgttgcggacccgccgcctgctttggcttccaccacttcagtaccggcgttctggatgcgtttggtcaggctgtcgatttccgcgtcgctgaagctgacacccgggatctgagacagcagcggcagaatggtcacaccggagtggccgccgataaccggcacttccagttcctgtggtttcttgcctttcagttccgccacgaaggtgttggaacggataatgtccagcgtggtcacgccgaacaggcgatttttgtcatacacaccggcttttttcagcacttctgccgcgatcgccactgtggtgttcaccgggttggtgatgataccgattaatgctttcggacaggttttggcaattttttccaccagattgcggacgatccccgcgttaacattaaacagatcagaacgatccatgccgggtttacgggccacaccggcagaaatcaggacaatatccgcgccttctaatgcaggggtaggatcctctcccgcgaatccggtgatccggacatcggtcggaatatggctgagatcttttgccacacccggtgtgaccggtgcgatatcatataaagtaagatctgaacctgaaggaagctgggttttaagaagaagggcgagagcctgaccaataccacctgctgctccgagaactgcaactttcatcctgagactccttaacttgggacggttagcacgattgcgcatcaggcgcgaatccgtgcatgagggctgtgaatacaatattttaacagactgattgcatattcacgcatttgaatctgtttgtctattgttatccattctaaacaaatcgcttatctgttaatgagataaggaacactattttgacaattattttactttaagcgcacttatagtcatgtacgttaatataccgatgcgtaactgataacaacctcatttaattaacaatatatttacctccggtgataacccggtcagaaccataagcaatgtcaattacgtgaactgaccaccagttttgaccattaatgcggtttcccccggtcagaccacagggtttaatttgcataaaaatgcatttttccgcataataataaagttcgtatccaaatttgcaggaaagactatgcgcgcaccttctaaacaggaagatctgatcaaggcgtttaaggcgctgttgaaagaagagaaattcagctctcagggggagatcgtcaccgccctgcaggaagagggctttgagaatattaaccagtccaaaatttccaggatgctgaccaagttcggtgctgtccgcacccgtaacgcgaaaatggaaatggtttactgtctgcctgcggaactgggtgttccgacagccaccagcccgttaaaaaacctggtgctggatattgattacaatgactcggttgtggttatccgtaccagcccgggagcagcacagctgattgcccgtctgctggactccatcggcaaatccgagggcattctcggcagtatcgccggggatgacactattttctcgacaccggccaaagatttcaccacagaacagctctacgaagcgattctcgccctgttcgagcaggaactgtaatccgccgttaatcataaaaaaaccgcgtggtactgatgcaccgcgcggttttttatttcttctcagattacttcagtttttccagcagtttatcgtggataccaccaaagctgccgttgctcatcaccaggatatgatcccccggctgtgcatgttcggccaccatattggtcagcgcatccaggtcaccgctccagtatgccggctgtacacagcgctcggtaatttcactgaccagccacggaatatttgccggctggaaaataaagacttcatccgcacgacccagcgcaggtgcgatatcatctttgctgatccccattttcatggtatttgaacgcggctccagaaccacgaggatgcgggctgtgccgccgactttactgcgcagtgcctgtaatgtggccagaatcgccgtcgggtgatgcgcaaagtcatcatagacactgataccgttcacctcaccgcgcaactcaaggcggcggcgggcgttgataaatttacccagcgcacggcaggcttccgcgaccggcacaccgacgtgatgtgcggcagccaccgccatcagggcgttctgcatattatgctcgcccaccagtccccaggtcacgcggccgctgatttcaccgtcataacgcacatcgaactcaccgcagtcgttggtgactttctccgcctgccagcgggcgtcgccgccggtgtactcttcctcactccagcagcccatactgagcacctgtttcaggttggcatcctgggccggggcgataattttaccgtcacccggcaccacacgcaccagatgatggaactgtttttcaatcgcagcgaggttttcaaaaatatccgcgtgatcaaactcgaggttgttgagcagcagcgtgcgcgggctgtaatgcacgaactttgagcgtttatcaaagaatgcacagtcatattcatccgcttcgataacaaagaacgggctgttacccagcgtggcggagacatcaaaattccccgggacaccaccgatcagaaagcccggctgatagccgcagtcttccagaatccacgccagcatacctgcggtggtggtttttccgtgagtcccggcaaccgccagcacccagcgctccggcagcacatggtcatgcagccactgcggccctgaagtgtagggaattccctggttcagcaccgcctcgacacacgggtttccgcgtttcatggcattgccgatcaccaccatatccgggcgcggcgtcagctgagccgggtcataaccctgaatcagctcgatcccctgctctgtcagtaaatcactcatcggcgggtagacattctgatccgaaccggtcactttgtgcccctgtgcacgggccaggatagccaggctgcccatgaaggtgccgcagataccgagaatatgaatatgcattattttttatccaatagcatgacgttggtcactattctaaccatctctcaaaagaactgaaacggattagcctatcaattatgattttctttggctaaacttgcacccgcgtttacgggcaaccgctttcgtaatacttttatttcacccacttcaggacgtacgtcatgaaaacattaggcgaatttatcgtcgaaaaacagcaggacttttctcacgccaccggagaactgactgcactcctctccgcgattaagttaggcgctaagattattcaccgtgatatcaacaaagccgggctggttgatatccttggtactaatggtatctcaaacgtgcagggcgaagtccagatgaaactggatctctatgccaacgagaaactgaaagccgcgctgaaagcccgtggtgaagttgccggtattgcctccgaagaagaagacgacattgttgtttttgagggcggccgtgcggaaaacgccaaatatgtggttctgatggatccgctcgacggctcatccaacattgatgtgaatgtgtcagtcggtactattttctctatttatcaccgtatcaccccgctgggccagccggtcaccgaagctgacttcctccagccgggtaaccgccaggttgctgccggttatgtggtttacggctcttccaccatgctggtttacaccaccggtaacggtgttcacgctttcacctatgacccgtctctgggtgtgttctgcctgtgccaggcggatatgaaattcccggaaaacgggaaaatgtattccatcaacgaagggaactatatccgtttccctgtcggcgtgaaaaaatacatcaaatactgccaggaagaagatccggcaactgaccgcccgtacaccacccgttatatcggctctctggtggcggatttccaccgcaacctgctcaagggcggaatttacatctacccgagcaccgcaagccacccgaacggcaaactgcgtctgctgtatgagtgcaacccgatgtcattcctcgcggaacaggccggtggtaaagcgagtgacggtaagaaccgtatcctcgatatcattccggaaaaactccaccagcgttcaccgtactttgtcggtacccgctcaatggtagagaaagccgaaagctttatggcggaattcccggacgaaaacgggaagtaaccaacagcaagcgaaggaaaaggcggtataccaccgcctttttttcgttataatatccgccacgctatttgttctgaagattaaggaatccgttcatgagcctgaataatgttcctgcaggtaaagatctgccggaagatatctatgttgttatcgaaatccctgccaacgcagatccgattaaatacgaagttgataaagaatccggtgcactgtttgttgaccgtttcatgtcaaccgccatgttctacccgtgcaactacggttacatcaaccacaccttatctctggatggtgatccggtagacgtgctggtcccgactccgtatccgttacagccgggttcagtgatccgctgccgtcctgtcggcgtgctgaaaatgaccgacgaatccggtgaagatgccaaactggttgcggttccgcacaccaaactgagcaaagaatacgatcacattaaagatgtgaacgatctgcctgagctgctgaaagctcagatcactcacttcttcgagcactacaaagatctcgaaaaaggcaaatgggtgaaagttgacggctgggaagatgctgctgccgccaaagctgaaatcattgcttctttcgaacgcgctgcgaaaaaataatccgcagtccgtttcagagacaaaaaaaaccgctgttttcacagcggtttttttattcacagggaaatcattcgctttccgggccttctgcctcgtgccgtttcagccagtccccgcaatttatcttcaccagtccgtccaccggacgctgatataagtaaatccaggcactgccgtacggcgttgaaaccagttcacgccggtaatcctgaccatctttttttaattcatccagctcagtcaggatcgacgaggagatccggtacacttcacattcgatcgaaccggttcccggtaccaccgcaggatagtgtcccaaatcatacaggtcatagccttcaagcgtatattctcccagcagggcggcataggtcatccaatgatggttgccctgtttctgccgcaaactgccataaacgatcactcgcatatattaaaactcaaactgataaagcagatcgatcgcctggttaacaccagacaccgcttccagatataacctgggcattaacctatagcgtaacgttaaggtcgctaaggagtcaaatataccgacaccatattttacctgcaggtcgttggttatcttaccgctgaccacaacctgcgacttatcgcccacgccctgggtatccagcgccagatccgaaataccgaatgtttcaccaatttttccgactaactgcccgctttgtgccaccccgaggctgataagcatggatgtcatctgcgaactgtctgcatcaccggaatccagcccctcaccgcgcagcagataagagagcgcattttcctgggacatcgccgggtcagaaaatatttccactttcggtctgtcggcaagcccggtcacccggacacccgcgatcacgccgttagcagtgttatccgggttacggatcgcttccagattaaggaacggctgatcagccggaccggagaacaggatctgtcctttgcgcaccagcagatcctgcccgtaagcatggaaacgcccgcgcggaatatccacctggccgttgagccccagaccctgtttatcctgggcgactttcagatcgccggtgagttttgctttcagaccaaaggcatcgagcagcacatcatcaccgatatggatccgcagattactcaggatcggaatactggtctgtttctcacggattggctgtaagttgtcatccagcatcacttcgtcggatgtggcgctgacggcggactccggtacttcatgcacggtgatccgcgcccacggaatattgaccgtaccgtccagtttcagcatcgacggcgttgcctcaaagaccagatccgggctgacatcaatccggatcatcggcggcagggaaacgcgcagtttgtcaccctgtgcgaagatccgcgcgctccaggcatccattctgcgccagtccgcgttaccgctgaggttgagatacccttccggcgttttgatgtttccgctgagatcagaacgggcaccatcaaagttcacggtcagtccgccggttgtaatatcaaacggcagcagacggccgctgacggcgagatccgataatcccagctgaccaaacagcagcggtgatgccgcattaccgcccagacgcaatccggcattcagccgcccggtggctttatcccctttgccgagcagcggtttcagcagatccagcgagatattatcgatcccgacattcccgctcagctggcggcgtttctccagatcagaaatctggacattaccgttaatcttcccgttaccggcgatagcaatcagccactgaagattcagtttgccgttcttcatggcggcggtcatggtccgggtatcaaacgcgaccggcaggttcgtgccgtcgaggttctgcaccaccttcacaccgttgcctttcagggaggcatccaccaccggctgtgagccgtccgcaaaccagcggacattggcattaccgctgaatacaccgtccagccgggtatccgggccgaggaatggtttaatcatcgccagatcaaaacgttcaagggcaacagatgcattaccggaagccccggcagtgatcggtttcggcacacagatacgggcatccggattcacccagcaatgggtaccgatggtcatttcctgcttttcattcagataggtcagcgccattgccttgctgagtgaccactcacccaccggtgtgtcaaagcgggtgttattcagcgtacctttccaagtttcggttttacggtcaaatccgccgttcagcatcagctgtgccgagaccggctcgcctttcatggtcagtttcagctggtgctgtgcttctgtacctttcgcattcagagtcaggttgctgatcaccagatcggcctgtttcagctgattcaccgtcacatccagctggcctttgatctgctctgcggaggtgatatcccctttgattttcgcatccgccaccgacagatcgttctgccatttcaggctgtgaacagccaggtcggcgaggatctgtggtttttccatattaccgcggacattgagcttccctttgaccgttcccgccagccccggaaccaggccgccgagcgccggtgcattgatatccgcatccagcttccaggcatcagccagctcgccccgcacatccagtttattgttaccgagtgccagtttcagatccggaatcgtccactgaccgcctgcgttacctttcacattaccgcgcgctttcagcggataagttttcactttgccgtcgagggtgatatccgggatttcaagctcccagttgccgccgtacaggctgccccgggtactgattttgccgtccactttggccggccactccggataggcttttgcggtattcagcccggagagcgtcagaaccgcctgccagctgatggctttctgccagtccgccaccccggtcacttcagcaaagccctgtaacgcattcaggcgcagccgggtaagattcagctgttcagtattccctttcgcatccagagtcagcagcgcaggcggaatgtcctttcctttgatatccgaacgcagggagaggtcgtaaccgctcactttcccgttaaggcgcagtttcacgccatcaagctgataatccgcctcaccggtcagcggccagctgactttctgactctccagggtcagcagcagcggcagatcggcctgtgtcaggttggtctgtgcatccagcgtggcattgaccggccctttcagtgccagcgccagtttcagctcatcgagcagcccgccgttcagggtgagatcgagatcctgcccgctgaattcctcaaaatcacggacatgccctttcaccgtcagcgcaaccggccatttttcactgagcgccacttccccgctgaccgcgatattgccctgtggcgcatccgcagacagatcactgagggtcagcacctgccctttgttaaacagtgccaggtgcagggaattgatggtcaccggtgcatcaccgctcgcctgccagttctcaccggaaataccttccactgagatattcagcggcagaataacctccggcagttccgccagcatcggctgagcaaaaatctcactgatggtttcacctaacggtttttccggtgtatccgcagccggagccggttcttccgcggcagccgggtcactttttggcagcacaacagaaagggcattaattaccgttggtttcagggtcagctggtcgccctgccaggtcatggcagtgcggaaggtatccagatttaccgccatatcatccacggtgacctgtgtgttggtcacagagagagaatccaggaaaatgctcagcggcgcattcagctctgtcagcggctctgacgacggggtttcttctgacggcggcagttttgcggtatcgacagcaacccgcgtgccgtccgtgctgaggttttcaacacagagtgtcatgtctttcaggcagctcaggcgcagcgccaggttcaccttatcaacgctgacatcaatacccggcatggtgtatttcacctgcttcagggtcagattacgcagatcaccctcaacctgaccgatagccaggccggagaccacacgcggtgcaagattcagtgcaaaatgcaggccggactgtgtgcccaggatccagccgagtgtgccgccagtcagcagaatgagaaccagcagaatgattgccggccatttcagatacttcagccatttcatcagagttctgcccccaaaccgatgtaaaactggatatttttcgtttcgttatcacctaccggcgcggcaaggtcaaatttgatcggcccgaccggcgatgcccagcgtaccccgacaccggcaccggttttgaaattactccgtttgatatcgttcaccacttcaccgctgtccacaaacaccgcgccccaccagtcaccggtcacgttgtactggtattccagtgaaccgaccaccagccgcgagcccccggtcagtttgccgtcagaatcttccggtgagattttgttgtaacggtaaccccggatactaccgtcgccaccggcgaagaaacgcagatccggtggaacccggtcaaagttattggtttcaatccagcccagattaccgcgcatcacaaagcggtgaccatcccacggcgttctcacccagacgttacgggcgcggaagacagcaaaatccacatccgaaccccacatttcattcgagacatccacagagtagcgctgactgtccccccaggacggcatcatcccgccccgtgaacggacacggctgacattcacgcccggatagagcagcatggtggtgttggtgatatccgcctgggtaaagtggctgagactccagcgcatattgatgccgtactgccagccggaggataaatcccagttacgggagacactgactgtcgcggtatcggctttggtatcgttcaggtcggtacgcttatacccgccggagacggcgtagtactgctcaatcggattgaccttcagcgggatacggtaagaggtatcaataatctgttccggcgcggacaggctgatactggaggtcaggctgtggccgctggaattcacccacggtttattccatttcgcctgaacacgcggccccacatcagtggcaaagccgccgcccagctcaacaaagttctgtgcacgcggagtgaatgaggcatccatggtcagataatcactgttatccgcccgggccctggcaatatccggggtgacgatcgcggactggaaccagccggtttccgccagcagacggttaaattctgccagttgatcagaggtgtagtaatcgccttctttaaacggcaccagaccttccaggtattcatcgctgatttgcgagccctggtaattcactttcccgaaacggtatcgtttgccactgttgaacacaaaatcccagtaggccgcatgacgggaaagcgcaataccgagctggcttttttccatttcggcatcaaaatagccgcgttttaaggcaagcccggataatccgcttttaaaactttcgtactcgccgtgattgacgacagtcccggtttcaggtgtatttttggtaatgaattttttgaatgcgggatcggtttttgccgcaccttcgatatccacggtaaccccggcaattttaaccggctcccccgggacgacgcgggcatacaacaccggccgtgcaggcggtgcattgtcctgataatcaaaggtgatcaccggctcataataccccagcggacgaagcccttctttgatggctttttccacccgggcacgaaaacggccgtcagccacgacctcatcggtcgtgatagtggaaagctggactcttgcatttttttcaagttgcccgctgagcccttccacttttaagcgaagatttgcactatatgccagaggggatgtgagagacacagcgacaacacaaacaagagggtaccggatcacatcaactcctgaatttctgcgatttgactgagatatacctttattcattcagaatacagccaacgaagcggtaatgtgaatgaataagggtataaatgaaaataatttgaagtttactatagatacataagataaataacctgaaatctgctgataatgcaccgattattcttaaaacaggagccaccgcaaatgacacaaaacaccactcaatacccgcaggacactattgtatctcctgtttccgccgctgatgcactgccggacagcgccgtggcgctgaccatcagcccgcgccataccgtaaccggccatgatgtgaaccatgtgcctgacggctttgataccgcgtatttcgccatgggttgcttctggggcgtggagcgcctgttctggcagcagccgggcgtgtacagcaccactgccggttacaccggtggtacgacaaaaaacccgacttatgaaggcgtctgcaccggcaacactggtcatgctgaagccgtccgcattgtgtatgacccgtcggttatcagctatgccgatctgctgcgtctgttctgggaaaaccacgacccggcacagggcatgaaacagggcggcgatatcggctcacaataccgttctgcaatttatactcagtctgacagccagcgcgtgcaggcacttgcttcccgtgagcagtatcagcaggcgatgaatgagaacaacgacagccgcagtatcaccacggccatccgcccgctcggcccgttttatgtggcagaggattaccaccagcaatacctggataagaacccggaaggctactgcggactcggcgggatcggtgtttgtctgccgccttcgctgagaaactagccgcttttcccgttccggtgctatactgcacatccgcgcacagacaaattggatgttctgtgcgcctttcttttttaatatccgatacttatgctctatatatctaaaataaccggtcgccacgcataatcaacaacagcgcgcccagaggcaatcgtgccggccattcggaacttatatgttaaatagtttattaatcgtcctgttactgtgcgcaatcagcgcattcttttcgttatctgaaatatcactggccgcctcgcggcgtatcaaactcaaagtcatgattgacgaaggcaataccaatgccgcccatgtgctccgtttacaggaagcaccgggaatgttcttcaccgtggtgcaaatcggcctgaacgccgtggcgatcctcgccggtattgtcggtgaatctgccttttcaccggcgctgcgcaccctgttcggcaattttatggccgatgccgccgcacagcagctcggctcggtattgtcatttattatcgtgacctccatgtttatcctgctggcggatctgaccccgaaacgtctcgggatgatcaaaccggaagcagtcgccatccgtattgtccagccgatgcgtttttgcctgacagtactgcgcccgctggcctggctgtttaacgggttatccaacctgttctttaaattattcaaaatcccgatggcgcgaaatgaagatatcacctcagatgatatttacgcggtggtggaagccggtgcggtcgccggtgtgctgcgcaagcaggaacacgagcttattgaaaacgtgtttgagctggaatcccgtaccgtgccgtctgccatgacctcccgtgagagcgtggtctatttcgacaagcaggaaaacgaagagagcatcaaagagaaaatctccacgcagccgcactcaaaatttctggtgtgcgacggcggtctggatcatgtgctcggttatgtcgattccaaagatctgctcaaccgcgtgctgaacggccagagcctgaatctgcatgaaggtgtgcagatccgcccggcactgatgatcccggataccctgagcctgtcagacaccctggagagctttaaaaatgccggggaagacttcgctatcattctgaatgaatacgccatggtgatgggtgttatcactatcaatgacgtgatgattaccctgatgggagatctggtcggtcaggggcaggaagagcagattgtcgcccgtgatgaaaattcctggctgattgaaggcggtacaccgattgaggatgtgcagcgggtgctggatattgatgagttcccggatgacagcaactacgaaaccatcgctggcttcctgatgtataagctgcgccgtatcccgaaacggaccgattccgtgaaattctcaggctttaagtttgaagtggtggatatcgacaactacaagattgaccagctgctggttacacggatcccggatgcaccggttgtcccgcgtccgtcagcggcggaaagcggcaaagagggtcagtctgacgtggcacacaacgaacagcaccagaaaccgtaaaactaacccttcttcatcagacaggtattgtggttacgccagctgcgcctgcagcaacgatacctgctgattaatttcactcattgcactcaggtggcgtttgtctctgattttcggcggtaaaatcttgccgtagtcaaattcaaacgcgcccatcccctgtatatacaggcggccacggaataaggttttcacgtagcgggcgatctgagccgggttgtaacgggcgaaaattttcatcgtacttatgtcctcccctttaccttttctttcatgcctaaggtatgactcaattctaccacccgggttcattaatcaaatgatttaatcactatttttacataaaatgacacttcactacgatttacttcacaaatcagagtgaaaatcgatcctcgtcacactataacaatgaaataataacctcataattactataagttttataaataatgtgaggctgaaataccggggttagtgtcagaagatacggaatttaacaggcggggaaaaatcagtgcaatctgcataaccatgcaaattacactgttattcaggaataaaatggcagtcagaaactgctgacgcggaaccccgggtttatcagcgattcacgcggtgtatagtcgagcgtttttccgctccagtccgtgatatgcgctcccgccgcgagtgcaacggcgtgtccggcagccgtatcccagatatgggtcgggttaaagcggggatagagctgagctttaccttccgccaccaggcagaatttgagggatgaaccgatagcacgggtttcatgtggccccagctgctccagataatccgccagttccgcatcctgatgtgaacggctaatcaccaccatcggcagatccgtattcaccacttttatcgccatccgctgcccgccccgttcacgccaggcatgtttgccttctgccagatagagcacatccggaaccggggcatacaccacgcccatcaccggtacgccgtctgaaatcagggcgatattgaccgtaaattcaccgttgcggctgataaattctttggtgccgtcgagcggatccaccagccagtattgtgtccagtgctgccgctcagaccacggctgcggatcttcctctgacagcaccggaatgtccggtgtcagagacttcagttcctgcacgatgatgtgatgtgcggctaaatccgcagcggttaagggggagttatccgctttggcggagatggtcagtgtgtcgggatgatggtagatatccatgattgcatcgcccgcccgccgggccagcagacaaatttgattgagcatccttcacctctttcacagaacggttagtgagtcgcgtaatcctgttcacgtctccggagacctgagtatagaaataaaaatggccggtgaaaaccggccatttcgcatattctgttattgctgacaaagagagattacaggatctccagcagctccacttcgaataccagtgtgctgtacggcgggattgccgcaccggcgccgcgctcaccgtaagccaggttgctcgggatatacagttcccacttggagccgaccggcatcagggtcagtgcttcaatccagcctgcgatcacgccgtttaccgggaattctgccggctggccgcgctgtacagagctgtcaaacacagtaccgtcgatcagacggccggtgtagtgaacacggacacggtcagtgcgggccgggatagcgccgtcaccctggttaatgacagagaactgcaggccgctttcagtggtggaaacgccttctttcttcgcgttttcttccaggaaacgcatgccgtctttgaccagttcagcctgtttttcattgcggacagcatcagcacgctcatgcatttcacgcagggcacgatgaagaacatccaccgccacagccggctggttattttccagtgcatcggtgataccggccagaatggcttccggtactaatccgctcagtccggattcctgtaattgctggccgatttgtaagccgattccgtagcttgcctgtgcttccatcgtgtcaaaagtcggttgtgtcatgagagatacctgagtaataagtaagacggacaagcataacagcaggatgtaccccggtaaacccgataatcagtgaaagctgatgcaacacggggattcacggaaaacagcgcaatcaatttataaaacaggactaattccgaataatttcagtaagtctgctgctacactggaataataccggatgataattattcatgctgaacagcgggggattatgatgagactactgccaaagcgccatctttacgctatcgccgccattgcgctgattatcatgctgatcctgtttttctggcctgccgcgcagaaaccaccggtgaccattccgcctcagaatatcacgctgacaccaccggcagacccgttaggtgacctgatagctgaacagaccggcacaccaccggaggcaccatccgggatcccggatttaccgctgcctgataatctgccgccgggtgcgctgaataccgaaccggcgccgcaaccggcgaccacaccaccgccggtgaccgcagagcctgctcctgctgcggtgcctgcacaggcagatgcactgcgtttcaccctcaaaaagggccagaccatcgcccaggtctttcgcagcaacgggttaccggtggatgacttattccgcatgacagccgttgaggggccgcagaagccgcttaatcaggtggaagcaggggataaaatcagtgtgaccaaaggaaagggaaatacggtctctgtgctgaggattgataaagctaacgggcagtctgccacttttaaacggcagaaagacggcagctaccgccgctcttaacaccggtttttactgcaaaaaaaaacgctggcctgagccagcgtctttcaaagatgtttaccgtgtaatcagagattactcagcaacaatcttcacattcagttctgcaaacacgtcgctgtgaacctggaagtgaacttcgtgatcacccagagtacgcagaacgccgtttggcagacgaacttcgcttttcgccacttcaacgcctgctgcagttacagcatcagcgatgtcacgggtaccgacagaaccgaacagtttaccttcgtcacccgctttggaagacagagtcacaacgcccagggcattgattttttctgcacgagcgtgtgctgctgccagaacgtcagctaatttagcttccagttctgcgcggcgtgcttcgaagaattcgatgtttttcttggtagcaggaactgctttaccttgcggtactaagtagttacgtgcataaccagatttaacatttacctggtcgcccaggctgcccaggtttgctactttatcaagcagaataacttgcattaccttatcctcttaaagtcattaatggactgtgccgattactgatgacgatcagtgtaaggcagtaaagacaggtagcgtgcacgcttgatagcacgagcgagctgacgctgatatttcgcactggtaccggtgatacggcttggtacgattttaccactttcagtgatgtagtttttcagcgtagcgatgtctttataatcaatctcttgaacgccttctgcggtgaaacggcagaatttacgacgacggaaataacgtgccatatggctagtctccagaatctatcaattcaatatgttcggcatgaagaaccagttttgataatccatttcgcccctgatgggtgctgatgaatccctgaacggttatctgactgccgaccgttatactgcgagtaatggtttggatcgtctgtccgctggcaaccacgggcattctgcaccatgcctgccgggtgagtccggcttcctgctgttgtgagcggtgctcaagcacaaactgacaatgcggaattccggccgggctgactttccggatgggttccctgcacactgtgccggataacaccagacggttagcggacaccgttattactcttcagtttcctcagcttcatcattttcttcaatgtcgtcagacatgtcgcgcgggcgacgttcgtctttcgctttaaccattggagaaggttcagtcaccgcgtgcttaacgcgcataaccatgctgcggataacggcatcattgaagcggaaaatagtttccagctcgtcaatcacttcctgcggtgcttcaacgttcagcagaacgtagtgagctttgtgcagtttgttgattgggtaagccagttggcgacgaccccagtcttcgagacggtggatctgaccttctgcgttagtaatagcagttttataacgctcgatcattgccggtacttgttcgctctggtccggatgaaccatgaagacgatttcgtaatgacgcattagtagtgctccttacggattattagcctcctgtccgggcaaccgcaaccctgagaggcaaggaacttgtttaagtgcggctgaaaaatttgacgcataactatactcatacccgccccaaaagacaaggtaataagtgtgtgatgcgggattattttgcgcgctgacgcacggcctcaaacaggcagacacccgttgccaccgagacgttcagggaagagactgacccggccatcggaatgctgatcagttcatcgcacaggtcgcgggtcagacggcgcatgccttccccttccgcacccattaccagcgccaccgggccggtcattttgctctgatacagatcatgggtggcttcaccggcagtgccgacaacccagatattttcatctttcagctggcgcagtgtgcgggccaggttggtgacacggataagcggtacgctttccgccgcaccacaggcgacttttttcgccgtggcattcagctgcgcggagcggtctttcgggatgatcaccgcgtgtacaccggcggcatcggcggtacgcagacaagcccccaggttgtgcggatcagtcacgccgtcgagtaccagcaggaacggagtctcatgttcagccagcagatcaggcagatcctgctcctgatactgacggccgcctctgactttggcgataatcccctgatggacagcaccttcggtctggctgtccatccactgacggctggccatctgcacgcggacacctgccgcttccagagcatgcacaaccggggtcaggcggcggtcttcacgcccttttaagataaagacttcaagaaaacggctgggatcacgcgccagcagagcatccacggcgtggataccataaataatttcactcataacgttccgtttgttgcgggacaataaaacacaatgaggctcagcgcctcattgtgggaaaattcaaatcaaaggcggttacttatcggcttttttcttcgcacgtttcgcctttatatttgcctcgatttttttggtccgggctgattttttacctttcggggctttcgggccgtcgtcttttttcttcttacggaacgcactgtccggctcgaagtttttgtcacggcggggatcccctttcttaccgtcccggcgtttatcccctttngtcccctttctttccgtcccggcgtttatcccctttctccccggctttcgcccgggttcttgcggttttgccttcattacgggcacggcgggtggtggaaatcagcgcgaaatcaatggggcgctcatccatatgcaccgcttccacccggatttcaacttcatcacccaggcggtatacattggaagaggattcaccaatcagacgctggccgacattatcgtagcggtagtaatcgttatcaagtgttgatacgtgtaccagaccatcaataaacaggtcgttcagacggacaaagaaaccaaaaccggtcacgctggtgataagtccggtaaagacattacccacctgatcctgcataaagtcgcacttcagccagtctgccacgtcacgggtggcttcatcggcacggcgctccgtcatggaggtgtgctcaccgagctggagcatgctctgcatatcgtaatgccacgcaccggtctgcgatttcgcttcgccgcgctcttttgccagcaggtacttaatcgcacggtgcagactcagatccggataacggcggattggtgaggtaaagtgggcatacgccggtaacgccagaccgaagtgaccgcggttgtccggatcataaatcgcctgtttcatcgaacgcagcagcatggtctgtaacagctcgtgatcaggacgctccgccacttccagcatgacacgggcataatctttcggctccggtgtcaggccgcccggcagggtcagacccagctcattaaagacggtgcgcagattgatgacgctgtcctctttcggacgatcatgcacacggtacagcgccggttcgttgtttttctcaacaaagcgtgcagccgcaacgttcgccatgatcatgcactcttcgatcagtttgtgtgcatcgttgcgcagtaccggttcgatgcgctcaatgcgtttttccgcattgaaaataaatttcgcctcttcggattcaaaggcaatcgcaccgcgctcgtcacgggcttccgccagtgctttatagagtttgtgcagctcttccaggtgttttaccagcggcgcatagtgttcacgcagctcttcatccccttcgaggattttccacactttggtataggtcagacgggcgtgggagctcatcaccgcttcatagaaacggtaaccggaaagcttacctttcgctgaaatggtcatttcacacaccatacacaggcgatcaacctgcgggttcagtgaacagacaccattcgacagcacttccggcagcatcggtacgacctgtgacgggaagtaaaccgaggttccccggctgcgggcttcatcatccagtgccgtctgcggacgcacataataactgacgtcagcaatcgccacccacagacgccagccgccgccgcgtttggcttcgcagtgtaccgcatcatcaaagtcacgggcatcttcgccgtcgatagtgaccagcggcagatcgcgtaaatcaacacggccttttttggcggattccggtacttcctcgcggatatccgcgacctgacgttccacctgagcaggccaggtgaacggaatgtcatgcttgcgcagggcaatatccaccgcaatactggtgcccattttctcgcccagcacttcggtgataacaccgagcgcctgcacccgtttgcccggacggcgggtcagttccgccaccacgatattccccatccgtgcgccgttaattgactctttcgggatcagaatatcgaagcacagacggctgtcatccggcacgacaaatcccatgccttcttcggtaaagtaacggccgacaatctggccggttttcggctcggtgacacgcacaacgcgcgcttcgcggcggcctttgcgatcagcccccatcacctgggccaggatcacatccccgtggatgcataatttcatctgatcctgcgggatgtagagatcgtctttttgtccttcgacacgcaggaacccgaagccatcacggtggccgatcacggttcctttaattaaatcaagacgctccggcagtgcgtaacactgacggcgggtaaagaccagctgtccgtcacgctccatagcgcgcagacggcggcgcagggcttcctgagcctcttcaccggtgatccccagttcctgtgcgatatcttcgcggctcaccggtttggtgtggcggcggacagtttcaagaataaattcacggctcgcgatcggggaatcatatttttccgcttcgcgctcacgataagggtcgtttgattgtttttccactgacattgtatcctccgtggtttctgaacggcgttattcgtccgtcagtaacaatttataaagatgctgattgtcctgcaccatatcagcgagcgtgtgtttatccagttcctgtaaaaactcccggatggctttattcagtaccgatttcagcctgcatgccggagtaatgtgacagaattcaccgctgcagttcaccagtgttaacggctcaagcgcgcggacaacctcaccgatacctatagtattagcaggttttcccaggcggatcccgccatttttgccgcgaatcgcctcgacataacccaaatggctcaattggttaattatcttgaccatatggttacgtgatacgccgtaaacgtccgtcacttccgtaatactggtcattttaccatcaggaagtgacgccatataaatcagcgcccgcaagccataatctgtaaaactggttaactgcacattttaccccggaaattctgtcatcccgcgcgggggatcacatgataagtaatggataatcattatgtgtgtcttttgcttattaagcaaaatttgtcgttaaaaacgccggatttcctgtcatgacatagtcagaaaccccggcgtcagaaaacaaaaggccggacaaacatgcccggccctgactggtatcacctgaacgatcttatgcgtcgaacgggtcgcgcaggatcatcgtttcagaacgatccggaccggttgaaataatatcaacaggaacgcctgtcagttcttcaatgcggcggatgtaatccagtgctgcctgaggcagttcttcgcggctcttcgccccgaatgtggtttcagtccagcccggcatgacttcatagataggctcgatgccttcccagttatccgcagccagtggtgtggtttcgatgatttcaccattcggtaaacggtaaccgacacacactttcacttctttcagaccatccagcacatccagcttggtcatgcagaaccctgacagggagttgatctgcacagcgcggcggatagcaatgatgtccagccagccgcaacgacggctgcgtccggtggtcgcaccgaactcctggcctttggtacgcaggtattcaccggtttcatcaaacagttcggtcgggaacggaccggcacccacacgggtggagtaagctttgatgatacccaggacataatccacataacgcggacctaaaccggaaccggtggcaacaccgccggcagtggtgtttgaggaagtcacatacggataggtaccgtggtcgatatccagcagtgtaccctgcgcgccttcaaacatcaccagctcaccgttgacggtggctttgtacagcagatcagacacatccacaaccataccggtcaggatatccgcaactgccatgatttcgtccagggttttctgatagtcaaccgcaggctctttgtagtagttcactaactggaagttgtgatactcaaggatttctttcagtttctgagcgaaggtctctttatcgaagagatcacccacgcgcagaccgcgacgggcaactttatcttcgtatgcaggcccgataccgcgccctgttgtgccgatagctttcgcgccgcgtgctttctcacgggcattatccagcgcaacatgataagggaggatcagcggacatgcttcagaaatcagcagacgttcgcgcaccggaataccacgctcttccagtgcagtcatttctttcagcagtgcatcgggtgcgagtacaacaccgttagcaataatgctgacgacgttttcgcggagaatacctgacggaattaaatgcaggacggttttctcaccgttgataaccagagtgtgacccgcgttgtggccaccttgataacgaacaacatacttagcccgttcagtcagcaagtcgacgattttgcccttgccctcgtcaccccattgggtgcccaatacgacaacgttcttacccatttcgtttttacctggttgcttaaaaaaggattctagcatctcatgaccgccctttcagcactttttatccactttatgaaagtcacctgatcaatgtccataataaagcccgcctaagcgggctttctttatcagagtgcgaccatcagcatgctgacgatttttcagtaccggttatgcggttaccggacttactggcctgaagccggacgcaatgatgtcggtgccttcatgtaacggaagaaatccgtatccgggcttaacaccataatgtcgttgccatcgggtttgaagctttgctcataagcacgcaggcttcggataaacgcatagaaatccggatcctgactgaatgcatccgcaaacagtttagcggcttccgcatcacccgcaccacgcagggagagtgactggcgctccgcttcggccaggatttcagtacgggttttatctgccaccgcacgaatcttcatggcttcttccagaccctgtgagcggtgacgacgcgccactgcttcacgttctgcacgcatacgctggaagatagcttcggagacttccgccggcaggttaatctgctttatacggacgtccaccacttcgatacctaacgccgccatactgttcggattcacctgtggctgtgcgcctttggtttcttcctgaacacgcgctgccgcatcggcaatagcgttatcagcatcggttgcctgcggatcgttaccggagctcccttcattcagtgcatttttgacttccgtcgttaatgtaccgcgggaatccgtcacaatctctttcacgctcagacgaccgaactcagaacgcagacggtcactgaatttacgcttcagcaggttttcagcctgattaatattaccgctgtttgttgcgagataatacaggctgaaatcactaatccgccatttaaggtaagaatcaacgatcaggtctttgttttcgtttgtcaggaaacggtcagcctggatatccagcgtctggatacgggcaggcagcattttcactgtttcaataaacggcactttcagatgcagacccggctcatacacaatcggtttgttatccgcatcacgcagaactttgccaaaccgcagcacaataccgcgctcggtctgctgaacggtaaagacagacgcatacagaacgcctaaaaccagaataacaataacggctaaatacttacgcatgattattgtctccctgtgcgttcagtgttaccacggatacccgaactgctgagatcatacgtgttgttgtattcagcgggtacattcggattctggctgctgttttgtgcctgacggcctgccggtgtctgtgttgccggggcggatgatggtgtggcagcagctttcgccggtgcagcctgagaggcggctctctgctcacgcataatctgatccagcggcagcaccatcatgctgttgcttttatcattggcaatcactttacgggtattgctcagcacacgttccattgtctcaatgtacagacgttcacgggtgatatccggtgccgcacggtattccggcagcattttcgagaagctggccacttcaccgcgcgctttcagcacgatactggctttatacgcctgtgcgctttcgatcatactttgcgcattaccttttgccagcggcagaacttcgttcgagtaagcttccgcttcacggatggactgctgttcgttttcacgcgcggcaattacgtcatcgaatgaagcctgaacttcagccggcggacgcgcttcctggaagttgacgtcgacaatcgctatccccattttataaggcttgattgtctcctcgaggactttctgggtttcgttacggaccacggtacggttcgccgtcaggattttctccatggtgaacttaccgataaccccgcgcaccgcgctgtccatcgcctgacgcagactgttgttcgggttggtgacgctgaagaggtaatcttccgggttcactacctggaactgcacgttcatgttaacgcggaccacgttctcgtcagcggtcagcatcatgccgttggtggccagatcctggaccgtcgccacatcgaccgcagtaacgcgatcaataaaggtcggtctccagttcagacccggctgaaccacatgactgaacttaccgaaacgcgtaaccacgccgcgctccgtttctttaatcgtatagaagccggttgcggcccagacaacaacaacggcggcaatagcgagactgataatacgtccgcccgcgaactgtaccggaggacgattgttcccgccggactgcccgttattgtttccgcctttaccgccacccagaccaccgagttttctgctcattttccggaacagatcgtcgagatcagatgccccacggttccggccgcctttgttaccgtcggagttgccgcctttattgctgctcccccacgggtcgcggtcctgtccgttattaccgggctgattccacgccatgccttcgctccactcttttatgatcggtttttcagggctaagagcacaaaaacgcgctctcaattaatatattacgccgctgataatcagataacgtaatcggctaactgttgttcctgcttgcagaggcggcgccagtcaacaatgggcagcctgatttcaaggcaaatccggccgtcatcatcaagccactcgcgttcaatcgcctgaagctgataaaaacggctgcgcagacgaccctccgacggaggcagacacaattccaggtgtgcgatctcaccggaaaggcgttccgtcagcgcccggaacaacaacgggatccctgctccggtctgtgctgaaagccagaccctgaccggcaggttatcctcatttctgtcgatacgcggttcgaaatcgtccagcatatcgattttattcatcactatcagaaccggaatttcatgtgcatcaatctcttccagaactgcattaaccgcatgaatattttcatccacacggttatccgccgcatcgaccacatgaagcagcagtgtcgcttcgcgggtctcctgcagcgtggctttaaatgccgccaccagatcatgcggcagatggcggataaacccgaccgtatccgccagcaccactgtgccgacatcatcaacatcaatccgccgcagggtcggatcgagtgtcgcaaataactgatccgcagcatagactttcgcatcagttatgtgattaaacagactggatttcccggcgttggtgtaaccgaccagagacaccgtcggaatatccgctttactgcgcgcctgacggccttgtccgcgctggcgttccactttttcgagacgccctgaaatctgtttgattttatcccgcagcatccggcggtcggactcaagctgagtctcacccggccctcgcagaccaatcccgcctttctggcgttcaaggtgcgtccagccgcggaccagacgcgtggaaagatggcgtaactgcgccagttccacctgtaatttaccttcatgtgtccgtgcccgctgggcgaagatatcgaggataaccccggttctgtcaaccaccctgcactggcacaaacgctcgaggttgcgttcctgcgccggacttaaggcatggttaaagagcaccacatcggcttcactttcgatgacagcatcggcaatctcttccgctttaccttcacccgcaaaatatttcgggtgcggggcactgcggctgccggggactatctgaactggtgtcacacccgcggatgtcacaagggattcaaattcactgagatcatcagtgttcttatcctgtgagaaaaatatgtggaccagtacggcccgttcaccgccttcatacctgtcaaacaacggcagaacctctcaggctgagtgaaaaacacgcaggaaaaaacacaggtaaagtctccctacctatgtttttccgcgattgataactgcacactgacttattcagcgccatcagtatcctgttgcgcaccaccgttaccggctgactggtggtaattgctgccgccggtccccgggtttgcgccaccgctgtggtgagaaaccggacgggaaggtacgacggtagagatcgcgtgtttgtaaaccatttggctgaccgtgtttttcagcagaataacaaactggtcgaatgattcgatctgaccctgtaatttaataccgttgaccagataaatagaaaccggaaccctttcgcgacgtaatgcgttcaggaacggatcttgcaaagattgccccttagccattctgtattttccttattttgttgttttttaaatgaaacccaagctgggttcgaaaaataactactcaaaaactttcgtaacccgttaattgtacacaatcaacggcgctatgcacgaagaacctgcataacggctttaagagattgttcaggctgttcactgtcgagccactgaacaccttcccaaccccgcaaccacgtcatctgccgcttggcaagctgacgggtggcgcaaatgccccgatacaccatgtcatcataactgatttctccggccagatatgaccacatctggcggtagccgacacaacggatcgacggcaaatccggatgaagatccccgcgctgatacagcgcacggacttcgtcctcaaaaccggctttcagcatcatctgaaaacgcatttcaattcgctgatgcaatattttacgatctgccggtgcaatggcaaactgataagcattaaagggcaaattctcccctgcggtttccgtcagttctgtcatcgttttcccggagatatagtatacctccagtgcccggctgagccgctgcggatcattcggatgaatccgcgccccggcgaccgggtcaatccggctcagttcatcatgaagaacctgccagccttcctgtgccgcccgcgtctcaatctgtgcccggatttccgggtcagcggacggcagcggcgataatccttccagcaacgctttgaaatacatcatggttccgccgaccagcagcggaatttttccctgcgcggttatctcatgcattgccgccagcgcatcacggcggaaatcggcggcggaataggccactgacggatcgagaatatcaatcagccggtgcggggcgagtgccagttcggcagcatcgggttttgcggtcccgatatccatccccttataaatcagtgcggaatccacactgatgatttccaccggcaggtgctgacgcagttcaatcgccagcgcggtttttcctgaagccgtcggccccatcagaaacagggctgcgggtttatgatgattctgttcactcatgacgtaatgctgcaacgacctcagttaaatcaattaattgcaataaatctgccggcggcctgcgtaccagttgcgggcacagccgttccacatcggccagcagttgcactgcctgcgctttgctctgagccgccggttcactgaccagcatctctgccagccgcgacgcaatggctttctcatccccctccgggttatcagccaggaaacgcagtaattcagggataagatgcggtaaattttgctgacgaagcggtaacgataccgtacgaatcgtcgcttttccacgggaaactgagccttctatgccgaaagtacgcaataccccggcaaactgcgtaaatgtctcacactcctgtgcgtttaacgccatctgaagcgggatcatcagcggctgggatttcagtccctgctctcccgggatcagctgctgacaacgcagataatgtgatgctttgctgagggaaaacagcgcaatacctgcatctgtctcaattaacgcataacacggcggataaagcgtaaggattttaccaaaacttacacgctcacttttttccgtcaccggctcacttgcggcgctgatccggttttctgacagaaaagtacttttttccgggaacagctgcggccgggtttctgccggtgtctgcatcagtgactgatatattccggcttctttcgggctgtatgcgggtttatccgcagaatatgccggttttccgctgctgtggccgctgtgagacgcgccgcccccggtggtttcccggcgtggcggcggtgtgagtacatcctcacgctcaaagatatttttaccggctgccgcacggttttccggcacatgctgtgtctgcggcgctgacggatccggttcaaacagagagaccggctgctcatgctgtttcagcacgctgagcaccgcctgataaataaagtcatgcaccagccgcgcctgatgaaaacgcacttcgtgcttggccggatggacattcacatccacctgacgcggatcaatggtcaggtaaaggacataggcaggctgctgatcgccgctcagccggtcctcataggcctggcggatggcgtggttgatcagacggtcacgcatcatccttccgttaacatagcaatactgtaaatccgccgggccgttgtattctgccggtgaggccacccagccgcggatctccagctcttcgtgagaccaggttaccgccagcgcctgctgcataaacgcagtaccgcagatagccccgagacggcgctcctgctgatcttccgctttaaccgggcggtactggcgcatcagtttgccgttgtgggagagattaatggccacatcaaaacgggacagcgcaatacgccgcaccacttcatcaatgtggccgaactcggttttttcagtgcgcaggaatttgcgccgcgcgggtgtattgaaaaaaagatccagtacttccaccgtactgcccgccggatgtgcagccggtttcagcgtcaccgccatttcgcgcccttcggcatatgcctgccaggcttcgttctggtcgcgggtgcgggaggtaaaggtcaggcgtgatacggagctgatactggcgagcgcctcaccccggaaccccatgctcatgatggcttcgagatcatcgagtgtggcgattttactggtggcgtgacgggccagcgccagcgccagctcgtctttggcaataccgcagccgttgtcacggatgcggataagcttttcgccgccgcgctcaatatcaatatcgatacgggtggcaccggcgtccaggctgttttccaccagttctttcaccaccgatgccgggcgctcaaccacttcgcctgcggctatctggtttgccagctgcggcggtaaaatccggatcgccataattgcccccgttctcctgttatttggacggcgctgcctgtaacgggttcgcggtaaagtatgcgcgtaacccgccgtggatcgcggcagcgacctgttcctggtaagtgtcagatcctaacagctgttcttcagtgctgttactgataaagccggtttccaccagaatggacggaatatccggcgaacgaagcaccccgaggctcgcgtgctccggcgtacctttgtgcactttacctatctggcgcagctgacggatcacgtcctgtgccacggcataaccgacacgctgggagttaccgaactgcaaatccagtaccgcctggctgagatacggatccgcaccgtttgccagtgcatcaccggcaccgccgagcagttcggattgtttctcgctctgttccagccagttacctaattcgttgtttgcccgccggttggaaagcacccagactgacgaaccggtcgcagtgcggtttggtgcggaatccgcatggatggacaccagcatgttggagccgaatttacgcgccacttcggagcgcccggccaccgagataaaataatcgccgtcacgggtcagtaccggtttgaacatcgggtcatctttcagacgcttttccagcttgcgggcgatactgatagtgacgtttttctctttcaggccattctggccgatagcgcccgggtctttcccgccgtgtccggcatcaatcgccaccacgacctgacggctgtttttcggcagtttacctgtcggtaccaccgggatttttgcctgcgccggtgcggcggccggagtggttactgcaggacctgcaggagcagcactgccactgttcatccgcagcggtttgccgcttgtggtggtgaccggttgtgcggcagccaccggggctgcgctataactgtttttgccggtcagcgtgatggtcaggccgctgttatccgcagcatcgcggaaactgtttttgtccgccagctccagcacgatgcgctgatgctgagcatccggcgcacggctctctctgaccactttaatcagcccgttattcagattgatcggcagaccggtaattttctgcggctgacggatgtcgatcaccagacgctccgggtcatgcagcggaaacagtttatattgcggtttgccgtcaaaactgagctgtaatgtgccctgagaaccgttgttattcacattgatgcccgtcagggacgcggcgtgcccggctgcactgaacagcaggctcacgcagaaaaacagcgccgtcagccatgaaacggcagccacatcagatttccgtgtcagatatgcattcattatcggtaattcctcacatctccgctaacttatccaggagttcttcaccataaggggaacgggcggcaaaacgggcttcccgtccttcaccatcataccgtaagtgcaattccaaatctgcatccggcaggaaaccggcccctttttgcggccattcgaccagacaaacggtattttccccgaagtaatcgcggatccccataaattccagttcttccggatccgccaggcggtacaggtcaaaatgatagaccggacgtggtgagagctcatagggctcgaccagggtgtaagtcgggcttttcacatggccgggatgccccagtgcctgaagaaagccgcggctgaaggtggtttttccggcccccagatcgccgaaaagatgcaggacaaatccgcgctgactctgctgtgccaatgcacggccgagcgcgacagtggcagcttcatctgccagcgtaaacagacgttctttcattctcgttgtcgtcacaggttattttattgaaataattgagcgtgtaatccgttaaacataccacattccggtgatatacctgcataacggcgtgcgaaaaaacgacaataatgcgcagtttttgtgccggacggtctgtgataaactccgcaccattcaccatcacacctgcaatgtaagtaaacactcactaatgagcactcaccctgatttacaccagcttgccacccggataaaacaatggggacgcgaactcggctttcagcaggtcggtatctgcgatacagatctcagcgcggaagagccgaagttacaggcgtggctggatgcaggctatcagggagagatggactggatggcgcgccacggcatgatgcgcgcgcgccctcatgaactgctgccgggcacactgcgggtgatcagtgtgcggatgaactaccttcccgccaaagcgtcctttgctgccgtactgcaaaacccggaacagggttatatcagccgttatgcgctggggcgtgattatcacaagcttctgcgccagcgcctgaagcagctgggagagcggattcaggctgagtgtgatgaactggctctgggaaataccctcagctaccgcccgtttgttgactcagcaccggtactggaacgcccgctggcggctaaagcaggtcttggctgggttggtaagcactcacttattttaaaccgtgaggcaggctcctggtttttcctcggcgagctgctgatcaacctgccgctgccggttgatatcccggttgaagaacagtgcggccgctgtgtcgcctgcatgaccacctgcccgactcaggcgattgtcgcgccttatactgtcgatgcacgccgctgtatctcctacctcaccattgagctggagggtgctatccccgaagaattccgcccgctgatgggaaaccgcatttacggctgtgatgactgccagcttatctgcccgtggaaccgtttttcacaactgacagacgaggcggatttctcgccgcgcaagcggctgcacacgccggaactgctggatttattcgcctgggatgaagccaccttcctgcgggtgacagagggttccgctatccggcgcatcgggtatctgcgctggctgagaaatatcagtgtcgctctcggcaacgcaccgtatgaagataaaattattattgcactgacagaaaaaaccggactggctgactggcttgatgagcatatccgctgggcggttgcccgtcagtatgccaaaagagatgaatcacgtatcgaaatacagacttcacagcaaaaacgtcttatccgcgccatttccaaaggtttaccgcgcgacgcctgattctgcctcataatcccgttaagttatccacaatgttcagtgttgtgaataatataaaaagaccttgcctatcaatgtgaagaaaaaatacaagagagccgtcacacaattcacataaattaaattaacatataaatatcaatatattaaatatactgttgttcagtatttcgcggaattctgtgattcagccgacaaaaccggcctgtggataactctgtgcagaaaagtgtgtcagaacccccgggatgtgaataacatgccccgcagcgctgtggataaaaaatgacatccggacaaaaaaattgcccctgtttgacttaatcaccccatgaaaggtgatgaaaagcagaaactgacataaagatagtgcagaaagtgccggtggtaatctttcactgtctgaataatcaccgctggtgatcgttcatctacccatcgtcagagagggcgcaaattctatttcaccacaccgggattagcaagccttttccccgtatttacgaaaaaaagtcatctaacagattaaattatcagcaaaagttcagtgtgaccgcttttgtgctgcggacaaccatagatgatgattatttgcaccgcgcagcagttttcccggcagaaccggtaacagaaatcacgcaaaggattttattcagaaaataatgttcggaggggactgaagagaagaaaaagattggagcgggaaacgagactcgaactcgcgaccccgaccttggcacggtcgtgctctaccaactgagctattcccgcatcacaacggtatatacctgactatctgaaaattggagcgggaaacgagactcgaactcgcgaccccgaccttggcacggtcgtgctctaccaactgagctattcccgcatcacaaccggtatattacctgacaatctgcaaaattggagcgggaaacgagactcgaactcgcgaccccgaccttggcacggtcgtgctctaccaactgagctattcccgcatattttgcaatttgcccgcaccgctttcgattgaaaatctatctcggtacggggagcgcattatacgaaaaattcattttctggcaagccctccggcacgaaaaaatgaatttttttgttcgggtgccgataaaaccggcaaatatgctataaaacacgcaacctgaactaatattaaccggccggcggctgaaaatcagccaccgttttttatcacaggcggataaaggtttcgcggtagtaagccagttccgcgattgactcgcggatatcatccagcgcctggtgggtgtttttcttggtaaagccgtccagcacttccggtttccagcggcgggccagctctttcagggtgctgacatccaggtaacggtagtgaaaatattgctcaagcgccggcatataacggaacagaaaacggcgatcctggccgacactgttaccgcagataggagaagcgccctgcggcacccactgctccaggaacgcgatagtggcctgctctgcctgtgcgtcggaatacgtgctggcgcggacacgttcagttaacccgctggcgccgtgtgtgcggacattccagtcatccatcagacctagttgttcatcagactggtgtaccgccagaaccgggccttccgccagaatattcaggtttgcatctgtcacaatggtggcgatttcgataatccggtcacgttccgggtcaagtccggtcatttccagatcgatccagataaggttctgttcactttttgccatgttgtatcctatagttacctgagtatccgcctgttttttgttcacacggattgaatgatgacgggtaaaatgaatggtgtatcatagcgcgtaatccgccctgccgcgagtcaccccggcgggcactttcttctttacgtggtgtcaaaacagacgaggtttcgttggctaaacaaaaactttccaaaggtcaggtacggcgtgttcaggcaaaccagcagcgcaaactgcgcaaagagaaccgcccggagcctgaagacagcctgttcggtgaggctcaggaaggacaggtaatcagccgtttcgggcagcatgcggatattgaagccgcagacggctcggtacagcgctgcaacctgcgccgcaccatcaaatcactggtcaccggtgaccgcgtggtctggcgtgcggcgttgcagaataacgaagaaggccgtgttaacgggattgttgaggcagtgcatgagcgtgaatcggtactgacccgtcctgatttttatgacggtattaaaccgatcgccgccaatatcaaccaaatcgtgattgtttccgcgattttaccggaattatcactcaatataattgatcgctatctggtcgcctgcgaaacactcggtgtggaaccgctgattgtgctcaacaaaattgacctgctgaatgacgaaagccgcgaccaggtcaatgatttaatgaatatctatcgtaatatcggataccgtgtgctggaggtgtccggccacaccaacgaggggattgatgcactgacggcagcacttgccggacggatttccatcttcgccggacaatccggtgtcggaaaatccagcctgctcaatacattgctgccggaaaacgcggatatcctggtcaataacgtttctgatgtttccgggctgggtcagcacaccaccaccgcctcacggctgtatcatttcccgcacggcggggatgtgatcgactcaccgggagtgcgtgaattcgggttgtggcacctgacaccggaacaggtcactcagggatatacggaattccgcgattatctcggcggctgtaaattccgtgactgcaaacacggggatgacccgggctgtgcgctgcgcgaagctgtggagaacggcgaaatcagtgcggaacgctttgaaaattatcaccgcattctggaaagtatggcacaggtcaaaccacgccgtaattttacggccggtgaagactgacaagcgcaataagcacaggtacaatagcccccttttgttcagaattcgccggaaaaaccggcagataacaaacaataccagaggtcgatgtgctggatactcttaaaataaagttacaatatttgctgcctaaacagtgtcttactcagctggcgggccgctttgccaacaaaaaacttggctggctgacacagctggtgatcaaagcattcgccaaagcctacaaagtggatatgcaggaagcgaaagagagcgaatttatcgcttacagtaccttcaatgagttttttatccgcgcactgaaagaggaagtccgcccgatcgtacagggcagcgaaaccctggcactgccggcagacggcaccatcagtcagctggggcttatccgtgacgatcagattttacaggccaaagggcataactacaccctggaagccctgctcgccggaaactggcagctggcggacctgttccgcaacgggcagtttgtaaccacttacttatctccgcgtgattaccaccgcgtgcatatgccgtgtgacggccatctgcgtgaaatgatctatgtcccgggcgacctgttctccgttaacccgctgaccgccgccaatgtcccgaacctgttcgcccgtaacgagcgtctgatctgcgtgtttgacacggatttcggcccgatggtgcagattctggtgggcgccacgattgtcggcagtatggaaaccgtctggtgcggtatggtcaccccgccgcgtgaagggattgtccgccgctggacttatccggcacacgacagtgtctgtgcggtaaacctgaaaaaaggcgaagagatgggccgctttaaactcggctccacagtgatcaacctgttcccggcagatacagtggtactgaacagtgcactggcaaacggcgtttccacccgtatgggtgaactgctggccacccgcattacggcggatgatgccgcctgcgcggaagaaagccctgcatgcccgtcacaaccggacgccgctgccactaactgaggactctcccctgtgcgcctgattatctcatttttactggcggtttttcttttctccccgctgacagcggtatatgcggcatcggatattaacgagccgcagatccgccaggaactgaagcggattgagagcagcaaagatccgaaagatattgagatggctcaggcgttacaggcgaccctgaactggctgacagacagcaaagctgcggatgagcgcgcacaaagctatcaggacaccatcgataacttcccgaagctggtcagggcgttacgtcagcaactgctggaagagagtgattccccggccaaaattctcactacccgccctatcagcgaccttgagcagcaggctatccagctcagcggacaactgctggagcagggacggctgttacaacaggagcaggataaaaaccgcgaaatcagcgattccctgaccctcctgccccagcagcagtccgaagcccgccgcctgctgaatgaagccacctcccgccagcagggactcgcaaccccgctgaccccgcttgccgaggctcaggccacgctggccgccgcagaagtgcaggcacgcaaggcaacggtcaatgagctggaactggctcagctttctgccaacaaccgccaggaactgacccgcatccgccttgaactgctgcgtaaacgctatcagcggctggatctcgaacttcaccagctgcgcagtgtgctcaacggcaaacgtcagcagaaagcggaactggcgctggaacgcaccgaactgctggccgaacaggccggtgatttaccgccgtacctgaaagaacagattgatatcaaccgcgaactgtcgcaggtactgaatgatcaggctgcgcacatgagtgatatcggggagatgcagcgccaggcggcaactgatattcagaaagcgcgtcaggtactcggcaccattcaggagcaggcacagtggctgaacggctcaaccgcactgggtgaagccctgcgggcacagctcagccgcctgccggatatgccgaaaccgcagcagctggataaagaaatcactgacctgcgtgttgagcgtctgaaatatgaaaatatgctcgatgccctgtccggtaataataatgaaccggatacgtcacagacagcctctctcccgccggatcaggcttccctctatcagcagctgattcagaaccgaaaggagctgctcggctctctgctctccggttacgataccgaaattctggagctgaccaagctcaaagtgaccaccagtcagctcagtgacgtgctgattgaagtccgcgacgacacccaccgctatctgttctgggtggcggatgccgcaccggtttacctcaattatccgattgaggtactgagcagtctgaccaaactgctgtccctggataccctggcgcagctcggcggtgcatttaaaaccatgttctcgtggcagaacaaagagatttcgctctatatcatcggcaccctgctgctggcgattttcggcctgaactaccgccgccactatcaggcatttctggacagaaccagtcagcgtatcggtaaagtgaccctggatcgcttctccatcacgctgcgtactctgttctggtctgtacttgtctctctgccgctgccggtgctgtggtctgctatcggctacggattacaaaacgcctggcagtacccgatggcgaaagcgattggtgacggtgtcagcgccaccacgccggtgctgtggctgtttatgttctgtgcgacctttgcccgtcctaacgggctgtttatcgcacagttccgctggccggaagcccgcgtcaaacgggcaatgcgtttctatcagctctctatttttgtcattgtgccgctgatgatggcaatgaccacctttgaatacttcaatgaccgggaatttgccccgacactcggccgcctctgcttcctgctgctgtgtgccgcgctgtttatcattaccagcagcctgcgccgtgcgggggttccgctctatcttgaccgccacggcagcggcgacaatgctgtcagcaaagggatgtggtggctgctcctgctggcaccggtcgtggcggcgattgccgctctgctcggctatcttgcgacctcacaggcactgctcggccgcctggaaacctcggtcgccatctggtttatgctgctggtggtctacaacattatcacccgctggatgctgatccagcgccgccgtatcgcctttgaacgcgccaaacagcgccgtgctgaaattctggcgcagcgggcaaaaagtgacgatgacagcagcgtcaacagtaatgccaacagcgcggaaggtgtgattgatattgaagagcaggtcattgacctcgataccatcagtgcacagtcggtcgggctggtccgttcgattctgaccatgattgccctggtatcctgtattctgctctggtctgaactgcacaccgccttctccttcctggaaaatatccggctgtgggatgtcagcagcagtatcaacggtgtggataccctccagccgattacgctcggctctgtctttgtcgctattctggtgattattatcaccacgcagctggtgcggaaccttcccgcattgctggaactggcgctgttacagcatcttgatctgactccgggtaccggttacgcgattaccacgctgaccaaatacagtattaccctggtcggcgggattgtcggcttctcgctgatcggcattgaatggtcgaaaatgcagtggtttgtcactgcaatgggtgtcggactgggctttggtttacaggagattttcgccaacattgtttccggcctgatgatcctgttcgaaaaaccgatccgtatcggcgataccgtcaccatccgtgacctgaccggcagcatcacgcgcatcaacacccgcgccactacgctgacagactgggaccgcaaagagatcatcgtcccgaacaaagcctttattaccgagcagtttatcaactggtcactctcagatacggtcacccgtatcgtcctgaccatcccggtcccggcggaagctaatccggagcaggtcaccattctgctgctgatggcggcacaggactcggcaatgattctggacacaccaaatccggaagcttatctggttgatttacaacagggtattcagattttcgaactgcgcgcctacgccgctgaaatggggcaccgactgccggcgcgtcatgagatccatcagaatatcctgcgcagcttcgcggaaaacaatatcatcctgccgttcccgccgtttgaggcgcgggggggtatggtgggaaatattctgcgcagcggcacaaagaatctgtcgggccgtaacccgatgcggaaatcaggcggattgtgataaccggtaaagccagataataaaatttaagatatactgctgacagtgaatcgtcatcttaaatcaattatctggcaaccattttaaatagaatgaatacaagcaagttaaatttgggatggtggaatattggtatatccccgccaatacgctccaataaggcgaaaaaaactgatgctattactttagccggtaattatataacgcagttcattcagcagcgggatcttgattttttcgcactttgtgaagtatctgaagatgaatcctgttttcttaatgatttagctaaaaaagaaaatcttacatttatagatttaaccagctctgttggccgcgttattatcgacatctctgttatttataatcctgaaaaattatcctacgtagaacatactcatctgacagaagtccagcctgatggtaagtcattacgggcaggtgtaaaagttatatttaacgaactgaaaaacaatgatgagatcgttttttacttatcacactggccatcaaaactcagaaataatgagtcaatcagagaaagtattgctacttacataagaagtgatattaatgaaattttggatgaaaatatagatgctaaaataatttgtatgggtgattataatgcacaaccttattcttatgcattacggaaaaagctatttgcaacccgggattttcatcagatagaaaaaagaaaaagattgctctttaacccgttctggaaaattttatctgatggcttgtataataatatcggtacttattactatagcaacccttacgctaaccggtggtatgtgtttgatcaaatgattttttcatcctctttcgtaacacaaaacaaggataatcttaagcttattctcaatagtacagattgccataaggtgatcaatgacattgacaatgcagtctcagacgtggtgtatttagataactttgaccatttacctattttttgtggattacattatgagtgataacgacgacatcctgaattcaattagaagctcatttcagagcgcattagatattgtagagataaagagagatattgagaatgagataactaatataattggtttaatcagaaaatcaaccgatgatatcgtgtatgctgaaatagaatcgcctgaagtatttaaaaacgcacattttttttataaccgattactagactatgataaaatcataactcttaatagtatgaacaataatgaatcagattattttctttgtgcatactccttaaataaatcaaccggtttcccggtagtcataagatataaaagtgaagaattttcttgcaataccacggggattttaaaacaagttctgaaagatattctgacttcccccgaaacagcaatggctatggctaacttatttaatggtaaagaagcttattattaattattaaaaatagccggtttcagacgtggctggctatttcaaatatttttattaatgattccgattcaggccatacagaacaggctgtttttctgttatatctgaaaaactgtacattcatccaccaaccagatgatatcaataccggagagccggctctgttccggacaaccggatgtgtcttttttgtataacagaaccgctccggggatactacaggaaccgctcacgctttgttcatttccggggtcaatatcacgtctgctacagggctctcattttttataaaatcacttcttcacgtaaatttatacctgataagcaatattaatgattaccccgtttgcttcataccacgtttaatcacgattatggtcatccgagagaaaattattctcctgatatcactttgtcactctctaaaaagcattattttttctgatttacatcctttatgataaagatattaaaaaataagcctgctgataacaaaacgttattacataatacgttgtttaaatcgcacccgttaagaacaacattgtttaagatttaaacattaaggatgttatttatggcgataaatacgacacgttccgccgcggaaaatgccggaatgagtgaagagcagtggcgtgcagcgaccaaatttgatggtaccgacgctggctgggttattatgagcatcgggatggcaatcggcgccggtattgttttcttaccggttcaggtcggtctgatggggttatgggttttcctgctgtcctccgttatcggctatccggccatgtatctgttccagcggttatttattaacaccctcgcggaatccccggaatgtaaagactacccgagtgtgattaccggttatctcggtaaaaactggggaattttactcggggcgctgtattttattatgctggtgatctggatgtttgtttattccacagctatcacaaatgacagtgcgtcttatttccagactttcggtgtgacagaaggattattatccgacagcccgtggtacggattaattctgatttgcctgctggtcgctatctcttcacgcggcgaaaagctgttatttaaattatccagttttatggtgctgaccaaactgtttattgtcgctgcactcggtatatcgatggtgggcatgtggcacctgtataatatcggctcactgccgccggctggccgtttaattaaagaagcggttattacactgccgtttaccctgacatccattctgtttattcagacgctcagcccgatggtcatttcattccgcaatcagaatgtgaaccgggaagtagcccgctttaaagccctgcgggcaatgaatatcgcctttattatcctgttctgtaccgtctttttctatgccgtttcctttaccctggcaatgggtcatgacgaggcggttaaagcttatcagcagaatatttccgcactggcaatcgccgctaaattcttccccggcggctgggtaactgtggtcagcgtaatgctgaatatttttgcggttatgacggcgttcttcggggtatatctcgggttccgtgaagccacgcaggggattgtcatgaatattctgcagcgcatgatgcctgcggagcggattaatgaaaccctggtgaaatacggcattatggtatttgcggtgctgctggcctggggcgccattattctcaacgcaccggtgctgagctttacctcaatatgcagtccgattttcgggatggtcggttgtctgattccggcttatctggtttataaagtcccgatgctgcataaatataaaggcatctccctgtatctgattatttttaccgggatgctgctttgtgtgtcgccgttcctggcattttcctgataataccctcagaaataaaaaagccgccggatttattttccggcggctttcagtctgtctgaatataaaaattactgctgatataaccggcgcagataatgggcaaccgcgtcatctgcattagagccaatcacttccatttccggcagaatatctttcaggcgctgatgtgcacccgccataatgcagccttttccggccatttccagcatttcacggtcattcataccgtcaccgaaagcgatgcagtcattcaggcggtaacccagtgattcggcaacctgctgcagcgcctcacctttcgagacacctccggccatcacttccagacagctgcgcagagagaaactgacattcactttattgccgaaacgcacgcggattttagcttccagcgcgacaagcttctcgtgatcgtcacaggtgaagtagactttgcagacctgatcaaccggaaaatcattgcggtcgaacagctcatacataaaaacagattcctgaaaaaactctttctgttccgggctttcccggttgatcatccagccgtcaccccggtaatagttggtgaggatatccgggttatcaaactccatcaggcacagctcacggaccacatccggatccacatcatgactgaataccagttcgcctttggtgttgtgtacccgcgcgccgttggaggtgatcataaacgcatcaatccccagcgcatcacggatctgcgccacatccacatgatggcggccggtggcaaaaacaaaatgcacgcctttattgatggtcagcaggcggagggtttccttggtgtagggagtcagactgtgggcaggtgataataacgttccgtctaaatctgaagcaaccacatgatacatatgcaaattcctgaaaattgattagtggagtccgaaaaaatgacaaatcgcattgagcgcgacagcgcgcaacgcgtcttcttcgaacaggatctcgtgataagctccctcaaacgtcagaggcatatgttcttcttcttgtcctgtccgggctttacggcggttttcgcagaaagccagcaactcccgattgtccaccaccttatcctctgatgccatcagcaccatcagcggggtgtttatctctcccgcctgcgcaattattttctgcccgatatcaatgctttcgcgtaaccagtgatacgtgggtccgccgagacgtaaagcaggatagtcagcataacagcgcaggtaacgccggtaccgcgggtaactgtgggtcagcatgttgattaaaaacggcaacggctgccacttcccggttgataccgcatactcattgcgttccgacggccgtttatcggcccggttcacaatcatattcgccagccacatcggcatcggtaaattgatgccgaacatcggggcacataataccgcggcacggaaggtgtccggctcgcgtaacagatagccgcccagtatcgcactgcccatcgagtgtgccagtgcgtaacggtaagcataatttttttcggccagcgcgatattggtgaactgagaaaaatcatcaatatagtcgtcaaaacgctcgacatggcctttttgcggatcatccagcatccgtccggaaagcccctgcccccggtgatccataataaagacatcaaaaccgaggtggaaaaaatcgtacagaacttccggatatttgacgtagctttcgctgcgtccggaactgatcaccagcactttgtcatgggcaggatcggtaaactgcacatagcggatagtgacatcatcaacgccctgaaatgtccgctcgtcccggtggctccagaaatcaagtaacgggccgttcacaaaggcggaatactccgcttcgcgttccagccagcttgctttcagggtttccggtggcagcatagggtgctcctttagtcatcaaatccggtgagatgctcgcggataagggccataaatgcatcgccgaatcgttccagtttccgctctccgacgccatttatcaagagtaaatcatttgccctgaccgggcattgttccgccatttcaataagagtggcatcgttaaataccacaaacggcgggatattttcctcatccgcaatggatttgcgcaatttgcgcagttttgcgaacagttttttgtcgtaattaccgccgtaactgcgggcagtctgacgcggtttgatattctggatcctcggtaccgcaagttgcaacggtacttcgccgcgcagaaccgggcgggcggattcggttaattgtaacgcagaataattggcgatgttttgcgttatcagccctaagtggatcagctggcgcagcacactgacccagtgttcctggcttttatctttgcctataccgtaaaccgcgagtttatcgtgtccgtattcacggatccgctgattattcgagccgcgcagcacatccacaatataccccagaccgaaacgctgcccggcgcggtagatgcaggacagtgcctgttgtgcctcaaccagcccgtcatactgtttcggcggatccaggcagatatcgcagttgccgcacggtgtctggcggttctcaccgaagtaattgagcaataccagacggcggcaggtctgtgcctgggcaaacgcgcccatggcattcagcttgtgctgttcgatatctttctgcggcccggccggtttttcatccagacaacggcgcagccacgccatatccgccgggtcataaaacagaaccgcttccgcactgaccccgtcacgtccggcacggccggtttcctgataataggattcaatattgcgcgggatatcaaagtgcgctacaaaacggacgttggatttattaatccccatcccgaacgccaccgtggcgaccacgacctgtaagttgtccttgaggaaggcatcctggacccattcacgctgtgaattatccagaccggcatgataggccgcgacactcagcccgcgcttttgcagacgggcggcgacatcttccactttattacggctgttacagtaaataataccgcactggcctttctgaccacggacaaacatccacagctgatcaaacgctttatatttttccaccagcgtgtagcggatattcgggcggtcaaagctgctgatgtggatcagcgggtcactgagacgcaaccgcgagcagatatcagaacgcgtggtgttatcggcggtggccgtcagggcaatgaccggcacacccggcagatgctggcgaagctcgcctatcgcgcaatattccggccggaaatcgtgtccccactgggagatacagtgcgcttcatccaccgccagcaacgacggctgccactgctgtaactggcggataaaactgctcatcagcaggcgttccggtgccacatacagcagtttgatgcggttattgtgacacccttccagtaccttctgctgttcctgcgcggtctgcgccgagttcagataaccggcttccaccccgagcagacgcagctgatcgacctgatctttcatcagggaaatcagcggtgacaccaccactgtcagccccggcagcatcagtgccggaatctgataacacagtgatttcccgccgcccgtcggcatgaccaccagacaatcgcgtccgccggtcacggtatcgataatatcggactgtccggcacggaattgctgataaccaaagacctggcgcaggatagcgtcagcgtcgggcagggtattgatgacttcagcggtagacacgcagctcctcaggtgaaacagaaatccgggcagtgcattctgccggtgaaaagatgcttctatgctagctcagtttgccatcagataacagactatccgcacggacggtgataatattcgatcggtgctgagtttttttgcgcacacctgctggtgtaattttgtgatgcgcgttacactttcacatctttttaacgtctttgccgccatccggcgtatcgcagacgatcacattttacgaataattaattaatgacgtgattattcacgttgtaaccatgtggtatcaatgcgagagtgaccgcgccggcaggcatcttcttttcttctttctttcagacttggactatcatgagccagcaacagaccgtaaaaggcgtcctttgtgctctcggcgcttactttatctggggcatcgcccctgtgtatttcaaactgatccaacaggtgcctgcggatgagatcctgacacaccggattatctggtcattcttttttatgatcctgctgatcaccgtgtcacgccagtggccgcgtatccgccagattatccgccagccgaagaaaatcatgatcctcgcgctgaccgcctgtattatcgcctcaaactggctgatctatatctgggcggtaaaccacaaccatatgctggaagcgagcctcgggtactttattaacccgctggtgaatgtgctgttcggaatgctctttctcggtgagcgtttccgccgcatgcaatggttcgccgtgtgtctcgcctttaccggcgtgctgatccagctctggcagttcggtactgtgccggtgatcgggctgagtctggccatgacattcggcctgtatggtctgctgcgcaaaaaactgggggtggatgcccagggcgggatgctggtggaaaccctgtggctgctgccggttgcgggaatttatctgcttttctttgccaacagcgccaccagcaatatgaccatgaacagcctgacgctgaatctgctgctgattgccgccgggattatcaccaccgtgccgctgctgctgtttactgaggctgctaaccatctgcgtctctccacgctcggcttcttccagtacatcggtccgaccctgatgtttgtgctggcgaccgccgcgtatggcggggccatttctgccgaacggctggcaacctttgcctttatctgggcgggactgattgtctttaccctggatgcgctgtacacccagcgccaccgctacaaaaaagcgtgatatcctgtgagacagcgccggatctgccggtgctgtcaccgggaggataattatggactggatcacgcatcatctggcggtactgcacgaccacccgctctggctgctggccattctgttcgttatcgccctgagcaaatccacgattattctctcctctgtcctgccacccgcctctgtcatgctgatgacggtggtgacgctggcatttccggtcgttccggtggtgattatctggctggtgattacgctgggtgccgcctgtggttcgatgatttcatattatctcggccgtctgattatcacccgcaactattttccggggctgatggcgaaatacaaaaccgccctcggtaaagcccaggcacggcttcagaccagcgggctgctgatcctgtttacctcacggtttattgcggtgctgcgctatctgatcccgatggcggccggattgctgcgtttcacacagacccgtgtgctggtgacctgcctgctgtccgccggggtctggaccgccctttacatgctgattgcaaagggcatcgagttcacgtttttctgaggaaggccgttacagccagttcttgcgtttgaagtaaagatacggcgcgagtgcagcggcaaccatcaccccgatcgcagcgggataacccagcgaccagtccagctccggcataaatttgaagttcatcccgtaactcgatgccaccagtgtcggcggcaggaataccacggaaacaacggagaagattttgataatgcggctctgttcgatattgataaagcccattgccgcctgcatcaggaagttcactttctggaacagggattcattatgcggcagcagggattcgatatcgcgcaggatttcgcgcgcctgctccagctgattcgccggcagacgggtgcggcggaccaggaagttcagcgcgcgctgggtatccatcagacacagacggactttccagccgatatcttcctgctcggccagggcagacagggctttatcgaactcatcatcctgcttgcctttcataatcgcccggctgagtgtttccagattgctgtagatgttttcgatttcatccgccagctgttcgattttggtttcaaacagatccagcaggatttcgtaaccgttgccgtcctgcatagtctgtttacgggcacgcatacggtacaggcggaaagcaggcagttcccgctcacgcagcgtgtataaacgcccgtcacgcagggtaaatgccacagtggagtttcccgcgtggtcgtccgcatcttcgtaatagaaaaaggagtgaacgtgaagcccgtcatcatcctcaaagaaacgcgcggaggcttcgatatcgtccagttccgggctggttgccagttcctggttgaactgagtctgaatcagctgccgttcatgctcttccggttccgaaatatccacccacagcgcatctgtcagggcgtcgccctcttctaaatcaagacgttgcaaacgcttattatcaactctgaatgcgctcagcatggtgtgcggcctccgggaacgaaaggaaaagaaaaagtgtgcgcatgttatgcgcagatgaaaaagggtgtcaaccggttattatccgattaacaccttactctgcgggagatcagggtttttccagtttggcgtaggaggccaccagccatttgatcccttcaccctggaaggctatctgtaagcgggtatgctcgccgttaccttccatattgatgatagtgccctcaccgaatttcggatgacggacacgctgcccgagggtgtaaccgctgtcattggcggggatcggtgtaccgagccgctgatgattaacngtcggggtaccgagccgctgatgattaaccgggcgggacacggtagcacgcaggcgtacttcctccacgcactccggcggcagttcaccgataaaacgggatggccggtgatacacctctttaccgtacaaacggcgggtttcggcataggtcagagtcagcttctgcatagcacgggtcacaccaacgtaggccagccgccgctcctcttccagacgaccgctctcctccatcgacatcatgcccgggaacatgccctcttccaccccgacgataaagacctgcgggaactccagccctttggcggagtgcagtgtcatcagctggacggcatcctgatatctgtccgcctggccttcgccggattccagcgcggcgtgagacaaaaatgcctgtaacggcgtcagtccttcgtcagcatcctgataactgaactggttggttgcggtcaccagttcctctaagttttcgatccgcgcctgggctttttcacctttttcctgctcatagtgcgcccgcagaccggaatcgcggatcacgcggtcagtctgcacatgcagcggcaggccgtcagtctcctgcgccagcagattgatcagctcgaggaaacgtcccagcgcggaagcagcgcgtcccgccagtgctttttcttccagcagcacaccgcagctttcccagagggtcagttcccgctcacgggcagtctgacgcaccacgtccagggtgcggtcgccgatcccgcgcgtcggagtgttcaccacgcgctcaaacgcagcatcatcatgacggtttgaaatcaggcgcagatacgccagcgcatctttgatttcctggcgctcgaagaagcgctggccgccgtaaatacggtacggcagcgcggcctgtaacagcgcctcttcctgtaaacgggactgggcgttactgcggtagagaatcgcgcagtccgccagcgccccgccgttctcatgccactgtttgatacgcccgaccacataacgtgcctcatccagatcattaaaggcacaatacagagagataggctcgccgtcctcgccgtccgtccagaggtttttccccagccggtcgctgttgtgcgagatcagggcgttcgccgctttcaggatattgttggtggaacggtaattttgctcgaggcggatagtggtcgcgcccgggaagtctttcaggaagcgctggatattttccacctgcgccccgcgccagccgtagatagactgatcatcatcaccgacaatcatcactttgccggtatcacccgccagcatgcgcacccaggcgtactggatgctgttggtgtcctggaattcgtccacgaggatattggtaaaacggtcgcggtagtgctgtaaaatcgccggtttgttaagccacaattcatgtgcacgcagcagcagctctgcaaaatctaccagccctgcgcggtcgcaggcttcctgataggcctggtagatccgcagccaggtggcttccaccgggttgccgtagctctcaacatgctgaggccgcaatccttcgtcttttttgccgttgatataccagcaaccctgtttggccggccactgtttttcatcgagattcatggctttgatcagacggcggatcaggcggatctgatcttcactgtcgaggatctggaaatcctgcggtaatccggcatcaaggtgatgcgcccgcagaaggcggtgtgccaggccgtggaacgtcccgatccacatcccgccctcactggtgccgaccagctcttcaatacggtggcgcatttccgccgccgctttgttggtaaaggtcactgacattaccgaaaacggagacgcattctccactgccagcagccaggcgatacggtgcaccagcacccgggtttttccggaaccggcacccgccagcaccagcatgtttgagcggggagccgccaccgcttcgcgctgtttatcattaaggctttcaagcagataagagacgtccataatttccatcagtgttttgtgcggcagcgccgcgaaagaaaaagcggcttccggacagccggatccggaagaactggttttttatacagataaaattataacagtccggttaaagaatccaactgtgtaatttcaatatgcggcagcaggcgggtttccgggtcgtgataaacgtcacggccgtcaaggttgatccagcaggcctgcatgccgctgcacagcgcaccttccacatcggtattcaggttatcaccgacatgcaggatattttctgccgggatagccagccgctgcaccgccgtacgatacatatcgcagaacggctttgccctcccgtcgggaccggctttgagaataaaagtaaaataatctgccagcccgcatttttccggctccatattgccgttggtgatcgccaccagcggaatttttgccgccagcgcagcaagtgtgtcatgcgtggactgcggcacatcaatacggctgcgccactgcgcaaaatgcgccatcaccgcatccgctccggcctgagcacgggcagcggtatagccgtaatgcaggaaaaaggtgcgccaggagagcagacgccagcggctgacatcatggaaaatctccggctgctgacggcggatccggtcacggaacacattaatatagtcagccggtaattcactgaaacgcggatcatactgacggataaacgcaatgacctcctcctcggttttatccatcaccggacgattatcatacagcgtatcgtcaagatcgaacgtcatggcgcggacaggcgaaagggggcggtaaaaacgcattacggttttcctcgtttagcccgcggatgtgcaacatcatacacattggcaagatgctgaaaatccagatgggtatagatttgcgtggtggacagattagcatgccccagcaattcctgcacggcgcgcaggtcgccgctggattcaagaatatgagtcgcaaaggagtggcgcagcttatgcgggttcagatggctgttcagcccctggtgcagaccccagtattcaaaccgtttctgcacattacgcgccgagatccgcttaccgcttttggtggagataaataccgcccggtcttccgggtcatacagctcgcgcagcggcagccagcgttccagacaggcaaccgccgttttgccgagcggcactttgcgttctttgctgcccttccccagcacccgcacttcgccggtggccaggtcaaaatccccggtattcagcccgaccagctccgataaacgcagccccgcgccgtacatcacttccagcatggtacggtcacgcacggtcagcggatcattgctgctgatatccatcagccgggtaatatcatccacatccatatttttcggcaggtgccgtccctgtttcggggcactgacagccttggccggattggcgggcagcaggccgttactgacctgccagtcgagaaatgagcggagagcggaaagacgcagcgccaggctggcgggctgtaacccgttacggcggctttttgcggccagcatccgcactgttgccggttccagctgcgcccagctgcggagtttaccggcggccatcatttccgccagcgcggtgagctgacggcggtaattggtaatcgtgaccggacttaaccggcgttccacccgcagatactgcagaaactgttctgccgtgaccagcaggtcatctgccgcactgtccgtcatgccagttccacccaacgctgcagcagctgcggcaggaaataggctacctgttccagcatcgcggtacccatatccttctgatagtgctgcttgtcacggctgacaaaaatcaccacgccgagatcatgttgtccgcccagcagcgatacagacgctgagccgacaaatgcactgtccggcagcagcagctgaatttcaggggcggtcagttgtccgagataatgattgcggtccccgaaacgggagaggcggatggcttcaaagtgtgcgcgggataaggccagatcctgatgacggaacggcgcgcccagccgccagctgtcagtaaacagacgaattttggcatgactgagcttcagccccttcgcccactgattcaggcgttcggaaaaatcatcaagagaagtcgcggcggacagcgacgccagcagtttcagcaggcgtgagaacaggtgttcgttttcacgggcctgtatcatcagttgcatcagatcatccgtcagcgtgcctatccgctcacgctggcgtccgagctgccactccaccagagagaccgcaccttttaccgggtgcgggatggtcatgtcagtgatctgcgcggcattgcggatgaaaaaatccggatgcgctttcagatacgccagcaccgccgcctcatccggctctccggaaggggcgaatacggccgtatcctgttgactgtccattgctatttatcctctttatggtgattaaagatggataacaccatcatatacatgcgtggccgggccggtcataaacaggggttttccctccccttcccagctgataaacagggtgccgccgggtaaatccacctgcacattttctgccagcagaccctggcggatcccgacagagaccgccgcacaggcgccgctgccgcaggcctgtgtttcaccgacaccacgctcgtatacgcgcagacggatatggtcacgcgacaggatctgcataaagccgatatttgcccgctccgggaaacgctcgtggctttccagaacagggccgataacctcaacttccgccgtttccgtgctttccacctggataacacagtgcggattgcccatcgacaccacaccacacagaaccgtgcgttcagcggcgcggataatataggttttctcttctttgactgcgcggaacggtaccagcgccggttcaaactccggcacacccatgttcacgcggacattgtcatcatcggcaatcgtgagcaccatgcgtccggactgcgtgctgacacggatatcccgcttgttggtcagccctttgaggcggacaaaccgggcaaaacagcgcgcaccgttgccgcactgcgccacttcactgccgtcagcgttaaagatgcggtagtgaaaatccagttccgggtcatagggcgcttccaccaccagcagctgatcaaagccgacaccggtgtgccggtctgccagacggcagataagctccggagaaaaatagatattctgggtgacggcgtccaccaccataaaatcattacccaggccgtgcattttggtgaactgcatgttcagatcctgtttacgcctcagtaaccggggttatccggtggtcatttttgcgttttgccggtctcagcgttgtcagtctgcacagcagactgctctgccgcaggcttggctgcaggcgcgtttttcgcgggggcaggctcttccggcgggaagtaaagcgggcctttcagtccgcagccggacagggtcagcagcatcacggcggataccgcacagatcatttttttcttcatttacagtcatgcctgttaatcatcggtcaataccctctataatcgcagttagatgtcgaaaagcaaataggaaatgacgatgaacgatacagaatttcaccggacagcggatgcgctgttgcaggatattgaagcaaaattagatgattacgacggtgatgcggatattgactgcgaaaccaacggcggtgtgatgaccctgagctttgaaaacggctcaaaaattatcatcaacaagcaggaagcatttcaccagatctggctggcggcgcgcaacggcggctatcattttgatctgaaatcagataaatggatttgtgaccgcagcggcggcgagctgtttgccatgctggcacaggccatcagcgagcagagcggcgaaccgttcagcttctgaatctcagactgacggcacagaacctgtgccgtcgcatatcagccgcgctgcccggcggcctgatactgtaacggccggacatccgcatgaaaatccggatacgcggtatcacgcggctcttccgcaacaggctgagagaacatcgtgctgtggaacggcgtaacctgtgttttaccgtccgttttcaggatctgataaaactgcggcagattgaaattgataaagctggagccgtatgtaaagcggtcatgggaagaggaatagaaccggctgacatcccggatcaggtcttctttgctgccttcacagccggaatagatttccacccggtttgattcatccagcacataaatattgaagccgttatcatcacggttttcaaagaagaactgaataatcccctcactggcatagccgtccaccacatccggcagatgaccggtttccgtgctgattttcaccggaaacccgcgcagtttgttgttggaaatcgcaccgtagaattccacagcattttccagtttctgcaccgagacgttaaggcgctcaaagaacagcccccaggtctgaccggccagacgcagtgccttaaagcggcccggatcctgacggttggtggtcaggcgcagctcaatacattcggaaaccagctggcggatgcgggtgctgatcagcccgcgcagatggcggctgtagcagaatacttccacgcctgacggcggtgcggcatcctggtgcatcttgccgagaatggttttcagggcttccagcaccgactgttcaccgctgaaatgcagtgtgcgcacttcattccaggagttgcggtacagcagatcaatactgccgaccaggcatttctgctcctggccgaagctgaacacatccagcttgctcatatcaaaatgcacgacctgctcggcgaaatctgcggtcggatcctgctccagattgacaataatcgccagatggcggatttcacacgggctgtacagcgcacgcggtgtcggggcaggcaggcggatagggaaattctgtgatacatcatgcaccagctcgtgcagtttctgctcgtcgcagtgtgactcaccgttatgaatatagacgcgggttctgtcagtcagcaggccgttgaagtatgtccaggagaccagcttattcagatagcggttatattccagcggctgatggccgatgatggtatggattgtcggtgcctgattatacagataccagccgctgcggttggcgcggcccggcgggacataaataaaggtcagattctcttctgacaaatccggtgaaatctgcgggttgaccagggtgacttttcccggcagcgcctcgaaagcggcatacagtttccgtgtcagcacgccgatatcctgcgggctggcactgacactcagattattgcggcgcgcaaagcggataaggttgcggtagctctgcatcatggtgtcgagcagctcattgtgcgcatcccgcacctgctcaattttccaggcattacggcgatccagcaccgccagccgctccggggaccagccccagcctttcaccatctcagacaacacctggcagcgccagccgcagcaaccgcatgatgcgcgttcgctgacatccgcaggcggcttctcacacactttcaggtagaaacagcggcggatcagatcaaggcgggtttcatcattgatagctttcagataacgggtgacgcggtcgagcatcatcgcgtaagcatccaggccgtggtgaacaatctcaccggcatgcagatgctttttaaactcagttgccagaagctgcccgttcgggtaatcccacgagtaagcttccagcagtaaacttttgatcaccgctttatacggggaatccacactcttatagagctgccacagactggcaccgaagtactcttccgcagacagttcgcccagaccgcccagatccagccattcattgggggttaatacgccctgcgcataaagggagagaacatattcatcatagtgatgttcttcttctgccgggaccatggtccacagcaggcgcttaccggccatccgcacagcggtccggtaaaattcatcgagcagtaaaatatgctgggtcgagccgcagtcctcaccgttgaggctgccgctggcattgtggcggaaacggttttcatcgatcaggaagaaagtgacatcgataccttttgccgctgcccactcttcgatcagtgtgcatttgcggcgcaggttctgtttctcatcgtgatcaagccaggactgatgacagacccagatatcaagatcagaagagtggctctggccgacagacgaggtgctgcccatggaatagataccggtaatcggcagttcgccgccggcattgcacggcagacactctccgtgctgacgggaaaactccgccagccagtgtgactggtaatcatcggacgcccagaaacagacaccgtgcggcacattacccggcacatagcccggcatatccggatggtgatgatgcagcagtaccggcagcagactgtacacgtctttaaacgcacgactcatcccgatggtcgcgcgctcagatctgagctgatttattgcatccaaacgctgcttgagtgtttcaatataaagatacaaaggattcgcctgattttatttcatgtaactggaaacgacctgatgcccggctttatacgtgtatgaatacagactgataaggtaatactgaaaaatgataagaatcgaaccaaagttaaattgccggaaacgtgatcaatctaacaccttcggggcaaagggtaaagcttcacactaaaaaaggcacgattacccaaagttgttattagccggataactaattgtaaaatatatattttcgttgaaaatcaccgggatacacacaaaaaatctaaggaaatattcgggaaaaccggtgtgtttctgttcttgcgcactttttgaccaaaaaagtaatactgcttactcactcaggtcgtttttatttattttaataatgctatgaaatagttatttaaattgaatcgatttaattaatacaattttataattgcaaaatatttttattatttaaaatatgttttaattatttactgacagactcctgccacccgcctgagactatttattcactgatcgtcttttttcgttgttatctgccgggcaggtctcgtcacgtaactggaaaaattatcagcaaaatgataaaacaaaggcagtttttcttatttttccggctatgtttcacataaaaaaacaccggataaaaagacaaggatccctgataattatcatgaccactcaatctctgcgtattgccacccgtcaaagcccgcttgcactgtggcaggccgaatttgtcagacaggaactggaacagcgccatcccgggttgcacgtcgagctcgtcccgatggtcaccaaaggtgacattattctagatacgccgctggcgaaagtcggcggcaaagggctgttcgtcaaagaactggaactggcattactggaaaaccgtgcggatatcgccgtgcactccatgaaggatgtcccggtcgatttcccggacggactgggattagtcactatctgtgagcgggaagacccgcgcgatgcttttgtttccaaccattatgacaatgtggatgccctgccgcccggcagtatcgtcggtacctccagtctgcgccgtcagtgccagctgcgcgaacgccgtcctgatctggtgatccgcgacctgcgcggtaatgtcggtacccggctgggtaaactggataacggcgactatgacgcgattatcctggcggttgccgggctgaagcgcctgaaactggatgaacgcatccgctgtgcgctgccgccggaagaatcccttcccgctgtcggtcagggtgcggtcgggattgagtgccgcctggatgatgaacgtacccgttctttactcagcgtcctgaatcacgcgcagaccgatatctgtgtccgtgccgaacgcgccatgaatacccggctggaagggggatgtcaggtgcctatcggcagttatgctatctggcagggggataaaatctggctgcgcgcgctggtcggcgcaccggacggcagtgaaattgtccgcggtgaacgcctgtgcgacccgcaggatgccgctgctgccggcatttctctcgcagaggaactgctggataacggcgcccgggctatcctgacggaagtctatcaggggcatacgcctgcatgaccatcctggtcacccgtccctcaccggccggggaagccctggtcagcgccctgcgctcacgcgggcagaatgccctttctgccccgctcatccgtatttccccgggccatgagctgccgctgctgattgccagaatcgcggcactttctcccggagatgccctttttctgctgtcaaagaatgcggtttatcacgcaaatgaacagcttattcaacagaattacctgtggtctgataagctttgctattatgggattggtcagtcaaccgctaactgctttgaacaactgaccggattccccgctgcctttatgcccggcggggaaaccagcgaacatctgctgaccctgccggacttacaggatatgaccggccgccgcgcacttctgctgcgcggtaacggcggcagagagcatctggcgcagacactgcgcgaacggggcgcagtggtggattactgtgaatgctaccgccgcggacccgtaaattacgacggcggggaatgcgccctgttgtggcagcagcaacaggttcagacgctggtggtgaccagcggcgaaatgctgcacctgctgcggcagctgataccggccgcgcacctcggctggctgctgcaatgccggattattgttgtcagtgacagactggcagctatcgcacaatcactgggctggcagaatattgatgtcgccgccggtgcagataatgaagccttacttcaggctcttcaatgaacagacatgggacgccacgaatgacggaacacgaaaaaaaatccggatcggccgatgtacctgagacacaggatgccgtaatcagtaccgatccgcaggcagagaaaaaagacacggctgccgggaaaaaagcgaccgcaaaaaacgtcactgacaaagcggcgtctgataaaaaaccggcggaaacaccggcggctgacagcaaaccggctgataccgcgccgaaaccggcaccggaagcgccgcagccacggaaaactccgcctgccgctgaggaaaaacagccctccggctttttgcgcggtgctatcgctctggccgttatcctgctgatcggcggcggtgtctggtatgcctcacaggccggtactcagacgctgtcgaaaaacctggaagcggaaaatgcacagctgaaatcgcagatggcacagctgcagcaggaacagcagcagacacaaaaacagatgcaggagtttatcgcgcagcagtctgcgctcagcacacagcatcagcagcaggaagaggctctgaaacacgagctggatttactgcgcagccgtgtcactgcgctgtccagtactgatgtgaaaagctggctgctggcccaggcggatttcctggtcaaaatggcagagcgcaaactgtggaatgaccaggatgtggtcaccgcgatggtactgctgaaaaatgccgatgccagcctcgccgaaatgaacgatccgggtctgctggatgtgcgcaccgcactgcgtaatgacattacggcactgtccgccgtcagtcagatcgattttgacggcacgatcctgcgcctgaaccagcttgccggtcaggtggataatctgcgtctggatgacggcagccgtgacggcgcaccgatggacagcagtgacagtgaagggctgacctcctccgtcgcggactggcgcactaacctgaccaaaagctggaaagggtttatgagcgatttcatcaccatccgccgccgtgacaacacctctgctccgctgctggcaccaaatcaggacatttatgtccgtgaaaatatccgcgcccagttgctgatcgccgctcaggcggtgccgcgtcaccaggaagagagctacaaacagtcgctggatgcggtctccacctgggtccgtgcctatttctctgacagcgatccgaccaacgccgccttcctggccgaagtggatgctctggccgcccagccgatctcaatgagtgcgccggacagcctgaccagccagccgctgctggataaactggtacagacccgtatccgccgtctgctcaacgatgaannnnnnnnnnnnnnnnnnnnnnnnnnnnnnnnnnnnnnnnnnnnnnnnnnnnnnnnnnnnnnnnnnnnnnnnnnnnnnnnnnnnnnnnnnnnnnnnnnnnnnnnnnnnnnnnnnnnnnnnnnnngcaccgcaggaaacacctgctgctgcaccggcacagccggaagcagcaccgcaacaggagggataacagatgtttaaagtctttattctgtttcttatcctgattgccgggattattatcggcccgctggtggccggacatcagggctatgtcctgatccagaccgacaattttgatatcgaaaccagtgttaccggcctggtaatctgctttctcggattacaggcggttctgatgctgctgggctggtgctggcgtcgcctgaaaagcggcagctcccgcaccctcggctggtttggcggtcataaacgcaaccgcgcccgtgcactgaccaacgatgcgctgctcaaactggcggaaggggattttcgtcaggtggaaaaattactgagccgcagtgcggataatgccgagcagccgctggtcaactatctgctggcagcggaagcggcacagcagcgcagtgataatctccgcgccaatcagtatctggagcgggcttccgagctggccgggcgtcatcagttaccggtggatatcacccgtgcccgtattctgctgagccgcgatgaaattccggcggcgagaaccgctatcgacaatctgctggaagtcgcaccgcgccatccggaagtgcttcgcctggcggaacaggtgtatgcgcgctccggtgcctggaaatccctgatcgccattctgccgcagatgaaaaaatccggcgaatttacggatgaacaggttgaacagacggagatccgcgcctggctcggtatgatgcagcaggttgcggatcaggacggcagcgatgcactgcgtcactggtggaaaaatctcagccgccatctgcgtcacaatccggagatggccgtggcggccgcgcagcactttatcgccggtgatgatatggcggatgcggaagcggtggtgctcgacggactgaagcgtcagaaagatcagcgcctgctgatgctgctgccgcagatccggacagacaatccgaaagccatccgcaaggtgctgaaccagatgcagaaggaagatgcagatcagccgctgctcaacagtaccctcgggcagctggccatgcaggaaacacgctgggaagatgcggagaaatactttaaatccgccctgagcagccgtcaggacacgcatgatgcggcctggctggccgatgtgctggataagcagaaaaagtatgaggaatctgccatgatccgccgtaatgccctgctcaataccctgacgttaccggatgaaaaaacgccccgcgaataagcacaggcgggttattttttatcacacagagccaatcctgccggattggctttttttatgccggaacatcattaaaagagattgacgggacacattattggtggcaagaatgagacataaaaaaacacctatcgcggaacgataggtgtataaaatacaatcaggtctacagacggatggtgcctcactcaacgttacgtcctgttggtaatgtaaagatttcgggatcttttacatcgataacccggacaataggcaccgaatttagctctgcgtcatctccgggtttatgaagcttacgcaaacataagaaatgagatgagcatctacaccctgatataatgcacaagacgtgccaacttttacgccttctcgatttcccacggttcccgtgggtttattttttttatcctgccttctgcttatcaatcactgatgcaaatctgtccgcagtgtctctgttttgcgacgttttctgacagcattatttaaatcgttatatatcaaaagattaaatgtctcattttggcgacacgcattatgcctgttgtcgccggatctatacaatactcataacgtaatgatttatatcgaaattatcaaacaccattagtaccggcggtttcacgggaaacgcgtgtgtttttgtctgcctgaacaccacagtagcatcagcacaaaagaaacaaaaatcagctgcggaacggcagcaggaagaaaaaaacagggcaggaaaaaaacagaaaccgcagaaacgaaaaagccccgctgtaagcggggctttctctgaatatggtcggcgagataggatt

SEQ ID NO: 15 - DNA, 35456 bp, unknown
  Altogen 322075 strain
tcatcactacagtcatgttacatgttattaaatggggtggctaatgggactcgaacccacgacgactggaatcacaatccagggctctaccaactgagctatagccaccataacatcgcaacattttactacttacaacaacgaaatactataccgtaactcttacacgcataatggcgcgcccgacaggattcgaacctgagacctctgcctccggagggcagcgctctatccagctgagctacgggcgctttgcgccgttgcgggagaggatagtacggatttctcatccgtctgtccagtgctttttttcacaaatgtattgtttgctcagtctttgcccgctttgctgataaagagagcattttcccgcaaaaagccgcccggacaggggcaattataatttattaccgtagtaataacccagaaatttcagcagttttaactgacggcggaagcgggtcggttgtgataacaggcggtagagccactccagccccatgttctgccacaccttcggcgcacgcttcacatgaccggtaaagacgtcgtaagtaccacccacgcccatatacagggcatccggatggatcttacggcagtcacgcataaagatttcctgtttcggcgagcccattgccaccgtcacgatttttgcgccgctgtcgcggatgcgctcaaacagggcatcacgctgttctgcggtgaaatagccgtcctgcgtacctgccagattgacattccactgtgctttcagtttggcttcggtttccgccagcacttccggcttaccgccgaccagaaacaccggcgtgttttcctgcccggcgcgttccatcagcccttcccacaaatccgccccggcaatccgcgagacatccgcctgcgggtatttgcggcggatagcacggacaatgctgatcccgtccgcatacagatattctgcgttgctcagcagtgtgtgcagcgcctcatcctgttcggcggtcatgactttttcggcattaatggctaccagcgtaccggttctgatctgtccgtccttaaacagataatccagaaaatgcgcctgattccggaaaccctgaatcgggtggttacggatagaatactgcgggatattttccgcgctgccggcatcagaagataacggttccatgctaattccttacgatgaaagacgggtgcgtttgccctttgaaatcacataatggcggataagtccggccgtttcgaacagccagtacagtaatttcgccaccaccagacaaaagccgaaaataagacagaaaaacaccacgcgggaaacgaatgagtccattccctcgcgggccagcacaatcatgttaaatatcgcgccgaaacaaaatgcatgaagaatggccgctttgtaacggtttgtctcccgtttgcccagctcatacagccagtcgaaccatttgattatcagcccgaccaccaccgcaccgagcgggataaaccagaagccgcccatcaccaccagcgagccgatcagtgtcggggatatcgccagcccggaatggttgttcagcacttcccaggtaaaatagtttgccgcattcagtacggtatccggccggtccggccacagccaggacgggataaagacatagaagtcacggataatcggcgccagcccctggaactcaattttgtcgtagttattcagcagcaggccgaggttttcccacggcgagaaggtatcgcgggtcagatagaggaacgtgtaaaatgcctctgccccgctgacatccaggctgtaacgtttgagtgccagccagaacatacccaccacgccgaagaccccggcgctgaccagcatccacagcgaaatccagccgcgcacaatgccgataaacaggaacagcgcaaacgcgataatgatattggcgcgggtaccgccgacaatcacataagtcataatcccgaacgccaccgtggtgatcaggaagaaaatccagcgctggaatgtgggtttcaggaagaacaccaccagcatcgccgggataaagaagtagaaaaagcgctttaaggccacgccggtgacctggctcgagaaaatctgactgtaggttttcagcttaaacagcagcagcccgttttccataaagaaaataccggcggtcgcgacggcaatcgccgccagcagcagccaggtgagccgggtttctgttttgttcatggaaaacagcggcgtaccgctgtaaaccgcgtctggtctgcgcagccgggttttatacgccacataataaatggcatagaagctgactgacgccagcagcgcctgtaacaacgcggacggcggcaccacctgcacatcaaactggaacaccagtgcaaaggtaaacgggaagccgaaaaagaaggtcagcagatagagcatggagaaaaagatattaaaactgaagcggacccggcggaattcgcggtaggtcagcagcagaataaaggccagcgagataaaccagacggcaaacagcccgatgaaatcaaactgactcatgcctgtgtctcctgcgcagcggccagtgcctgctcccagccctgcacaaaattcgggctgaagaaggcaattttttcacgatccagcgcgaacagctgctcccgcgcctgcgccaccacgtccggcgtcacgtcatcaccgtaaaacagaaccggcacctgctgctcggtcatatcctgccagaacgggttctgacggcttatcacaaacggaataccgaactggatcagcagacacagtgtgccgatcccctgctggcggttaaagataaagtatccgaggtcgcattgtttcagcagattcagatagatatcaaaatccatcttatctttcaggatctccgcctgctgctgagggaacaactgctgcgcgaaagcatccacttccgcaatatagtccccgttgttttccggatagcccatcgggataatgattttcaccttctccccgaactgctcatgaatgcgcgtcagcgcctctttatggcggtttgaacggtcacccgagttacccagcaggatcatcatattatcatcaccacgcggctcaggcggcgttaaaaccgtcagagagggatccatccgcgtcgggaaatagagcaggtcagccgggatcttcgggcaaaactgggcaaaatagtttaaatcgccgcgcgtgccgaacacatgaccgacccgcttctgtgccagccggcgcaggtgataaaacagtctgaatttcagctgacgggaatcctcatacagatccgcgccccagatatgccagtaaaactgatgacgtttaatttttcctgataataatgccagccagatcagggcattaaactgaccatggaagaaaaagcggcactgccggtcacgttttgctttcgcggtgacggcattcgccaggctttttttatccggccagacatccagttccaggttgggatattgcgccagaagctgcccggcggtggaaacaaccataaattcaggcatttcctcacgcggcagctgcggtgccagcacatcattgaagaagcgcagcacggtctggttatgatgcgggatatcagatcctaaaacgtgaattaaagttgtcatgctcgcctgcaatagatcagaaatacgctacaacacaaaaggaagtagataatatatgtcagcatataggcctgtgccgcgccgacggcaccgtgtgccggaatcagccagtacgcggacagcgtcagtaaagcaaactgggtcacttccgtgaggatataaaaccgcagtgcggccttggcaatcaccagataaccgaagacgtaagcgcccactttcaggacatcaccaaccagctgccaggcaaacaggtcgcgcatgccggtaaatttatccgtgaacagcagccagatagcaaaatcacgcagcagccagaccataaaactggccgcagccaccgccggtaacacaaatttcagtgatttgatgatctcacggcggatatcactttttgcctgcaaccgcgataatgtcggcagcagataaacagaaaacgacgcggtaataaactggagataggcatccgaaatactggtcacgccaccccatatccctacctcatcccagctgtagcgggaggccagcaggttccgcatcatgatatacgccaccggcagtgtgaccgccgtcatcagcgccatcagggtgaatttccccagatgggatgcaatcgcccggtcccaggccggtttcagctcggaaagcgggaaatggcggcggcgcagcagcatgacaaaagccggaataataatcagcgccggcaccagcgcaagcccggccagtgcgccgtcatagccccaccagcgctggcagagataatacgccgtgacgccgatcagactgcccgcgatcagcgccagcgcattaccggacgcatcccggtatcctttgataatcgcgagaaaatagttggcgtaagcaatacccatctggataaaggccaccgccgcaacaacgtcctgataagcgtcattgccgtcaaacagcgccatgctgattggtctgctgaacagcagaaacacaatcgccagcagtgtcgaaaacaccagaatcagggttgaggacgtgcctaacaccgcccggcgtttttccgcatcatcacggtgctcggcgatatatttggtcacgccgttaaaaataccggcacctgacaatacccccagcaccgtaatcagctggcggaagttcagtgcctggccgataccggccgggccgaatgtcagagccattaatttaatgaccaacagccccgccccgattttgatcagggtggagccggcggtccagacagaggctttagcgagggacatactacgcgaagaagcccttaatcaggtggatcacgcgctgctgctcttcttctgtcatgttgtagaacatcggcagacgcaccagacgctcgctttcacgggtggtaaagatatcctcaccgtggaaacgaccgaactccataccggccgggcagctgtgcagcggcacatagtggaacacggtcagcacgtcattggctttcatgtattcgctgaatgcggtgcgctctgccacatctttcagtttgatgtagaacatgtgcgcgttctgctccagattttccggaacaaccggcagcgtcagcaggccatcctgcgccagcggggtcagggcatcatagtaaatctgccagaatgccaggcggcgctcgttgattttttccgcttcttccagctgtgcccacaggtatgcggcctgtaagtcggacatcagatagctggagccgatatcacgccaggtgtatttatccacctgtccgcggaagaactcactgcggttggtgcctttctcgcggatgatttccgcacggccaatcattgccggatcgttaatcagggtggcaccgccctctccgccggaggagtagtttttggtttcgtggaagctgtagcagccgatatggccgatagaacccagcgcgcggcctttgtaagttgacatcacgccctgcgcggcatcttccaccacaaagaggttatatttcttcgccagcgccatgatgatgtccatttcacaggccacgcctgcgtaatgcaccggcacaatcgctttggttttatcggtgatagccgcttcaattttggtttcatcgatgttcatggtgtccggacggatatcaacaaacaccactttcgcaccgcgcagcacaaaggcgttggaggtggagacgaaggtatagctcggcatgataacttcagcacccggctgaatatccagcaggattgccgccatttccagtgaggcggtacaggacggggtcagcaggactttggcgctgccgaaccgtttttccatccactcttcgcattttttggtgaacgaaccgtcaccgcacagcttgccgcttttcatggcctgctgcatatattcaacttcagtgccgactacaggtggtttattaaatggaatcattgcatcctcggtataaccagtaggcagtgctgtcaaccgcaccaccgctttttgtataaaggcgcattgccgcaaggttactgagttgtgttgcaacccgtaatacacggcagtgatgttctgcacaccactgttgcgccgccgacattaatttcaggccgataccctgaccctgattgcccggcagtaccgccagcagcccgatacgggcgctgtgttcgtctgtctggcggagagtaacaaacccggcaatctcattgtttttattgcggatgagcagacaatctttatcgaatgtcccgcgtaccgctttttccgcccacaccgcataaaagcgggcgctgtcatccggctgataccacggcgcacggaaacggctctggctgaaaacctgtgccgccgcctgttttatcaccgggatatccgtttcatccgcataacagagtgtactgtcagacattgcattttctgtgccactcctgagtgacaatgcaaaatccacttcactttccgcgagggaaaagccgagtgccgataaaccgtccagtgccgcgttatccccggcactgattttggcctgcaccaggtcgtacggcgcaaaatctgccgcagacagtgctgctgcgtccggagaaaatgccagttttgccgttttcagggcaaaaaagtcactttcccaggcgaggtactcaatactggcgcggacggacatggagtaaattcttcagatactgaccataaccggtcttcgccagctgacgggcggattccgccacctgttcgtcattcagccagccgttgcgccaggcaatctcttccagacaggcaattttaaagccctgacgtttttcaaccgtctgcacaaaggtgctggcttcaatcaggctgtcatgagtgccggtgtccagccaggcaaaaccacggccgagcagctcaacattcaattcaccgcgctccagatacatctggttgatactggtgatttccagttcgccgcgctcagatggtttcacctgtttggcgatatcaaccacctgattatcataaaaatacaacccggtaaccgcccagttggatttcggatgaaccggtttttcttctatcgacagcgcacggaattcatcatcaaactccaccacaccgaaacgttccgggtccatcacctgatagccgaaaacagtcgcgccctgcgtccgcgccgcgacacttttcagtttcgggctgaatgcatggccgaagaaaatattatcgcccaggaccaggctgcagctgtcatcaccgataaactcctcaccgatgataaaggcctgtgccaggccgtccggcgacggctgttccgcatagctcagagaaataccgaactgatcgccattccccagcagacggcggaatgacggcagatcttccggtgttgagatgatcaggacttcgcggatcccggccagcatcagcacggacagcggatagtagatcatcggcttgtcgtaaatcggcagcagctgttttgacaccccgcgggtgatcgggtgcaaccgggttccggagccgcccgccagaataattcctttcataccagcctcttacttatcctgacccagtcccagacgctgtccggcatacgagccgtcctgcacccggcgccaccaggtttcattattcagataccattccacggttttgcggataccggactcaaacgtttcctgcgggcgccagcccaggtcgcgctcaattttgtccgcatcaatcgcataacgcagatcatggcccggacggtctgtcacataggtgataaggtcgcggtattgcgcgacaccggccggtttctgcggatgcagctcttcgagcagctcacagatagtttccaccacctgaatatttttgcgctcgttatggccgccgatattgtaggtttcaccgatgtttgcctgtgtcactacggtatacagggcgcgggcatggtcatcgacaaacagccagtcgcggatctgctcacctttaccgtaaaccggcagcggtttgccggaaatcgcattgagaatcaccagcgggatcagtttttccgggaaatggtacggcccgtagttatttgagcagttggtgatcacagacgggaagccgtaagtccgctgccaggcacgtaccagatggtcactggaggctttggaggcagagtacgggctgctcggtgcatacggtgtggtttcggtgaaaaagccgtcaggcccttccaggtcaccgtaaacttcgtcggtggaaatatggtggaaacggaatgcggattttttctccgcatccagtgccgtccagtaatggcgcgcagcttccagcagtgtgtaagtgcccacaatgttggtttcgataaacgccgccgggccgtcgatagagcgatctacatgactttccgccgccagatgcatcaccgcatccggctgatactgtgcgaacacgcggtcaagcgccgcgcggtcacagatatccacctgttcaaaggcatagcgcgggtcagccgccaccggtgccagtgattcaaggttaccggcgtaggtcagtttatccaccaccaccacactgtcagcagtatcacggataatatgacgaacaaccgcagagccgataaaaccggctccgcctgtcactaaaatacgtttcaacgccatactcctttggtgtcgataatccatttctgcgggatctggctgcccgggatacctttgaacggcgtgtgatccaccagcagcaggataatatccgcgtcagtaatcgctttttcgatggagaccagctctgtcaggcctttcagtttgcccggcagttcatgaacgttcggctcaaccgccagagttttccctgcatgccactctgccaccattttagtgacctgaaccgcagggctttcacgcagatcgtcgatatttggtttgaatgccaggccaaagcaggcaatcgtcacttcattggcacgtttgccggtttcagtcaggcaatcagcaaccgcttgttttacctgatcaataacccacagtggtttgccgtcgttaaccaggcgcgcagtgtggatcagacgggcctgtttcgggttctgcgccacgatgaaccacgggtcaactgcgatacagtgaccgccgacgcccggacccggctgcaggatattcacacgcggatggcggtttgccaggctgatcagttcccagacattaatgccctggtcagcacaaatcagtgataattcattcgcaaacgcaatgttcacatcgcggaagctgttttcggtcagtttgcacatctcagccgtgcgcgcgttagtaatgacacactcaccttccaggaagatgtaatagagttcactggcgcgttttgaggattttggtgtcatcccgccgaccacacggtcgtttttaatcagttcaaccatcacctggcccggcagcacacgctcagggcaataggcgatatcgatatcagattcttcacccgcctgctgcgggaaagtcagatcaggccgtcccccccccagccactctgccatctgctcagtcgcaccgaccggcgaggtggattcgagaataatcaggtcaccttttttcagtaccggtgcgatagattccgccgcagactgcacaaaagccagatccggctcgtgatcacctttaaacggtgtcggtacggcaatcaggaacgcatcagcaggctgaggtttggtgaaggctttcaggaaaccgccttccacagctgttttcacaaccgcgcccaggtccggctccacaatatgaatttcaccacggttaatggtatcaaccgcatgctggttcacatccacaccaaccactttcttctgacgggaggcaaaagctgccgctgttggtaaaccgatataacccagaccgacaacagaaatagtttcaaaactcataatgtcacctgattgtttttcaatgcttcaagaatacgctggcacgcttttccgtccccgtaagggttatgtgaacggctcatctcatgataagccgccggatcggtcagcaatcgcgttacttcacgaacgatagtgccggtttcagtgccgaccagacgaacagtcccggcgtcaatcgcctccggacgttcggtggtatcacgcatcaccagaaccggtttacctaatgacggtgcttcttcctgaatgccgcctgagtcggtcaggatcatataagcatggttcataaggtagacaaaaggaaggtaatcctgcggactgatcagcacaatattgctgatatcatgcaggatccgttttaccggctcactgacattcggattgaggtgaaccgggtagacaatctggacttccggatgggtcgtggcaatttccgccagtgcgtggcaaatccgctcaaacccgccgccgaaactctcacggcggtggccggtgaccaggatcattttcttgctgctgtcgataaacggatactgtgcatccagctgcgccagcagggccttgtcctgcatgatgcggtcacggaccgcgagcagcgcatcaatcaccgtattaccggtgacgaaaatatgatggtcattaatcccttcacgcagcaggttttcgcgtgaattttgtgtcggcgcaaaatggtacatcgccaggtgtccggcaattttgcggttggcttcttccggccacggtgagtacaggtttccggtgcgcagaccggcttccacatgaccgacagggatacgctggtagaacgccgccaggctcgttgccatggtggttgcggtatcgccgtgaaccagaacgacatccggtttaaagtcggccagaaccggcttcaaaccctcaagaatacgacaggtaatatcagttaaatcctgtcccgggcgcataatattgagatcataatccggtgtgatctcaaaaaggtgtaatacctgatccagcatttcacgatgctgcgcggtcacacaaacttttgcctcaaaagcctgatccgctgccagcgcatgtaccagcggagccattttgatagcttccgggcgggtaccaaatacagtcaatactttcactgagagtctcttttattttatatgatatccggctttccggccggtggcggttacccgccttaaaacaggccgggaacagcgccccggccggttattctgccgctgccgttacggacggcggcggaccagcgccacaccggcaccggtcagagcaccgataaagccccacataatcatcatgaaggcacggcgcgggctgtcacgttttaccggctcgtccggtgtccgcagatagcggtaggcacggaagttatcttccagcgcaggacccacattcagcgtcgacagcatggcaatgttctgctcgtaatctttatcaaactcaggtccggcagcttccagtgtctccagacgcgcctgtaacatcggcgtacctaacaggaacagctgggaggacggcagttcgtcggcaggcacatctgtccggctgcggctgataccctgtttctgtgcggccgcgatagcatttttcagctgtccggtttcacgctgatacagtgattccgccaccatcttctggcgtttgaccagtgctttcagtgactgtgaccgggtcgcccacgcccctttcagctcatcgttaagattctgagccgcacgcgcgttggcaaaatccacatactgactcagcagtttcgcggagtccgctgcagattccgctgtcagcgtcagcgtgtcattcaccagtttcttcgtatcatcacgcggggtcagcgtgatgttattgatcatttcgtccagcagtgccgcatctgctttggcatcattttccatgcgggacttgtagtaatccgtctgtaaccagaaatcacggcgggtatcataagatgccgcctgggtaataaattcctggtaggcctcattcggaatcggcagcagtgctgaagattcctgagcggcattcagatgcgtgtccagattacgcataaattgctgctgggaataatatccgcctaaattattaacggtcggataatccgtgatcgccgtggaattccacttctgctgcataaaataactggcacccaatgcaaccagcgcaaacacaaccgccatcccggctatccataattttccgcgccataacgacataaataatgcgcggatatctaattcctggtcatactgcgtttgttgcgggtccggagtattttctgaacgcatatcaacatgtgcctctgtggttaaaaatttagtgtgtgaccgatttgcgacgcacgcggcgtctgtgacgtttgataaaacgggcaactttccaggcgcgttttatgcagtagccgtacataataaaagcaagcaagaacagtgccagcatcacccactcagggacaaagctgagtacctgtccggcaataccgatagccgctaatactgccgcagcaagggttatcaccacaaaggattcacgggacgtaaacccggaacgcataatcagatgatgaatatgctggcgatccggtgaaaacgggctcatccctttgcgcaggcggcggtacataatcgctaccatgtccatcagcggaatggcgataatccacagtgcggtcactgcattaattgcatgcggctctccgccctgtgaggccgatgtcagcagccagataatggtgaatccgatcagcgtactgccagcatcccccataaacactttaaagcggcggccgaacagcccgaggttaaagcagatatacggcagaatggcagcgataaaggtaaaacaccagaacgccagaccgctgttaccgctcagggcaaacaggatccccagcgcgccgaaagaaacacaggaaagcccgccgagcagcccgtcaataccatccaccatattgaacgcattcaccgcgccccataccgcaaacagtgtcagcacatagctgaacggcccgagtgtcagttcccacggcccgaatgcatgacccaggctgtcaagtttcaggttggcaaacaccatcataatgatagcaaccaccgcctgaacaccggcccgcagtttcacactgaggtcaaaccggtcatccagcgccccgaccagcaccagcgcaccggcgcacccgagataaataaatttatgtgcaataaactcatcactgatgaggaaagcaaagcagacactgataaaaatagaaatcccgccgactaacgggaccagtccctgatgctttttgcggtaattgggtttatccaccaaaccgacagcgacgccagccttacgggcaacaaagaccgtcgctgtggcgaacacaaatatgattaggagttcagttaacatagtgagattcacaacaaccctttctgatatttttattatccctgccggccgatatcaccgtgcagaacttgccattaccaggcaaaataatatatgcaagaaacataccacgccctgttacgcgggggttccgaacataaccggtaaaaaaaaacgccacaatgcatgcggcgttagttataaagtgtcgtcgaaaagctacgagcgtttcatgaagtcgaagaactcttcgttggtcttcgtcatcgcgagtttgttaatcaggaactccattgcatcaatctcacccatcggatggataattttgcgcaggatccacattttctgcagttcgtcctgagtggtcagcagctcttctttacgtgtaccggaacggttgtaatcaatcgccgggaagacacgtttttctgcaatcttacgggacaggtgtaattccatgttacctgtacctttaaattcttcgtagataacttcatccatcttcgacccggtatcaaccagtgccgttgcgatgatagtcaggcttccgccctcttccacgttacgcgcggcaccgaagaaacgcttaggacggtgcagggcgttagcatccacaccaccggtcagtactttaccggaggaaggaaccacggtgttgtaggcacgggccagacgggtaatggagtcgagcaggatgatgacatcttttttatgctcaaccaggcgtttggctttctcgataaccatttccgcgacctgaacgtgacgcgcagccggttcatcaaaggtggatgcgataacttcacctttgaccagacgctgcatctcggtcacttcttccggacgttcgtcgatcagcagaaccatcagcacacagtcagggtagttatgtgcgatattggctgcgatattctgcagcagcatggttttaccggctttcggcggtgccacaatcagaccacgctgaccacggccgataggagcagccagatcaagaacacgggcggttaaatcttctgttgaaccattaccgcgctccatacgcagacgacggtttgcgtgcagtggagttaagttttcaaacaggattttactgcgggcgttttcaggtttgtcaaagttaacttcgttaactttcagcagggcaaaatagcgctcaccttctttcggcggacggattttacctgaaatggtatcaccggtacggaggttaaaacggcggatttggctgggagaaacgtagatatcatcaggacctgcgaggtatgaactgtcagcagagcggaggaaaccaaagccgtcctgcaatatttccagcacaccgtcaccgaaaatatcctcgccgctcttcgcgtgctgcttgaggatagagaagatgatgtcctgttttctcatgcgggccaggttttccagccccatattttcgccaagagtaatcagctctgataccggcgtattctttaattcggtaagattcataatggtgggttctttgactcggggtgtatctcgaattatgaacgtgaataatacggtaacgttatcgttaccaggttaattttttacaaaaccgattttcactgttaatacgaatatttttgcatttccaggtaatcgtctgcaaggctgactgtgaacacccggcacagggcaagatgtgatgcacatcctatttgggagaacaaattgggtgacattcccgcaaattagatttatctccgagggataaccggacaccgggaccggaatatcggataccttgatgtatccggagataacagactttcagacactacagagttgtcagtatgctatgctgtctgaggagcttcagcgatacctgatcagctggcgctaacttatcatgcttcagagaagacgtccagcgggtgaacaaggattaattcacgttcccgcgggacatcttaacgacatatgctgaaaccggctatcagatattgttatcgataaaggttttcagctgggttttggataccgcaccaacctgcgttgccttcaccacgccgtctttgaacagcagtaatgtcgggataccgcggatgccgtattgcggcgctgtctgcgggttatcatcgatgttcagttttgcgatagtgattttccctgcatattcgtcggcgatttcgtctagaataggggcaatcattttacacgggccacaccaggctgcccaaaaatcaacgagcacagggccgtttgcttttaatacgctttgttcgaaaacggaatcagtcaggtgaataattttatcgctcattgttccactccaaaatttgtacgatacccggttagtctaccattatttaatgataggatttacctatttcagcgaatagacttccgtaacgcaacattaaactgatattctacctaaatatgagcaaaacacatttaacagacaagaagttttctgacttcgccttgcatactaaagtggtagaagcgcttgattctaagggcttttataactgtacgcctattcaggcgctgacacttcccctgacgatcaacggccgggatgttgcaggacaggcacaaacaggaacagggaagacgctggcatttctgacgtcaacgtttcatcatttacttacccatccggcaccggaaggccgcaaaatcaatcagccgcgtgcgctgattatggccccgacccgcgaactcgcggtgcagatccattctgacgccgaaccactgtctcagcttaccgggctgaaaaccggcctggcttacggcggtgacggctacgataaacaaatcaaagtgctggatgaaggcgtcgatgtgattatcggcaccaccgggcgcttaatcgacttcgccaaacagggccgcctcgacctgagcgccattcaggttgtggttctcgatgaagctgaccgtatgtacgatctcggctttatcaaagatatccgctggctgttccgccatatgccgccatgtgccgagcgtatgaacctgctgttctccgcaacactctcctaccgcgtccgtgagctcgcgtttgagcagatgaacaacccggaatacattgaaattgaaccggaacagcgtaccggtcaccggatcaaagaagagttattctatccgtccaacgaagaaaaaatgcgcctcctccagacactgctggaagaagagtggccggatcgctgcattattttcgctaataccaaacaccgctgtgaagatatctgggcacacctggcggctgacggccaccgtgtcggcctgctgaccggcgatgtggcgcagaaaaaacgtctgcgtattctcgaggatttcactcacggtaatctggatattctggtggcaacggatgttgcggcccgtggtctgcatatcccgtcagtgactcacgtctttaactatgatctgccggatgactgtgaagattatgttcaccgtatcggccgtaccgggcgtgccggggaaagtggtcactccatcagcctggcctgtgaagagtacgctctgaacctgcctgcgattgaagaatataccggccatccgattccggtcagtaaatacaacagcgatgcactgctgacagatctgccggtgccgaagcgccgtcgtcgtccgccgcgcacggggggtggtcagaaccgccgtaatatgccgcgccgcagcagcaacgggccgcgtcataacaataaccgcaccaaacgctgaaggctgccatgctgagatcgtcctcgctttatgctgccatcgatctgggttccaacagctttcatatgctggtggtacgggagatcgcgggcagtattcaggtactgtcacggataaaacgcaaggttcgtctggcagccggtctggataaagagaatatcctgtctccggcagcgatggcccgcggctggcagtgtctgcgtctgttttccgaacatctgcaggatatcccggattcccagatccgcgtggtggcgacagccaccctgcgcctggccagaaatgccggtgaatttctggaaacagcagcggagatcctcggtcatccggttacggtaatccggggcgaggaagaagcacgcctgatttatcagggtgttgcccacaccaccggcggatcagacaaacgtctggtggtcgatatcggcggcggcagtaccgaactggtgaccggcagcggcacccggaccaccgccctcttcagcctggaaatgggctgcgtcacctggctggagcgctattttaccgatcgctccctgaccacagagaatttcgccggtgccgaacaggctgcccgcgatattatcgccccggttgctcccgcacttctggagcagggctggcaggtgtgtgtcggcgcatccggtactgtccaggcacttcaggaaatcatgattgcccagggcatggatgaacaaatcaccctgccgaaactgcagcagctcaaacgcaaagcgattgagtgcggcaaactggaagagctggagattgaagggctgacgctggaacgggcactggtattcccgagcgggctggccattcttatcgcgatttttgaaacactcggcattgacggtatgacactcgccgggggagcactgcgtgaagggctggtctacggcatgctggaattgccggtagagcaggatatccgcacccggacactgaaaaatattcagaagcgttttcagatagatgccgaccagggtaaacgtgtccgccagttagcggatcacttttttcagcaggtggcaaccgcctggcagctggatatccgctgccgtgaactgctcagcagcgcctctctgatccatgaaatagggctgagtgttgatttccgcaaaggcccggaacatgccggttatctggtcagtaatctggatttacccggtttcacaccggcacagcgccggctgttagcggtgctgctgcgcaatcagagcggcccgctggatatccattctctcaatcagcaaaatgcgctgacaccgcgtgaagccggttgtctgtgtcgtctgctgcgtctggcaattatttttgccagccgccgccgtgatgacacgctgccgtcgctgcgcatccgggcgtctgcggaagggctgattatcacactgccggtcggctggcagcaattgcatccgctgcgtgcggaagcattacagcaggaaattcagtggcagagttatgtgcagtggtcactgatgctggaagaacagaagccgtccaccctcggctgacaaataataagccctgattatccgttttcggacattatcagggtttttattttatgagccttttcaaagtgatccaacttacgggtcataatccaccacgtagcggcttccatcagtaattccggatcatcatttttattggcaaagaatgcgtaaaacgataaacctgtattctcaccttttttcagtatcttatcatcacataccgcgatcatttttgctctgagtgattccctcatccgttttcttcctttttctttgccagcatcgccttcagcccggccacaccgcgcagcccggcctgttgtttctcttcggcggttttcaccacttttttgccgtcatcccagtgcagatcatcctgcggcagttcatagagaaaccggctcggttcggggcggatcagctcgccgtactggcggcgctcacggcacagggtaaaaaagagggatttctgagcgcgggtgatccccacataggccagacgccgctcttcatccacgttatcctcatcgatactggactgatgcggcaaaatcccctcttccatgcccaccaggaaaacatacggaaattccagccccttggaggcatgcagcgtcatcagctgcacctgatccagttcctccgcttcctcgccgcgctccatcatgtcgcgcagcgtaaagcgggtaaccacctgggccagcgtcatcggctcgttgagatcatccccttccagcatttcagccatccagctgaacagctgatcgacgttctttatccgcatctcagcggctttcgggctggctgacgtttcgaagagccagctctgataatccaggccgtgcagtaaatcccgcaccgcgatcagcggctcgcgctcaaccagcttttccacctccgccagccagccggtgaaattcgtcagcgccgccagcccctgaccggaaagtgtctgccccagtccgaggtcaaaactggcctgatacaagcttttatcccgcgtattggcccactcacccagcttctgaatggtggccgggccaataccccggcgcggggtattcacgacacgcagaaacgcgctgtcatcttccgggttggtcagcacccgcagatacgccagtaaatccttaatttccggacgggagaagaaagaggttccgccggaaatccggtacgggatccggttttgcatcagcattttttcaaagatccgcgactgatggttgccgcggtataagatcgcgtaatctttataatcggtcttattgataaagtgatgggcgatcagctccccgaccacccgctccgcttcatgatcttcattatttgcggtgatcactttcatcggatcaccatagccgaggtttgaaaaaagctgtttttcaaacacatgcgggttattagcgatcaggatattcgctgcattcagaatacagccggacgagcggtaattctgctccagcttgatcacccgcaactccggaaaatctttactcagctgcaccaggtttttcggctgtgcgccgcgccatgaataaattgactgatcatcatcacccacgaccgtaaaatacgcgcgtttaccgaccagcaatttcaccagctgatactgactggtgttggtatcctgatactcatccaccagcagataacggatacgctgctgccagcgctcacgcgcctgttcatcgcgggcaaacagcagtgtaggtttggtgataaggtcatcaaaatcaagcacattgcaactgctcagatgcagttcatagcggcggtaacactcagcaaacgtatgttcgcgctctgaacgcgccagtccttttgcctgttccggtgtcagcagggcattcttccagtttgagatctggctgaccagctgttgcagtaactctttatcttcttccagatgatcaaacgtcagctctttgagcagcgcgagctgatcctgatcgtcgaacagggagaaattacttttcatccccagcgctttatattcccgcttgataatctccagccccagcgtatggaatgtggaaatcatcagccctttggcctctttgcgccccagggtttgtgcaacacgttctttcatttcccgcgcggctttgttggtgaaggtcaccgccgcaatctgacggggctgatagccggtattgcggatcagatgcgcaattttattggtgatcacacgggttttgccggaaccggcacccgcaagcacaaggcacgggccctgaacatactcaacggcctgctgctgaccgggatttaatttcatacgcgctgttaactcgactcaatactggaacaggagggaattgtagcagaaaggagggagagccgtataatctgccctgcacaacacattcccgtcatcttacattagataaaatagtatttatattcaattgattatcactcgtctggtgtatatctctgtcatccgtatatcggtaacatgataaagacaaatacctgccggaaaaacacagatggcatcacgacttgatattgaaaaatccagattggtatatacacaggagatcggctggatagaccgtaaccacgcattaggcggggatgcacgaagcctgtgggcacaactgctcacagagaacaccacgccctattacaaagactattttttagtcagttacgatcagcttatgggaaaatttttcattaaaatgggtgttacttcctgctggctggtgaaaaaagggctcagagaagaagacaaaaaatcgattgccctttcaattatgttttatatctccacgttatttgaaactcatcagggacgatttttattttccggcctgttaggcagtgacagcggcttcagcggagaggatctgatttccaaccttcttggtttttattccgtgattgaaccccgtgattactggtcactgataaaaccggttcccactgaaaccgccctgcgtatctgggatcattatggtcctgtcggtaaatataaaaacagagaactgcgcccctggatttttccggatccacaggaatcccccaacggggtacctttcaaaaaaaatctgcctcattatatgaataccattcagccttttaattcctatgaaaatgatattgtaattaaactgaatgttactgatagctgggcgggtgactggggcttccgaaaatggaatccatttgcaggtaaacatgctaactaaattagtttcattaattacactcattatatttcttctttttttatactgttttttgtcgccaaaccaatactttccggcaacaaattacataaagtcattacttttgacctccgattttattcgtaatgctcctgataaggagcaggcaacttattattatcacttttggggtgacagaggtcaggaaccatattcttctgtttattattgccgggataaaagtgatttccatacattgaaattaaaacttcatcaatatgctaaatcacgaagaaaattaacttccattaataagacaacatatgtaaataaatacaataaaaatttatttgtttccattattgaaactaagaaagaccaactggattgcatatcactctcggagtacgaatacagctatgattaaaacgggtgttgcccgctgatactgtaaccagacgttccggcagagcagtgccgccatgtgatactctcatagctaagtgtaatactttcatgcggctgagcatcattatgggttaatgcattcggataatgtgatgagatatttacaatcgcagcttttgtcaatcttactgtataatacttctcctgaacgccggagatacctgtccgataaaatattaattcacaggttagtatttcgttttcagtaatactgactcccagtaatggtgatgatttatcaatagatttgcttataatgaccggatgatgaatgatatttttctcacgaaaaatatcatgactgaacgagtaaacaaaaatctggtcttcatgtccccgctgatacttattccctattgattccggtgatgaacatccttttgaaatcaaaccttgtttattacctcccagccgtaagtaaattctgtttgccatagcaatcctttgcttataaatccggataattattaccggtaaatccctgtgactaaaacgagtgtaatagtatttttggtggtgacaataaccctgtttggtgaaattaaaaaaaacggcacccgcaggtgccgtctcatttcatcattaaacaatttctttatcagccgccgaccgcgatacgtttcatatccgtcatatagccgcgcagggttttacccacggtctcaatcggatgctgacgaattgcttcattaatatcacgcagctgcgcgttatccgtaccgtggtccgcgccggatttacccaggtcacccggctgcagtgatgccataaagtctttcagtaacggcactgctgcgaaggagaacaggtagttgccgtattctgcggtatcggagataaccacgttcatttcatacagacgcttacgggcaatggtgttggcaatcagcggcagttcatgcagtgattcataataggcagattccgcaatgatccccgcgtcaatcatggtttcaaatgccagctcaacaccggctttcaccattgcgaccataacaacaccgtggtcaaaatattcctgctcactgattttctgctcagaatccggatagttttcaaatgccgtcttgccggtctcttcacgccaggtcagcagatttttatcatcattcgcccagtccgccatcatcgttgaggagaaatggccggaaatgatgtcatccatatgtttttcaaacagggtcttcatctgtgctttcagggtttcagacagctgataagcacggacttttgccgggttggacaatctgtccatcatcagcgtgatcccgccctgtttcagggcttctgtaatagtttcccagccgtactggatcagcttacctgcatacgcaggatccgcgccgtcagcaaccattttgtcataacagagcagagaaccggcctgcagcataccgcagaggatagtctgctcgcccatcaggtcagatttaacttccgcaacaaaggatgattccagaacacccgcacggtgaccgccggttgccgcagcccaggctttggcaatcgccaggccttcacctttggcatcattttccgggtggactgcaatcagtgtcggaacaccaaagccacgcttgtactcttcacgcacttctgtacccgggcatttcggtgccaccatcacaaccgtgatatcagggcggatggtttcgccgacttcaacaatattgaagccgtgtgaatagcccagcgctgcgccggatttcatcagcggctgaaccgccttaaccaccgcagaatgctgtttgtccggtgtcaggttaaccaccaggtcagcctgcgggatcagttcttcatacgtaccgacggtaaaaccattttcggtggcacgacgccatgaggtgcgcttctcatcgatcgcttcctgacgcagtgcataggctatatccagcccggaatcgcgcatgttcagtccctggttcagcccctgtgcaccacagccgacaatcaccacttttttgcctttgagataccctgcctcgtccgcaaattcttcgcgtgccataaaccggcatttgcctaactgcgccagctgctggcgcaaattcagtgtattaaaataattcgccatggtgactccgtgtattgtgtttgctcagattgctgtcttcgcagcactgattgattattttccggtgtgataaacaccctttatttataatgactatatgtcatgattttcattgcttaaattgatatattcacaagatagtgatgcaatttatgcaacatactgactaaaacataatcccctgagaggttgtgatggatatccgggaactcagactgtttttacatcttgcggagagctgccatttcggcaaaaccgcagccgccatgtatatcagcccgtcgacactctcacggcagatccagcggctggaagaatctctcgggcatccgctgtttctgcgggataaccgcactgttcaactgacagccgccggtgaacagctgaaaaaatttgcgcaggaaacagtgctgcaataccagcagctgcaacatgcgcttaatcatcagagcccgtcactgaccggtgaattacgtctgttttgttccgtcactgccgcatacagccatctgccgcagatcctcgaccagttccgggcagaacatccgcaggtcgaaatcaagctgaccaccggggacgcggcggatgcagtggaaaaagtgcagacacaggaagcggatctctgtatcgccggaaaaccggaaaaactgccggataatgtccgctttcaccagataggcgaaatcccgctgtcactgatagcgcccgcactaccatgcccggtcagacaacaggcggtacagccggtgcccgactgggaaaatatcccgtttatcattccggagcatggcccgtcacgtaaacggattgatttatggtttaaaacacagcggattcaggatccgcagatttatgccacggtgtccggccatgaagcgattgtatcgatggtggcactgggctgcggtatcgcgctgatcccgaatgtggtggtggagaacagcccggacgcaatccgcagccggatcctgcaactcgataatatttcgatggtcgcgccgttcgagctgggcgtctgcacgctgaacaagcggctgcatgagccgcttatccgcgctttctggcaactactgccgcgccaccccggataactgcggggccaggaaacgggcaaatgcggcattgccggtttcatcacggaaatcgtagccgagtgcattcaggtgctgctcaaactgtacatcccctgcctgaatttcaaaggccgccagcacacgcccataatccgtgccgtgactgcggtaatggaacagggtgatattccagtgtgtaccaagtgtttccaggaatttcagcagtgccccgggcgcttccgggaattcaaaactgaacagccgctcctgcaacggtgctgacggacggccacccaccatatagcggacatgcagtttcgccatttcgtcatccgacaaatctgtcgcactaaaaccagcggcggaaaggccatccagaatggttttccgtgcacccgggccctcatcggcacggacactgacaaatactgaagcttcatctgaaccgctgtagcggtaattaaattccgtcaccacacgcgggccgagcgcctgacaaaaccgcaggaaactgcctttctcttccgggatcgtcaccgcgaacacgccttcacgctgttctcccagttcgcaccgctctgacacataacggagcacatggaaattcacattggcaccggaaagcacatgcgccaggttttccccctgaatattgtgctgctgaatgtattttttcattcctgccagcgccagcgcccctgaaggttccgccactgcccgcacatcatcaaacagatctttcatggctgcacagatggcgtcactgtccaccgtgatcacatcatccagatactgctgacacagacggaaggtctcatcaccaatccgtttcaccgccacaccttcggcaaacagcccgactttcggtaactcgaccggatgtccggcgtccagtgcggctttcagacaagccgcctcttccgcctcgacaccaatcactttaatatccggcatcaggtgtttgatgaataccgccaccccggcggccagtccgccaccgccgaccggtacaaaaactctgtcgagccgggcattctgctgtaacagttcaagggcaatcgtagcctgaccggctatcactgacgggtgatcgaacggcggaataaacgtcatcccgagggatgcggccagctcaagtgcatgtgcttttgcttcatcaaaattagcgccgtggagaaccacttcgccaccgaacccgcgaaccgcatccactttgatatccgccgtcgccaccggcatcacaatcagggctttcaccccggttttcccggcagatagcgccacgccctgagcatggtttccggctgatgccgttaccacgccctgccgtttctgttcttctgtcagctccgcaatcatggcgtacgcaccgcgcagtttaaaactgtgcacgggctgcctgtcttcccgcttcactgaaatggtattaccgagccgtgccgatagtttcggcatcagttgcagcggcgtgacctgagcgacatcataaacagaggcactgaaagccgctctcacgtactcagccgctgacggctgagctgataatggttgttttgcggtcatccttaacccccgagtttacttttatcccgtactgcacctttatcagcactggtcgccagcaacgcatatgcgcgcagtgcaaaagagacctgccgctcacggttctgcggtgaccaggctttttcacctcgtgcctcttccgctgtgcggcgggctgccagcgtttgctcatccactttcagtgaaatctgccgtgacggaatatcgatggcaataatatccccggcctgaaccagcccgatcagcccgccgttggccgcttccggcgaaacgtggccgatggataacccggaagtgccgccggaaaaacgtccgtcagtgataagcgcacagctttttcccaggcccattgatttcagataggtcgtcggatacaacatttcctgcatacccggcccgcctttcggcccttcgtaacggatcactaccacatccccggcaacaacgtctccgccaagaatcgcttttactgcatcatcctgactttcatacacttttgccggtccggtaaaggttaagctcccctcatccaccccggcagttttcacaatacagccatcttcggcaatattgccggacagtaccgccagcccgccatcctggctgtaggcatgggttttgctgcggatacaaccgttttcgcggtcgtcatccagggacggccagcggcagtcctgagagaatgcttttgttgtgcggatcccggcaggaccggcggaatacatccgtttcaccgcatcatctttcgtcagtgtaatatcatacgccgccagcaactccggcagggtcatccccagcacgttactgacttcccggtgcagtaacccggcgcgatccagctcgcccagaataccgattaccccgccggcgcgatgcacatcttccatatggtatttctgcgtgctcggcgcgactttgcataaatgcggcaccgcacgggagagacgatcaatatccgtcattgtgaaatcaacttccccttcctgtgccgccgccagcagatgcagaactgtgttggttgaaccgcccatggcgatatccaggatcatcgcattctcaaatgccgctttggtggcgatattacgcggcagaaaacggatatcatcctgctcgtaatattttttggtgatttccacaatccggcgtccggcattgaggaacagatttttgcggtcggcgtgggttgccagcagcgagccgttccccggctgagataagcccagcgcttcggtcaggcagttcatcgagttcgcggtaaacataccggaacaggagccgcaggtcgggcaggcagagcgttcgatttgttcactgtccgcatcggagacatcaggatttgccccctgaatcatggcatccaccagatccagcttgattatctgatcagacagtttggttttaccggcttccatcgggccgccggatacaaaaataaccgggatattcaggcgcagtgacgccatcagcatccccggagtgattttgtcgcagttggagatacaaaccatggcatccgcacagtgtgcattcaccatgtattccacagaatcggcaatgagttcgcgtgacggcagagagtaaagcatcccgccgtgccccatggcgatcccgtcatccacagcaatggtattgaattctttggccacaccaccggcggcctcaatttcctctgccaccagtttgcccagatcccgcaggtgaacatgacccggaacaaattgtgtgaatgagttaacaaccgcgataatcggtttgccgaaatcggcatctgtcattcctgtcgcacgccataatgcgcgcgcacccgccatattgcggccatgtgttgttgtcgccgaacggtactgaggcattgtaatctcccgtgtttgcaaaaatcaggcggggaacgacccgcctgtaaatctgtttcgttattatggatttaccggatctaaccagccccatttgtcttctgttttcccggtgaacaaaccgaagaatgcctgctggatctctttggtaaccgggccgcagcggccgatacccacctgaatgccgtcaacactgcgtaccggcgtaacttccgccgcagtgccggtcataaagacttcgtccgccagatagagtgattcgcgggatagcgtctgttcacggatttcataacccagctcttttgccagggtcagaatcgcatcacgggtaattcccggcagtgcggaagaggtaaacggcggagtgaagataatgttatttttcacttcaaacaggttttcacccgccccttcagagatataaccgttaacatccagcgcaatcccttcctgatagccgtgacggcgggcttcactgccgaccagtaacgaggacaggtagttaccgcctgctttggccgctgtcggaatggtgttaggggctgcgcggttccaggatgacaccatcgcgtcaatccctgcatccagcgcttcctcacccaggtaagcaccccacgggaatgctgcgatgatgacatcggttttatagccctgcggcgggttaacacccataccgacatcaccgataaagaccagcggacggatataaccactggataaattatttttgcgcagcgtggcgcggcaggcttccattaattcatcaacagaatattccaccggcatacgatagattttggcggagtcatgcaggcgctgcatatgttcgcgatgacggaaaacgacagggcccttatgagactcataacagcggatcccttcaaaaacagatgtcccgtagtgcatggcatgacacataacatgcacttttgcttctgcccacggaaccatctcatcattgaaccaaataaaatcagctttttttgtcattgtaattttcctttatactgcacagctaatgtgttgataattttgtgtattttttgtgagaacttcgacatcctccacatccgccagcttaactaactgtgtacagagcagggccggcggccgcaggcttgaaactgttaactcaatgtttacattatcaccttcggaacctttcgccagatccattttcatggcacagacgttaaatccgcggtggcgcacaacccgcagaacccgttccaggatttccgggcatgaacgtgcctgaattgctaactgatgctgcatcataatgagctctccaacatatgttcgttacccgctcccggcggtactaatggccagacgttatcttcttcacggatggcgacatgtaataaatacgggccctgatggtgtaacagggtattaatcgcggacggcagcgctgatttttcagtcaccagctgtcccgggatatcaaacgagcgcgccagggcaacaaaatcaggattgtcatccagtaccgtctcgctgtaacgcttatcaaaaaacagttcctgccactgacgcaccatgccgagacgctgattatccagcagcagaattttgaccggcaggcgcttgcgtttgatggtggtcagttcctgcacattcatcatgaaagagccgtcaccggagacacacagcacggttgcttccgggcgggcaatctgtgccccgatcgctgccggtaaaccaaaccccatcgtacccaggccaccggatgtcagaaaattctccgggccgtcaaacgtcatatgctgagccgtccacatctggtgctgtccgacatccgttgtcaccacacaatccgccggtttggccgcagagacctgagataacagcagcggcgcataaataccgtcaccggcatgtgaatagtcaggcgcgtgctctgctttcagttccttcacgtgatgctgccaggcggggaatgacagcggctgtgacagcagcggcagagcctgtttcgcatcacaggcaagagaaacatgtgtctgccgtaatttatccagctcggccgggtcgatatccacatggatcacctttgcatgtggggcaaatgcgttcagcttgccggttacccgatcatcaaaacgggctccgaccgcaatcagcagatccgcctcctgaactgcaaggttcgctgcttttgccccatgcatcccgagcataccgaggtaatacggataatccggagagaccgcccccagccctttcagggtactcaccgccggcataccggtttcatccagaaacgcccgtaactgtgtaactgcgcctgacatgccgacaccgcccccggtatacagcaccggcttccggctttcccgcatcagttgccgggcacgggagagagccgtctgcgacagtggttctgcattattcaccggcagaaaatacggggtaaattcactaatctgtaattgaatgtctttcgggatatcaatgagtaccggccccggacgcccgcctgcggcaatcgcgaaagcctcggtaataattcgcggcaaatcagtaattgattcaaccaggaagctgtgttttgtacatgacaaagacagccccagcacatcgatctcctgaaaggcatccgtaccaatcagtgatgaacctacctgtccggtgatggcaacaaccggtactgaatcaagcagtgcatccgccagcccggtgataaggtttgttgcccccggccctgatgttgcaatacatacacccgttctctgccctccccgtgcatagccgattgccgccataaccgccccctgttcatgacggcagagcacatgctccacaccgccgtcgtacagcgcgtcatagaccggcatgatcgccccgcccgggtagccgaacacagtgtcaacgccctgtgttcgtagtgcctgcactaaccactgtgccccgttcatgtgtgactccttagtccgccgttttcttttcagtgaaaaatcataaatttaaggttaaaaaaaaccccgcgcctttcggtgcggggttctcgtgagatcctggctcgtatcagccattttcgtatccgagtgcagccccgcacggtgggataataatcaccaccacgctcacgataattaggctaatcactcggacaatcttattcatggataaattcttctgtctgccgtattcagttggtctctttattttagagttatcatgttatcgaattcctgacaacggctatttgtcttttttttaacaacaagaataaaaatccataaaattcagtgaaatgccattattaacgatatgtttcactgttatttttttatccggcaatatcctcctctgccaaaatcgttacttccggcacaacaccgaaaaaacggggcattctccggtacaacttacttttcctctgaacaccattcacgggagcacgatgaaaagcgtggcagattttttattctgaaacctggaaattaattccccgccgcccggtttttccatgcaacacgcagaacagaaatcacgtttatgcaacatacataaaatctgtcgatatacatcgtaaaaaacggaattttgctgcgaaatgatgaaaaaaatcaccatcatgataattcgtttatgtaactgcaggatgacctgatgtcattttccattgtttatacccgtgccatgatcgggacagaagcaccgctggtcactgtcgaggcacatatcagtgccggactacccggattaacgctggtgggattaccggaaaccgctgttaaagagtcgagagacagggtccgcagtgccctgatcaacggcggatttgaatttccggcaaagcgggtcactatcaatcttgccccggcggatttgcccaaagaaggcgggcgatatgacttacctatcgctgttgccatactctcagcttcagagcaaatagacgcaaaattggcagagaattatgaattttcgggggaattaggcctttcaggagaactccggttctgccgcggcatattaccggcagtactggccgcccgtcagtcaggaaggctggctgtggtatcaaaacagcataatgatgaattatgtattctgcctgccggttcagcgctgatggcagataatttactgcaggttgccgcattttttcatcagcagcaggcactgaatgaaaacagccacctgacgggaaaaacagaaaatgataacggtacaagtattgatgatattaccggccagcaacacgccaaacgggttctggaaataagtgcagccggcgggcacaatttgctcctgctcggcccgcccggtaccggaaaaaccatgctggccagccggctgggaacactgctcccgccgttaaccgcgcaggaagctcttgacgtggcgataatccggagcctgacccaaacctcatcagaacaaaataaatggcctcagcgcccgttcagggcgccacatcataccgcatcctctgcggcactcaccggtggcggcagtattccgctgccgggagagatatcgctggcacatcacggcattctgtttcttgatgaactccctgaattctcccgtaaatcactcgactccctgcgtgaaccacttgaatccggagagatcattatttccagagcgaaagcaaaagtatgttttcctgcccgtatacagctcattgctgcgatgaatcccagcccgacgggccattatcagggcatacataaccgcagcggccctcagcagcttctgcgctatctttcccgtatctcaggaccgtttctggaccggtttgatttatcaattgaagtgccgatgctgccgcccggaacactgagccggacagaaaaagatccgccggttcatgagcaggtaaaagcacgggtgcagtccgcacgccaacaacaataccgccgtaacggccagggaaaactgaactcggggctgtcaggtaaagaaacagaggaagtgtgtgcactatcagcacaggatgcccgttttcttgaggatgcattgacgcaacttaatctgtctgtgcgggcttggcaccgtatactgcgcgtcagcagaactattgccgatctgcgggatgaaggaggacaggtatcacgaaaagatatactggaagcactcagttaccgggtaatggacagattaatccataaattgcagcaggcggtctcttaaaaagagaaaggggcacgaatgccccttttaacttattatttctgatgatattaatcatctgtgtcggtatagtcttccgacggatcgatctgaggtttaccaccggacagcgtgtggaagcgttttggtttgcgaatacgctccagatacttaatccacactttttcttctgctgtttccggcatacgctcaccacggcatacagaaacaaactgtttttcttcgtccgtctggggggcgcgtttacccatatccagttcgttgaaagcaaaaccatggcgctcaagtaactgagcttcttttatggtgaaatgaccatggcgtgaaaaaccacgaggataatgtttattatcaaaaaaacgattagtcgtgataaagctttctgccatctgacacactcctaattctctactgacatactctttatggcgcggagtattagatagcattaggattctgtaaaacaaaatatttaaatcataacgacaaaattttttggagataccagtggatacagaattactgaaaacctttctggaggtcagtaaaacccgtcacttcgggcgtgcggctgaatccttataccttacacaatctgcagtcagctttaggatcaggcagttagagacaaatctcggggcaaatctttttacccgccaccggaataatatccgcctgacagccgccggggagcggttagtgccttatgctgaagcgctgatcaatacctggcagctggcaaaacaggaaattaatcatgcctctgtgcacaacccgctttccatcggagcgactgcatcattgtgggaagcttgtctgaccccctggctcggacagatctaccaatcacacgcagacctgcgcctggagaccagaatcgcatcccgccagtctctggtaaaacaattacatgcgcgggagctggatttactgatctctactgagcaaccaaaaatggatgaactgaaaagtgagattgtcggagaaatcacacttcagctgttcagcatacaaccgctgtcggcagaaaatcctccgggccttatccgcctggaatggagtgccgattttcagcagcatgatgaggctgttttcacccgctgtcagtctccggttctgacaacatcgtctgcttttcaggcaaaacaattattgtccgtgacatcatctgtcgcttatttaccggcacactggaaaaaaatatatcccgaactgaaccccgtggataatgacctgattacaaagcctctgtacgctgtctggctgcagaatagtgatcagcagggacttatcgggcaattaatcgcaataccggtataacgccggttactgatgattttaaagatagatagtgcggtaagtaactgttgtattgaaaggagtggtcgcaaaaaagaaaggaaattcggcaggatacgatacataagaaggcgaaattcagataataaaaaacccagttcataacgaaccgggctattaataaataaagatctttagttattacttatcaagtaaatggcaggggcggagaggctcgaactcccaacacccggttttggagaccggtgctctaccaattgaactacgcccctaaatgttggcggaacggacgggactc

SEQ ID NO: 16 - DNA, 100 bp, unknown
  Altogen 322075 strain
aaatattccagccctacagcatatgcctgggggcttataacctctgcctttggcattttatctctggatcagtgggccattgttgccgggatcatctgta

SEQ ID NO: 17 - DNA, 86318 bp, unknown
  Altogen 322075 strain
  misc_feature (45557)..(45557): n is a, c, g, or t
  misc_feature (73677)..(73699): n is a, c, g, or t
gttgctgccgccattgcccgcgctaaagcgaaaaaagccgctcagactgctgaagctccggcggaaggtgctcaacccgccgcagacgcagagacagatccgcgcaaagctgctgttgctgccgcgattgcccgcgccaaagcgaaaaaagcggctcaggccgctgcacaacattctgaagaaaccactgattaatgaagcgaaataagcatgaaatttaggcccgtttcctcaaacgccccgcaccggctgaaaattgcgggatcaccgtttacgcataaccgtgacaacacctccgccatcatgctgtgggtggtgattgccatgatcccgggaattgccgcgcagctctggtttttcggcgccggtaccctgtttcagattctgattgcagttgtaactgcgctggtcaccgaaagtattgctgtccggctgcgcaatcagcctgtgatgccgtatctgaaagataactccgcgctggtcactgcagtgcttctggctgtcagtattccgccgctggcgccgtggtggatgattgttatcggtacattctttgccgtgattattgccaagcacatatatggcggtctcggacaaaacccgtttaacccggcaatggtcggttatgtggtgctgctgatctccttcccggtacagatgaccagttggctgccgccggagagtctgcaaatcaccccggtttcgctcagtgacagtctgcatgtgattttcaccgggttatcagatggtggccagacactggagcagttacgcgccggagcggatggtatgagccaggcgactccgctcgacagtttcaaaaccggtctgctgacccgcgatatgtccgaaatcctgacacaacccgttttacagggctctgtcgccggtatcggctggcagtgggtgaatatcggttacctgatcggcggctgtattctgcttaaccgtaaagtgatttcatggcagatcccggccgccatgctgggaacactcgcggtattgtcagtgatcggatacctgattgattcatcacactttacatccccggtgatacagctgttttccggtgccaccatgctcggggcattctttatcgccaccgacccggtcaccgcctccaccacgccgcgcggccgcctgatatacgggatgctgatcggccttctgctgtggattatccgtgtttacggcggttatccggatgcggtggcatttgccgttctgctggccaatatcaccgtgccgctgatcgatacctacacacaaccgcgtgtttacgggcacaaacgggggaataaatgattgccacattacgccgttacgggctgatcctcgccctgtttgccgccggtaccaccgggctgagcgggtttgtctataccctgacaaaaccggaaattgataaacaggccgccgcacagcaaaaggcgctgtttgccgaaatcctgccggaatcggtttataataatgatgtgatcgcagagtgctatctggtcaccgatcctgccctgggtaatgaactgccacaccggctgtatgttgcccgcaaagacggcacaccggtcgctgctgtgctggagtctaccgcgccggacggctattccggtaatattcagctgctggttgccgctgattttaaccgcaccgtgctcggctcccgcgtgaccgaacacaaagagacgccggggctgggtgataaaattgatacccggatttcagactggatcacctctctgagcggcaaacatattgaatccgctgctgacccgcactgggcagtgaaaaaagacggcggggattttgatcagttcaccggtgccaccatcacgccgcgtgcagttgtcaatgctgtccgtgcaacagcggattatatgcagacgctgccgccgctgctgaacaccttacctcaatgcggagcagaataatgagtcagattaaagaattattcgccgacggattatggaaaaataactccgccctcgtccaggtgctggggctgtgtccgctgctggcggtttcctccacggtcaccaatgcgctgggtctgggactggccaccaccctggtgctgatttgtactaacgtggcggtttccgcactgcgccgctggatcccgtcagaaatccgcattcctatttatgtgatgctgattgcctccgtcgtgactgcggttcagttactgatcaacgcctatgctttcggcttatatcagtcgctcggtatcttcatcccgctgattgtgaccaactgtattgttattggccgtgccgaagcgtttgctgcaaaaaatgcggtttatccttctgcgattgatggcctggcaatggggcttggtgccaccgctgcgctgtttgtgctcggcgccatgcgcgaaattctcggcaacggcaccctgtttgacggcgcggatctgctgctcggtgactgggccaaagtgctgcgcgtcgatgtgctgcatcttgacaccccgttcctgctggctatgctgccaccgggtgcctttatcgggcttggcttaatgctggcaggcaagtatcttattgatgagaaaatgaaaaaacgcaaaaatgcacctgccgcgccgcaatatgaaacagaaaaaggatgcggaagccatctggtcaaataactgtatcattaagcaggctcctctccgggagtctgcttttatcatgaatgagccaatgtcgttatgaataaagaaaaacgtattgaaatcctgacccgcctgcgggacaacaacccgcaacccaccaccgaattgctgtttgattctccgtttgaattactgatctccgtcttattatccgcccaggcgacagatgtcagtgtcaataaagccacccgtccgctgtatgccgttgccaatacgccgcaggccattctggatctgggagtggacggtgtgaaatcctatattaaaaccatcgggttatttaataccaaagcagaaaatgtgattaaaacctgccggatgctggttgagctgcacaacggcgaggtacctgaagacagagccgcgcttgaggcgctgccgggtgtggggcgtaaaacggccaatgtggtgctcaataccgcgttcggctggccgaccattgctgttgatacccatattttccgtgtctgtaaccgcacaaaatttgcccccggtaaaaatgtggatgaggtggaacaaaaattattgcgggttgttccggcagaatttaaagtcgactgccaccactggtttatactgcacgggcgttatacctgtgttgcccgcaaaccccgctgcggttcatgcatcattgaggatttgtgtgaattcagcgaaaaagtgtatccggaagattaatctgctgcgctttaaacagaaattgccctctgtgcttgcgggcagcgtaaattcgcgtaaaaataaccataaatttgctcacccaaccagtacgggaacctatgtttcaagataacccgctgttagctcagctaaaacaacagctccacgataaaacattgcgtgtcgaagggatcgtaaaaagtaccgataaaggctacggtttcctggaagttgacggacaaaaatcctattttattccgccgccgcagatgaaaaaagtcatgcacggcgaccgcgtcaccgcagctattcacacggtgaataataaagatgtggctgagcctgaagcgctgatcactccgtttctggaccggttcgtcggccgtgtgcagcgcaaagaaaatgacgaccgtctctggatcattcctgaccacccgctgttaaaagattccattccctgccgtccggcaaaaggcgttgatcacgaatttcgtcagggtgactgggctgttgcggaaatgcgccgccacccgctgaaaggtgatcgcagcttccacgcggaaatcaccggctttatcaccgatgcggatgaccattacgcgccgtggtgggtgacactgacccgccatcagcacgcactgaaagagccggaaccggttgaggtgaccatggcggatgataatctgccgcgcactgatctgacccatctggattttgtcactatcgacagcgcatccaccgaagatatggatgatgcactttacatcactaccggtgataacaatcagcttcagctgactatcgcgattgcggacccgaccagctacatcccggccggcagcgagctggacgctattgcccataaacgcgcatttaccaactatctgccgggctttaatatcccgatgctgccgcgtaacctgtctgatgacctgtgctcgctgcatccgcatgtgcgccgtccagcactggtgtgtcaggtctccgttaatgaagatggttctctggcggatgatgccgtattcttcgccgcctgggttgaatccaaagccaagctggcttatgacgatgtttccgacctgctggaaggtgtggctgaccgcgtgacaacggatgagactatccgccgtcagatttccctgttgcaggatatgtatcagcgccgccatcactggcgtgaaactcacgcgctggtctttaaagatcgccctgattaccgctttatccttgatgaaaacggcgtggtgacggatatcgtggctgaacagcgccgcagtgccaaccgcattgtggaagaagcgatgatcaccgccaatatctgtgccgcacaagtgctggataaaaaactcggctttggtgtctataacgtgcataccgggctggatccgctgaccatcagtcaggccgttgccctgctcgccgaaaacggtattaacttcagtgcggaagagttactgaccctcgacggtttctgtcgtctgcgccgtgagctggataaccagccgacgcagttcctcgacagccgtatccgccgcttccagacctttgccgaagtccgcatggaaaaaggcccgcactttggtctgggactggatgggtatgcgacctggacatcccctatccgtaaatacagtgatattgtgaaccaccgtctgctgaaagcgattatcgccggtcagtctgccgaaaaaccggctgaagccctggctgagcacctggcagagcgccgccgtgccaaccgcatggcagagcgtgatgtcggtgactggttatatgcccgttacctgcagccgtatgccggtacagataccccgttcccggctgagatcattgatatcacccgcggtggcgtgcgtgtccgtctgacagacaacggcgcggtcgcctttatcccgggcacctttatccacccggtcaaagatgagctccagtgcagccaggaaaccggctcagtgctgattaaaggtgaagtccgttaccgcctcaatgacatcattccggtgaaaattgaggaagttaaaatggaaacccgcagtattctggcccgtccgctctgatccggaatcactgactgataaaaaccgctgttatattttaacagcggtttttttattcctgccactcagaacccgccgctgttcctgtcattaaattccgaacattaatacctttatcagcatttaaattttatttaaatcatacggatagtaattagtaacgtgattgctatagtgatgctaatcagatatgcagcggggaaataagatgaagaaaatagtaacggcattgcttgtcgccggtggcctgctggcactcagcggctgtaaaaacctgtcagagcaggagaaagataccgcaattggtgctgagttaggtgctatcagcggcgcgattctgacggacggatccggtttgggtacagtgggtggtgctgccgtcggcgggattatcggccacgaggccggtcagtgacaaaggcgtccgcaacggacgccttatctctctgtcagccgcctgccagtttgactttgaagcctttctcttccagcaattgcttcagtaagtcgcgtttatcaccctgaatttcaataacaccgtctttcagtgccccgccgcagccgcagcgttttttcagatctgccgccagtttgctcaatgccgcatcatccaaatcaataccggtgatcaggcacacgcccttacctttgcggccgctggtctggcgctgaatacggacaataccgtcacctttcgggcgttccgctttgacttccggctcatcaatacggccgacatcggtggaataaaccagccgtgaattattgtccatcttataatactcccactgaagcattaatcgcctgtaatgccgcctgcgggttatcactgcgggtgattggccgcccgataaccatgtaatccaccccggcactgactgcctgcggtggtgtcatgatacgccgctggtcaccggcatcactgccttcagggcggatccccggcgtgaccagtttaaattcccggcccagggtctctttcatcagtttcgcttcatgagcagaacagaccacaccatccagcccgcagttctgtgttaattttgccagacgcagcgcgtgctctgccggtgtggcatcaataccggttccggccaggtcggattgctccatgctggtcagcacagttaccgcgatcagcagcggcgcatcgttaccgtacggcagcagaatctctttcgctgctgtcatcatacgttcgccgcctgccgcatggacgttaaccatccacacacccagctcagccgctgcccgaaccgcatgcgccgcggtattcggaatatcatggaatttcaggtcaagaaagacctcaaacccgcgctgctgcagtgcgcggacacattccggcccgcagaaggtaaacagctctttaccgactttcagacggcactgtgccggatcgatacggtcggcaaaagccagtgcgtcatccgggttgtcgtaatcgagcgcaacaataacaggcgatgcgatatctgcacggcctgtatgcgaagaaagagatgtcatgaatgtattacctgtggttggtgaattaatacgggtaaataattacgggtaaatgtgacgttgtcactgtccgtccagccctctgataggcttgatagtatcccatgaccggcaggacgggcagtgccagtacagggcgtgtgatgtaaatccgcatttgccgcagcggtaatccggtttggtccggatttgttcgccgaccatgttacgcagcaggccgagactctctttggcacgcccttcctccgcctctgacagataatattccatcagacggcagaacagacgcatggtcggatggcgctgcaactggcggttaacataggtgatcgccatttccggcccttcctgctgttcaataatatccgcaagatagagttcggcaatagcgccaatattttcatctgaacagtgcagcaggtattctgcccattctgccggctgatcaaggtgcgtgtagcaggtttccagcatcggcagtgtttcactgaccatttctttatcctgctcaaacacccgcttgagcacggtaacggctttgctgtattccgcccgttcaatatgaatgcgcccctgcataatcgacacccgggcacagtttttatccgcccccgccgctttggcaagatacgcaaatgccccgtcagtgttatcgctgcccagtgcctgcaatgccagttcacaatagaagttcgcgatattctcccgctgtccgctatccccctgtttcagcagtttttcaccgatatcgatggctttgccccagtcactggtggactgataaatcgataacagcgactgaagcgcgctttgtctgaaatccgcctcatcaatcagctgtaaaaacaggacttccgcccggtcatagaccccggcggccacataatcgcggcccagctgttgtgtggcgaggagacgctggtcataggagagagaggcgctttccatcagagactggtggatgcggatggcgcgttccacttcgccgcgcgaacggaacaggttgccgagtgtcaggtgagcttcaaatgcggagctgtcttctttcagcatgtcgaggaacaaatcaaccgctttatcctgctgatcggacagcaaaaagtttacgcctgccacatagtcccgtgacaggcggtcagcatgttgttgttgattctgctgcgcgctgcgccgccccatataccagccgtatgcggcagcaatgggcaacagaagaaacaacagctcaagcataatgcttattccttagtggtgtcccgcagtgcaaccgaaccggaagactgcaccgtctggtcagcttccagacgtttgatccggtgccgggcacgtgccagcgacaaccgcagacgtaaataaaacagaccgcagacaatccagcccagcacaaaaccgataccgaacagtacggccagcaaggtggatacagaatactgtccctgcgcaatcagataattaaatgtgactacctgatcgttatttgcgcccagtgtcaccgaaatgatgaaaaccaccagtacaaggataaaaatcagaaaatatttcaccggcgttcctattatcaggcttgcattccgcgcctgcttcttgcagacgcactaaccccttaagttaccatttcccccggggggaatgaaagtaatttgttgtgttcccgagttttttccgcttttttgccggtatccgcacagaataccggcaacgggtttcacgcgccttataataacatgatttcaggtcagcggcggcgggtgtaaacccttttccttctgtctgttaagccagataaagaatattccggccagaattgtgttaataatcacagacataatgatatctgacggccagtgcattcccagtgccaggcggctgtattccgccagaatcccccacagcagaatcacgcctgccagcccgcggcggccctgtgcggtgaaaaacacaaagagaatcagcgcccatgcacttgcaaacagtgcatgaccggacggaaatgcataaccggtttcacttttccagtgcttcagcagccagccgggcacctgataatgatttttcacggtattttccagcagttgtgcccgcgctttccgggaaaggtcatagaacccgtcttctgacacaatattttgctgcgccagccagaccacatacgggcgcggctcttgaatggtgtttttcaccgccactttaacgccctgtcccgcagccaccaccaccaggatcagtgctgccgcgcgcagcgcctgctttttgctgccgcgaaacaaacggacaaacaggatacaaaaaaagagtgatacgataatcgccagcggatacgcagcggtatccgtcaggtgccacaggccgcgcagcagatcatcatcacctgatggctgccagcgccagccggtcagtaatgtcaccagcggtaccagcatcagcaggatgacaccggcgataaagggttttgtcaggtttttcatccgggttgaattattccgttaaaaaataaatattattttgtcaaactgatgtactactatggtcatgttcagttatttgacccggaaacggaatgtcagtttcatttcccgggcaacgcagataataacatcgccaatacgattatgtgcgtttaaataaagatgtttatatcaatgagttaataaatcatgaataaagagttgcagttaaaacgtgtcgcacaggcaaaattacctaccccgttcggggaatttttgatggtcggatttgaagaaattgccaccggtcacgatcacgtggctctggtgttcggggacatcagcggtgatgagccggtgttatcccgtgtccattcagaatgtctgaccggtgacgcgctgttcagcctgcgctgtgactgtggtttccagctggaagctgctctgaaacaaatctcggaagaaggtcgtggtgtattactgtatcaccgtcaggaaggccgtaatattggcctgctgaataaaatccgtgcctatgcattacaggataccgggctggataccgttgaagccaaccagaagctgggttttgccccggatgagcgcgatttcacgttgtgcgccgatatgtacaaactgctggatgtgcacgccatccgcctgcttaccaataacccggaaaaagtcgagattctgactcaggccggaattaacattactgaacgcgtgccgctgattgtcggccgtaatccggctaatgcccattatctggataccaaagcggagaaaatgggacacatgctgtgccagtctccgggctgtaatcactgatccacctgcaaaagtcagtaaaaacagaaaagcgcggcaaatgccgcgctttgtttttacctgtctgaatacgttacgccagcatctgccggatcacatagcagaggatgccgccgtggcggtaatattccagctccgtctgtgtgtcgatacggcacagcgcattcagttcagtcacacgtccgtccgcatgtgtgattttcaccggtacaatctgttttggtgtgacgctgttcaggccgccgacgtcaatcagttcatccccggtcagccccagcgtacggcgatcggttcccgccggaaactccagcggcaggatacccataccaatcaggttagaacggtggatccgctcataggattccgtcagcaccactctcacccccagaagattagtgcctttcgctgcccagtcacggctggagccggagccgtactctttcccggctattaccaccagcggtgtcccggactcctgataacgcatcgcggcatcaaagatagccagtgtttccccggacggaatatggcgggtaaatccgccctccgtgcccggcaccatttcattgcggatacggatattggcaaacgtgccgcgcaccatcacttcatggttaccgcgccgtgagccgtaggagttaaaatccgccggtttcacgccgtgcgcctgtaaataacgccccgccgggctgtctgctttgatattccccgccggagagatatggtcagtggtgacagaatcaccgaggatcgccagaatccgcgcctgttttacatcttttaccggtgccggggaaaccggcattccctcaaaatacggcggatggcggatataggtggaatccggctgccactgataggtcggcgtattttccaccggcagtgactgccattgttcatccccgtcaaagactgccgagtactctttgcggaacatctcggttttcactttttccaccgcagcagcaattgcggcattatccggccagatatcttttaacagtaccggtttgccctgtttatcatagcccagcggatcggtttccagattacagtgcagattgccggccagagcataagccaccaccagcggcggagaagccagccagttggttttcaccagcggatggatgcgcccttcaaagttacggttaccggacagcacggcaccgactgtcaggtcattctctttgatggcggtttcgatttccgcatccagcggcccggagttgccgatacaggtagtacaaccataaccgacaagattaaatcccagctgatccagatacggcgtgaatccggcggcattcagataatctgtcaccactttagaaccgggagccagagaggttttcacccacggtttgcgggtcagccctttttcagcggcattttttgccagcagaccggcagtcatcagcacaccggggttggaggtgttggtacaggatgtgatagcggcaatcacgacggcaccatcttcaagggtaaaatcgtcgccatgcagagaaacaggcactttcgccgccggggattttttgttcagctccagatcaaccgccgcctgaaacgcgcccggtacctgcgccagcaccactctgtcctgagggcgtttcggcccggccagactggtctgcacatccgccagatccagcgccagcccggaggtaaagcgcggctcgtccccctcgtgacgccacaatccctgctctttgcagtacgtttccaccagcgcgatttcgtcatcactgcgcccggtcagacgcatataactaagtgtgacctcatccgccgggaagaaaccacaggttgcaccgtactccggcgccatattggcaatcgtggcgcggtcagccagcggcagctgcgccagaccgtcaccccagaattcaacaaatttgcccactacgccgtgtttgcgcagcatttgtgtcacggtcagcaccaggtcagtggcggtgatcccttcgcgcagacggccggtcagtttaaacccgaccacatccgggatcagcattgataccggctgtccgagcatcgcggcttccgcttcaataccgcccacgccccagcccagcacgccgaggccgttaatcatggtggtgtgggaatctgtcccgaccagggtatccggataagcataggttttaccgtcgcgggtttcataccagacggatttcccgaggtactcgaggttgacctgatggcaaatccccgttcccggcggcaccacacggaagcggtcaaaggcctgttgtccccagcgcagaaagcggtaacgctcgttattacgtgacatttcaatggccacgttatcagcaaaagcctgctcactggcatattcatccaccatcaccgagtggtcgataaccagatcgaccggcgacaacggattgaccttactctcttctccgcccagcacgcggatagcctggcgcatcgccgccagatccaccaccgccggcacaccggtaaaatcctgcatcagcacacgggcgggccggaaggcaatttcatggtcagccgtgccggtcttctgccagtcgatcagcgcctgtaaatcgcgcacctgcacgctgtcgtcatcaagattacgcaacaggttttcggccagcactttcagggatttgggaagtttatcgagattgccgagctgttccgccaggcgggagagatgatagatatggtagtttttcccccctgccgtcagcagggtttcacactgttgctttaaggttaacgacataacgcctccacacagagtgtacgggttaaacaggtatcttccttattattttcattataaagataccatattcccgtaatctttgcgggggcagccacacaatttgttaattcaatgtaaccaaaactaacaattttgcgggataattaatccggactgtattccgtaataacctgggttccctgcccgtcagtctcaaatgtgatggtatcctgaccgccgttaaacaactgcgttaccgtcaggtgattattaccctgccatttgtattccagactgaccgtatcaccataatcggtgaaagactggtccgtgccgggtgtcagtttttccgtcagatttttcggttccccggttgtgttgcggtagagcccgtaggtttgaaccagattactgcctttgtagtagcattcatctgttgaatcataactttccgggtcacgcacggtctctttacagaccggtgctgccggtacggatgcagatacaaccgccggcaacagcccggcggcaagcaggacagcgcctgtcagtgcggataatttactcatcagttcccctgataataagtattcagacaatcggcagcggaatgtctttaaacatcgcttcgatgtcttcattattacgcagcgcaatcgctttatccaccacatcgcgcgtcagatgcggcgcgaaacgccacataaaatcatacatataggttctcaggaaactgccgcgccggaaaccgatttttgtggtgctgtagctgaatttatcccgcatatcgatactgacgaggtctttatccgtctccggatcgaccgccatgctggcaataatcccgatcccgagcccgaggcggacataggttttaatcacatccgcatctgttgcggtaaagaccactttcggtttcagcccctgtttttcaaaggtgctgtccagctcggaacgaccggtgaaaccgtgggtataggtgacaatctcatactccgcgatatccgcaatagtcaggtcgcgccgctgcgccagcgggtgatcacggcggaccaccacggcccggttccactgatagcacggcagcataattaaatcgttatacagatgaagggcttctgtcgcgatagcgaaatcgctgttgcctttgcagacatcctcggctatctgtgtcggtgtgccctggtgcatatgcagggaaacgtgcgggtaacgctcaataaagcctttaattaccggcggcagtgcataacgtgcctgggtatgggtcgtggcgatactcagggttccctgctccggatacgtgtgctcgctggcgacagctttgatggcatctattttcgccagtacttcacgggagatgcggataacggattccccggccggtgtcacgtgggtcagatgtttaccgctgcgggcaaaaatctgcattcccagctcatcttccagcatccggatctgcttactgataccgggttgtgatgtgtacagcccctcggcagtcgaggagacattcagattgtgattaaccacttccacaatatagcgcagctgctgtaatttcatccgcttattcctttccgtgcaggttcggcattgcttactcctttttcatctttattattccgaaaaagaataagtgagcaaattgttataacgttattctattcagtgacgatataacaaaaaatgcacggacaccagcccaaaaataacagctcaatgccctgatactgcgcatttctcagtaaagcgcgggaaatcacggctattcctttcttaggctattttatttaatgcttataacaaaatgatattaatctctgtctgccggatctttttcacccttcagtaaggcggtcatccgcgcttttacctgattatccggttctgcctgtacccctttttccagcaatccggccacatcctgcggccagctttcgctggctctggcgtacaatgcattcagcgccttattgcggttacggacaaccgggctttgcagtccgcagcggatcagcggccaaccgatatccggaaaacggtgtaattcctgtaatacggagtccagcttgctgtgcggttcccagtccggccctaatcccatcgcatctgacggtccggaggctatcgccaccagaggcaactgctgctctgccagctccgccacctgccgcgcccgttccggatcatcagtctgcatcagtgtcagccagtcatcatttccggcattctgctgttgctgcacaaacagttcaggccagatatcgatccggaacaaccgcccggcgcggatagcctgataacgggtctgttcatctgtgctgcggatttgctcactgacaagctgagctatccgcgggcttgccagcaattcagccgccagccctttcagtatatctgtgttaccgaactgcgccgggttatcgctgaggtaatcattcaccgaccacaccaggctgtaatgctccagtgcaggctcagtgtgtgccagttgattaaggtaacgaaggcagcactgtgcgcggtcgtcatagtctgaaatatcctgtgcagggccaccgttaaacagcgcctgaaggatctctgttgcaccgtgcagcagttccgcatccgccggttccgtcagtacttccgccagttccccctgtgtagcgcaataccacgccgtatattcattcatcacggcattattataaccatcacgcagcagccactgacgcagcggtttaccgggattttccggaatgcgttcaatcatatgcacccgcccccagccatcaacacgtctggccatacgccaccagagcgcttcatacgcctgcggagttttggtcattgccgcctgtgccacaatggcatacagcgtaaattcatcatgggccgccagcacaaacaggatatcgctgttttcctgccccgggaaaaaagccagtaccgacatcgccagcttgataacattccgctccgggctgttctgcgcgagccatgcactgaaatcagccagtttttccgcatcaatgccctgctgctccacgatcagctgtaacagcgggtcaatgtaccccagcgggctttcctctctgacagccgccagaaacgcggaaacagatgccttatcccctttctccgctgcggctttcagcaaatcacggatcttttgcacatccgtttcatcgccaccggccatatgatgagagaaaacaccgtccagcgcgccgtcagaccagctgatttcattctctttgcgcggctgggtatccggcagcctgcgcagattttccggcagcggccccggttccccgcgccagggcagtaactgctgatacgctgacggaagtgtgtcatcccacaccaccggccaggccgtttttttgccggagaaaagattactgaaccatgatttcattgcataacatcctgtaataagccgcttattgtttccagtataaaaaaaccggtcagggaaatcctgaccggtttttattattgcgataccgccgatattataacgacagattatttagctttctcaacccatttgccgtcaacatagaatgcagaccagccggttgctttgccgtctttatcggatgccacatactgctgtttggttttgcggctccagcggacagtcgtcggattaccgtccggatccgccaccggcgcttccgccagataacgcattttctcagacagacgatctttaaagcgaaccagttctgctacctgcggtgcacgggtttcccgtgatttagggaaattgtgcgccgccaggaagataccggcagcaccatcacgcagtacaaagtacgcgtctgatttttcgcacggcagttccggtaacgggaccggatcttctttcggcggagcgacttcaccgttacgcagaattttacgggtatttttacactcatcgttggtgcagcccatgtacttaccgaaacgccccattttcaggtgcatctcagagccgcatttttcacattcaacgaccgggccgtcataccctttaatgcggaactcgccttcttcgacttcgtacccttcacattccgggttgttaccgcagacatgcagtttacggccggtgtcgatcaggtagctgtccatcgcagtgccgcatttcgggcagcggcggcgggcacgcagtgcattggtttccgcatcatccccttcgaggatattgaggatttcatgttccgggatcaggttgatggtctgcttgcagcgctctttcggcggcagagcataaccggaacaacccaggaataccccggtggatgcggtgcggatccccatcgggcgggaacaggtcggacagatgatcgaggtaatgaccatcgggttcgtccgcataccgccttcttccggctctttgcccgcgttatccagctgtttgctgaaatcagcaaagaattcgtccagcaccgatttccatttcgcttcattgttggcgatatggtcgagctgattttccatccgtgcggtaaagtcgtagttcatcagttccgcaaaggtttcttcgagacgatcggtgacaatttcacccattttctcagcatagaaacggcggttttccactttcacataaccgcgatcctgaatggtggaaataattgacgcataggtggacggacgaccgataccgcgtttttccagctctttaaccagagatgcctcactgaaacgcgcaggcggtttggtgaagtgctgtaccggatcaatcgcttcgcgcgtcataaccgtgcccggcgcaatcgcaggcagcgtattatcttcatcattcttacgcagtgcaggcatcactttggtccagccgtcgaaacgcagcgtgcgtcctttggctttcagtgtgaaatcgcccgcttctgcggtcagtgtggtggaatcgtattttgccggtgtcatctgacacgcgacaaactgacgccagattaactgatacaggcggcgcgcatccggctccatatccttgagcatctcttccgtgacggcgatgtcagacggacggatagcttcgtgcgcttcctgggaattctctttgttgctgtacagattcggcgaggcaggcagatacttatcaccgaaattctcagtgatatagtcacgcgccattgtaatggcatcctggctcaggttggtggaatcggtacgcatataggtgatgtgaccggcttcataaagacgctgtgccatcatcatggttttcttcacaccaaagctcaggcgcgtacttgcggcctgctggagtgtggaggtaataaacggcgcgcccggcttgctggaggtcggacggtcttcgcggtcagtaattttaaaggtggctgcctgtaacttgctgacagcagcatgtgcctgtttctcattgaccgctttaaaggttttgccgttttcctgcaccacttccatgcgcagctgatcttttttatcagacagcagtgcgtggatctgccagtactcttccggcacaaacgctttgatttcgcgctcgcgctcaacaatcagacgcaccgcgacagactggacacgaccggcggataaaccacgggcaattttcttccacagcagcggagacaccatgtaacccaccacgcgatccataaagcggcgtgcctgctgggcattcacacggtcaatattcagttcgcccggctgttcaaacgcctggcttatcgcatttttggtgatttcattaaatacaacccggctgaagcggctgtcatcaccgccgatcacttcccgcaggtgccatgcaatggcttccccttcgcggtcaaggtccgttgcgagatagatgtgtgatgcatcggcagccaggtgctgtaattcagaaacaaccttttctttgcccggcagaatctgataatccgcttcccagccgtggtacgggtcaacacccatccggctgaccagcgctgtgcgttcgtcttttttaacttttttcgttttatcgcctgcagcagcgggtttacggctcgctgaaccactcgtcggcagatcccggatgtgaccgacgctggatttcaccacgtagtctttgccgagatacttgttaatcgttttggcttttgccggggactccacgatgacaagagctttacccataattatcattacctaaattttcggggcgattataaaaacgccaatttttgcgttaaatacactgccttttatattgaggcactttcgtaatagatcaactctttttatactaatgctttgtttcaactcaaaacatctgtcaggaaatgatgtatttttaatatcgccgtcaccggagtgtattacgcaaatagtcttcccgccacgttgcggggctcttgaaaagttcacactctacctgataaatagtgatgcgcaacaaattatttttcaaaggagttcacagaatgcaaaaagaaaccatcgccatcagcaaacaagagctgttagaaaaagccaataaaatcatacaggaacatgacgattttctggagggtatgcaggctgatgatgttgaacagaaatccggcgtattggtttttaaaggtgaatactttttagacgaccagggcctgccgacactcaaaagtgcggccgtctttaatatgtttaaacatctcgctcacgttctgtcagaacaatatcatctggcggattaaccggcggatacctgaatagtcaccggccggataataataatccgcaaagaataacggcagcctgcgctgccgttatttatattgagacggttatttcccgaccgggccattcccgcgctgccaccagcggagaataaggcggtcagcactcatcatcacactctgggtgattttatcgataaggcgcttacggcggaaataacgcacctgaatgacttcatggtcaggaattgccgcgacaattaaatcgtcactcactgccagctcatcaatcagacccagctctttcgcctgggtgccgtaccagtgttcaccagtcgccactttatcaatgtccagagacggacggttctgagaaacaaagcttttgaacagaacgtgcgtttcatccagctcctgctggaatttctcacggccttcatcagtattctgcccgatgaatgtcagcgtgcgtttatattgaccggcagtatgcatttccacatcaatatcatttttcttcagcagacgatggatgttaggcacctgtgccaccacaccaatcgagccgacaatcgcaaacggcgcggccacaattttatccgccacacacgccatcatataaccaccgctggccgcgactttatcaaccgcaatggtaatacggatatttttctcacgcagacgggtcagctgagcggctgccagaccataggcgtgaaccagtccgcccgggctttccagacgcaccagcacttcatccagacccggctcggccacggacagaataatggtgatttcttcacgcagtgattccacctcatgcgcatccaggctgcctttaaagtcaattacatagatacaggatttgcgcagacgagtctgaccgtttttggcgttgcttttgtcttttttatcttcgtttttttgttgttttttaaacgctttattccagactttctgctctgcttcgctcatgcgggcatgttgcatttcacgctgtctgtcgcggtagttttcacccagatccgtcagacgtaatttacccagagactgccctttacggatgctgagcatgacaaagaacacgacaatggcaatgattgccagaacaatagttacggtttcagcaagaaacaaaccgtattgtgagagaaactccaccggcacaccttaatactgttaaattgaatggcgctattttaactaaaaaatctgataaatgctcaactagttttgtaacccttgatggcaatcacgccctgaggacggtatgataaaaacgggttcacaccctgtccgggatgtgatacccgtccatttgcttttccggagttatcaccatgcataataatgatgtatcccgcttttccccgtcctcccctgatgcactgaagaataaaatcatcctgataaccggtgccggtgacgggatcggccgcgaagccgctctgacctatgcccgctacggtgcggaactgatcctgaccggccggacagaatccaaattacaggccgtccgtgatgaaatcacgcagcgttacgggtcagtgccacgtatttatcatcaggacttactgacactgacagaggcgcaaagccgtcagttcgctgccgcactggaacaggagattccgcggctggatggcgtactgcacaacgccggtattctgggtgtggtcgcgccgctcactgagcagccggtacagttatggcaggatgtaatgcaggtgaatgttaacggtacctttatactgacacaggcactgttaccgctgctgctgaaatccccgcagagttcgctggtattcacatcatcaagtgtcggccgcgaaggccgtgccggatggggagcgtatgccgtctcaaaatttgccactgaaggtatgatgcaggttctggctgaggaatataaaggcacagggctgcgcgtcagctgcattaatccgggcggtacccgcacggctatgcgcgccggggcatttccggatgaggcatcagaaaaactgaaaaccccggcggatattatgccgacttatttatatgtgatgtgtgatgacagcgccggtaaaaacgggatcagctatgatgcacagcccggacgcaaagccggaccggcggaataattaaaggcagtaacgtcagtgtgccgggggcgcttcatccgtttgcagcggtaaaaccccggcaccgaaaatttcaccggtttcctgcacaaactcactgaatctcctgctctcttctttatctgtcttattctctttatcgctttgcagcagtatctgacggtaacgattagccatccgcatcagcaccgtgtgataacggctgtatatttcatatttttttgtcacatccgtctgatgccggaactccgtcacaatatcagtgattttttcagcatcctcacgcaattccgcatcctgaaactgaatatcagacagacggttattattgccggtatccgcatcctgttccggcgtaatcaccgtattatccggtaataaactgacaccgcgcggattgtattccaggaaccggcgaaattcattttcattcatacagattgtcatcattcctttttccccggcaacaaatctgtccagcacggctttaatatccggcacatcggaaggataccggcatttaaacaggttattatcgataacgtcggcattactggtccgcaacggtccctgataataatggccgtcaaatttaaatgtctttaccatggaattaaattgcggtgaatacagcgtatcgccgtcatgaatggtataggaataataacgggcacgggacggattgaggatcccgccgctgtttcccggataagccataaaggaaatctgttgtccctgcggggtttccagcttattcaggccggacggcagataaacgatgccttccgcgtcatgtgcaaggtgataactttttccgtttaccgtaaaaaacagatcatccccggtaatattactgtagtaataccggctcagttcaggtgcgtcgggctgtgtttcgtcaccacatccggggagcagaaagatgagcgttaacagaccgcatctggttatcgcaataatcatctcctcgcagatatatctctgtttcccggtcattcaccggcgggaaatactgttttgattattttaacccacactgcgggtatttgcatgacccctgtacaaaaaaacgccccgtgcgatggcacaggacgtttataagaacaaatacaggctgaaataacagaaaataccggttttacgtaaccggattattatttactggtacggcgtttctgtgtatttccggtaccctgacgggttgatgacgggcgtccggaattacgttttgatgcggtggtgccgacttgtgagtgacgttttaccgcacggcggatctgattggctttgatccggcgtttatcactttccacagaaaccttggtggtggtttccgcaggcagtcccaccagctcacgcagatagttggttttttccaggttcagttccacccatccgccgcgcggcagcgctttcggtagatcgatatcgccgtaacggacacggatcaggcggctgacctgcacaccgaccgcttcccacatccggcggacttcgcggttgcggccttcggtcagggagacattaaaccactggttgataccttccccgcctttgaatttcagcgagcggaatgaagccggaccatcttccagctgaacacctttgagcagctgattgcgtttggcatcatccacttcaccgaagacacggaccgcatattcacgctccacttcacggctcgggtgcatcaggcggtttgccagttccccgtcggtggtgaacagcagtaatccgctggtattcacatccaggcggccgacggcaatccagcgggctccctgaatacgcggcagacgatcaaagaccgtcggacggccgtccgggtcgtggcgggtacataattccccttccggcttataatacgccagtacacgacacgggtttttctgtgcatctttgatacctaaaatccggccgtcaaggcggattttagcattcgtattaacatcgatacggtcacccagtgtggccgttttgccgtcaatggagatacgacccgcttcgatgtaactttcaatttcgcggcgtgagccatgccctgcatgcgccaacaccttttgtaacttttctgttttctggctcattgagcaccctctgctgtcgccttcacaggcgtcataaaaatcaaccgcagcattatacacaggttaatgcacggcgctaacgcattttacacatgtgacgcacacggcagtcacaggaacggcgttacatctccggttccttcacgcaccacaaccggcacgtcgtcagtcagatcgataaccgtggtcggctgctggccgatataaccgccgtggatcaccagatccacctgcttgcccagggtgtcgttaatctcttccggatcagattccgcaaaatcattgcccggcaggatcagactggctgacatcagcggttcgcccattgcggcaagcaaatccatggcaatcgggtttgccggaatacgcagaccaatggttttgcgtttttcactcatcagacggcgcggcacttctttggtcgcccgcagaataaaggtgtaattacccggcgtattatttttgattaaacggaataccgtgttatccacatgtgcataggtggagatatccgataaatcgcggcacatcagggtaaagttatgattactgtctatctgacgcagacggcagatccgctgtaacgcatctttatcttccaggcggcagccgatggcatagccggaatcggtcgggtaaatcaccacgccgcctttgttaaaaatctccacgctctgggtaatcaggcgtgcctgcgggttatccggatggatataaaacatctggcccatgttgtttcctctgttaatccttcagtgaccaatcctgccagattggtattacatcacccggtaaccacaatttacggcccagttctatccacgaacacggctgatgaaaatcggatccctgggaggcttttaatccgtatgttattgcgtattgcgccagagtccggcgctcatccggagcctgctgacactgcgccacttccatgccatccccgccggcctgtttaaagaaatcacacaggcgtttaagccacttggcggataagccatagcggccgggatgtgccagcacggcctgtccgccggcggcatgaatggcctgcaccgcgtccgggatatcacaccactgcggcggcacatagccggttttgttacgggcgagatagcgtttgaacactttcggaatcgtcggttccacaccccgggcgatcaacacccgggcgaagtgtccgcgcgtgacttcaccgccctgcgccagtgcattcgcctcttcccaggtgccttcaattccggcctttgccagccgttcactgataagcatcccgcgtgcccggcgccgttctgactgctgcgccagtaattctgtcattgccggatgggtaatatcaatattcagcccgacaatatggatctcatgatgttcccaaagcgttgatatttcaacaccattaatcaccgtcagcggtaaattatttgcctgctgataatgatgtgccgccggaagtgcatccgtggtgtcatgatcggtaattgccagcacggtcaccttcatctcaacggctctgtccagtaactgctcaggtgtcagcatgccgtctgacgcagtggtatggctgtgtaaatcatagcacgacaggtcaatacctgtgttttccggctccatcgcgtctcccttctgttctgacaatgcattgccagaagtgacttcataaaatttcatccgcatttgcgggacgcacagtattccacaaaaacccttgacacaccaatcgcgatctagttaactagtacgcagaacgagttatctgtaatcactgtttatactgaggacatcccatgaacatgcacaaactgaacaatcgttggtggcgcaatctttcccgtcgggcggaatggttgtgcgtgcatgtcagttaaccggctgtaccagagcacagaacccgcccccgtggcgggtttttttatggcaaaaaattcacatagcaaggtaattatcatggacagcacgattttcacacaacacatccggacagattatccggcttatcagcccgacccggcggcggtattcaccgcgctttgcgcacagcgtcctgcaacgctgttattagaatccgccgaaatcgcgtccagagcaaatttaaaaagcatgctggtgctgcacagcgcactgcgcatccgctgcaccggacacaccgtcaccgcagaagcactgaccgccaacggcgcggcattactgccggtattacaggcaagtctgtccgccgggactatcagcggtaacacactgacactgcatttcactgcaccggccgcccatgcggatgaagatacccgcctgcgcgccgcctcggtctttgatgtgctccgcaccctgatgaacctgccgtcacaggcagatgaccgtcatgcgctgttctgcggcggactgttcagctacgacctggtcgcggcctttgaggcactgccgccggttgagcgcaccaacagctgcccggattactgtttttatctggcggaaacgcttctcaccattgaccatcagcagcagaccagtgaactggttaccctgacatttacagcggatgccgcagaacaaacccgcctgacagcacagcatcagcaggtattaacggcgctggcacaaccggtaaccggttcggcggctgttacgccggtggatatcagcgtgacaacgtcacattcggataccgatttctgtactatcgttaatcagttaaaacaatccattgttcagggtgatattttccaggtcgtgccgtcacgccgttttcagttaccgtgcccgtccccgatggccgcttaccgcgagctgaaaacccgtaacccgagcccttacctgttttttatgcaggatgcggatttcactctgttcggcgcatcaccggaaagtgctctgaaatatgacccggcaacccgtcagattgaaatctacccgattgcgggcacccgtccgcgcggtttgtcagcagacggttcggtggatgcggataaagacagccgcctggagcttgacctgcgcacggatcagaaagagctggccgagcactttatgctggttgacctggcccgtaatgacctcgcccgtatctgccgtcccggcagccgcagtgtggcggagctgaccaaaggggatcgctatgcgtttgtgatgcacctggtgtcccgcgtcaccggtgaattacgcgacgatctcgatattttccatgcttatcaggcgtgcatgaatatgggcactctgaccggcgcaccgaaagtccgtgcaatggaattgattgcacaggccgagaaagtccgccgcggcagctacggcggcgcggtcggctattttcgcggcgataccacctttgatacctgcattgtgatccgttccgcctatgtggaaaacggcatagccactgtgcaggccggcggcggtgtggtactcgattccgacccgcaggcggaagccgacgaaaaccgcaacaaagcccgcgcagtgatccgcgctatcacccgtgcccatcatgcagaggagacattctgatggctgatattttactgctcgataatgtcgattcctttacctataacctggccgatcagttccgtgctcagggccatcaggtggtgatttaccgtaaccgggttccggcagaggtcattctgtccgcgctggaaaccatgaaaaacccggtgctggtactctctccgggaccgggaaaaccggcagatgccggatgtcagccggaagtgctgagccgtgtcagagggcgttacccggtgatcggtatttgcctcggccatcaggcgattgttgaagcctacggcggcaaagtcagccacgccggtgccgtgctccacggtaaagccagccagttgcaccacgatgagcaatctatgttttccggtctgccgaacccgatgaaagtggcacgctatcactcactggcagcggaaattatcccggaagccctgaccgtgtgtgccaccagcgacaacattgtgatggccgtccgccatgaacaggacaaagtctgcggcttacagtttcaccccgaatccgttctgacaccggacggtgcggccctgctggctaatacccttgcgtgggcacaggcataactcaacctgaataacagataaaaaaacagattaaggaacagagagatgcaaacattatttgaaaaactttaccggggtgaaacactgaccctggcggaaagccgggaattattttccgcgattatccggggagaactgagtgaaacccagctggcggcagcgctgatcagcatgaaaatgcgcggcgaacagccggatgaaattgccggagctgctcaggcctgtctgaacaatgcccgcgccttcccgcgtccggactaccgtttcagtgatattgtcggcaccggcggcgatgcttccgacagcatcaatatctccacggccagcgcctttgtggcagcggcctgcgggataaaagtcgccaaacacggcagccgcagtgtttcgagcaaaaccggctcttctgatttactgaatgccttcgggatcgcgctggataccccggcggatgtgtcccgcagcgcactggatgatgtcggcgtctgctttctgtttgccccgcactatcacgacggcttccgttttgccgcgccggtgcgtcagcagctgaaaacccgtaccttatttaatgtcctcggaccgctgatcaacccggcccgcccgccggttgccctgatcggtgtatacagcccggcgctgatccgccctgttgctgagaccctgaaagtcctcggctaccagcgtgccgccgtagtacacagcggcggaatggatgaggtttccctccatgccccgacacaggttgccgaactgcataacggggagatccgcgaataccgcctgaccacagacgatttcggcctgccgggttatgacatgcaggaacttcgcggcggtaccccggaagaaaaccgtcagttgctgacccggttattacagggagaaggcactgcggcacaaagtcacgccgtggcagccaatgtcgccctgctgatgaaactcaatgataacgaagacttacaggataatgctcagcacgcactggcaatgatccgcagtggtaacgcctttgagcgcgtcaccgccctggccgcgagaggataaaccatgaaaggcaccgtattagaacagattgtgaatgataaacgtatctccctggttgcgcggaagaaacaggagccgctgctgagttttgcggataatctgccgctgagtgaccgcgatttttatcaggcactgcgcagcgcggaaactgcgtttattctggagtgcaaaaaagcctctccgtcgaaagggcttatccgtcaggattttaatctcagtgaaatcgcagcggcctatgcgccgtatgccacagcagtttccgtactgaccgacgagaaatattttcagggacaacatgactatctgcggcaggcgcgcgcgctgatcacgcagccggtattgtgcaaagatttcattattgatgcttatcaggtctatctcgcccgccactatggcgcagacgcgattctgctgatgctctccgtcctgaatgatgcggattatcattcactggcgaccctggctcattccctcaatatgggtgtgctgacggaagtcagtacggaagaggaactgcaccgcgccattgcccttgatgcacaggttatcggtatcaataaccgcgatctgcgcgacctctccattgaccgccgccggacagcggatttcgcaccgcatattccggctgaccgcattattatcagtgaatccggcattaccacccatcagcatatccgcgaattgcgtccccatgctgacggattcctgatcggcagtgccattatggcgcagcctgatctggacacggctatccgccgcctgatttacggtgagcacaaagtctgcgggctgacccgtgcggacgatgcccgcgccgcttatgacgccggtgccaccttcggcggcctgatttttgtcagcaaatcgccgcgttatgtggatgaagcacaggcagcggaagtgatgcgtggtgcaccgctggcgtacgtcggcgtgttccgtaaccatgaccccgctgatatcgctgccattgcccgccgcctgaaactgcacgcggttcagttacacggtgatgaaaacgagcacgatatcgcgctgctgcgtctgcaccttccggcaaaatgtgagatctggaaagcactggatatgtcgcacggtgcggatatcaccgtgcctgacggcgtggtgcggctggtgctggataacggcaaaggcggcaccgggcagactttcgactggcagacactgcccccttcactgccggtgccctttactctggcaggcgggctgaatgcggaaaactgtgtctccgccgctgcttccggtgctgccgggctggattttaactccggcgcggagtccgcccccggtattaaagatgcagaaaaacttcgtcaaatatttaatcaattacatcagcaagttgcctgactacgactgaaaagaaaaaggatcagaaaacaatgagtaaattaaatccctattttggtgaattcggcgggcagtttgtgccgcagattttaatcccggcactcgatcagctcgaagatgcctttattgccgctcaggaagacccggaatttcagcgtgaatttaccgatctgctgcaaaactatgccggacgcccgacagccctgaccctgtgcaaaaacctgactgcgggcagcaaaaccaaactgtacctgaaacgtgaagatttactgcacggcggtgcgcacaaaaccaaccaggtactcggccaggcgctgctggcaaaacggatgggcaaaacagaaattattgccgaaaccggtgccggtcagcacggcgtggcggcggcactggccagtgcgctgctcggcctgaaatgccgggtgtatatgggggcaaaagacgtggaacgtcagtctccgaatgtgttccgcatgcggctgatgggcgcggaagtcattccggtgcacagcggctccgccacgctgaaagatgcctgtaatgaggcactgcgcgactggagcggcaattatgaccgcgcccactatttattaggtaccgcagcgggcccgcatccgtatccgaccattgtccgcgagttccagcgtatgatcggtgatgaggcccgcgcccagatcctcgcccgtgaaggtcgtcttccggatgcggtgatcgcctgtatcggcggcggttccaacgctatcggcgcatttgccgggtttattcccgatgaatccgtcgctctgatcggcgtcgagccggccgggcacggtattgaaaccggcgagcacggtgcgccgctcaaacatggccgtatcggcatctatttcggtatgaaatcaccgatgatgcagacagaagatggccagatcgaggaatcttattccatttctgccggtctggatttcccgtctgtcgggccgcagcacgcgtatctgaatgctatcggccgggcggattatgtttccgccaccgatgacgaggcacttgacgcctttaaaaccctgagccgtcaggaagggattatcccggcactggaatcctcccatgccctggcacacgcactgaaaatgatccgtgaaaatccggagaaagaacaaattcttatcgtcaatatttccggtcgcggagacaaagacattttcactgtttatgacatttttaaagcaagaggtgatttctgatgagccggtatgaacaactttttcagcgtttgcagtcccgtaatcagggtgcgtttatcccgtttgtcactctgggtgacccgtcggcagaggtttccctgcaaattattgatgctctggtagccggtggagccgacgccctggaaatcggtattccgttttctgacccgctggcagacggtccggtgattcaggatgctaacctccgtgcctttgcggccggtatgaccccggcgcgctgctttgaactgattgcacaaatccgtgcaaaatatccggaactgccggtgggactgctgatgtatgccaacctggtcttccataacggtatcagtcagttttatgaaacagcagcaaaagccggggtggattccgtgctgatcgccgatgtgccgctgcatgagtctcagccgttccgggatgctgcgctggccaacaatatcgcgccggtctttatctgcccgccggatgcggatgacaaattactggaaacactggccgccgccggaaaaggttatacctacctgctctcccgtgccggggtgacaggaacagaaaagcgggctgaaaagtccctggctgatctgacggcaaaactgaccgcgctgaatgccgcaccgccggttcagggattcgggatttccgaaccggaacaggtacaggaatcactgcggaatggtgctgcaggggcaatctccggctcagctgtggtaaaaatcatcgccgcaaatctggataatgtaccggtaatgtgtcagaaactgcgggaatttacgcagaaaatgaaaaacgcaacacaattataatttttcattccgcccgctgttaacagcgggttattttttgttgagaaacatccggttttcatcaatactgaaaaggtcaggcacacattattctgcgatccgtgccggtaataaggagaacataatgaagtacatgaaactggtcacctcattttttgttgtcatgtttatggctttcaccctgtccgcctgtgccccgactgccaccagtgaaggtaccgggggttattttgatgattccgtcattaccacaaaagtgaaaacagcgttgctgggtgagaaaggcattaaatccactcaaatcagcgtggaaacattcaaaggtaaagttcagctgagcggatttgtctcttcagagaaagaagcgaacctggcggtaaataccgcgcgtaaagttccgggtgtgcaggttgttattaactcaatgaagttgcggtgaccctgaatatcagattaccggataaaaaaacggcgcaataataattgcgccgttttttatggtactgataacgaggattatcagaatttgtaaccaacaccaaacatgaatacccatggatccaggttagttttgtaagtgtggttttcgcctgccagtttgaaatcaacatcagttttgatgttcatccaccagacagaagcgttcagcatccagttcttgtctaattcataatccagaccagcctgtgctgccacaccccatgaaccgctcatgctcaggtcgcttaatcctaactgctgagcaccgctgttgaatccttcgtcaaagaagaaggtgtagttcagaccaacacctaaatacggacgcagtttatcttccggagtgcggaaatagtactgagccattaaggttggcggtaaatgttttgcagatgcgatttcgccgacagccggcagagagattttatgctcaaacggcgtcgctgccagtaattcaacaccgatattatcggtgatcatataaccgaaagttaaacctaactgggtattattgttcgcttcaaaagaacctaaacccagaacgttatcagagctgacgttcggacgtacagtcgcagtaccaccacgaacgataaaatcaccggcctggtgtgccattgaaactgacggtaaaacagttgccagtgctaaacacactgcagaaagctttttcattatctatcccatcctaaaaaaaagaaaaaaaacacaataagtacagtttgaaatatacaaccttaaatccaattatgatctaagacagatcacaacatttaaataaaaacgcatttttcacaaagatctaaattattattccacggtgacattttcatttattgatttatatcaaaaacaaccttcgtcatttttagcgcaatcattgtttgtgtgctttatatcaatttataaaataagatgcttactattcagctgaatattttgttttattattgttaataatttgtatattttcagctctctgtttccggatattccgtctgaacactgtatttctgccggatgaacaggttacaatccccgccatactgttttacaattgcatcaacgtttttatttcatgccttacaggagttgttccatgtccatgccggtgccggttcttgcccgcgacagtcttaattttttccgcaatcagctgttgtctgtcctgatcatttcgctgctcaccgccgctgtgactgtcgggctcaatgtgctcctgacttacaattccaacgggctggcacttatccgcgctctggagaccacttacgccactgaaggctccggcggctttcagcgggcggtcgccgcactgacatccgatgaccagtggcaaatgctgaaaaccggcctcggaactatcttcagttccctgctgggcaatgccgtctttgtgacatccatgattttcctgattttcagtgcctcacagggacagccggtatccgcgttgcaggccatcaccggctctgccggacgcattccgcgcatgctggtgctgctgttaatctgctcgctggtgattgccctcgggctcgttgccatgtatctgccgggattaattctggctatgttactggcgctggcaccgatcattatgttcaccgaaaagaacagcgtatttaccgccatcaaaatcagcggaaatattgccctgaaaaatatcagaacacttctgcccgctattttaatatggtttgccctgaaacaggcatccgtagtgtttcttagtaaacttccgatagaaaatgagcatattctgatgaccgttattctgtttattaataacgtcatcagcggactggtgattatttatctgttccggttctatcagttatttacacaatcccaatctgtcagcgactatcagtaaggccggataatgcgcacagataatgatatttaccgggcgatacaggactatgtccgtgcagatgataatatccgtgcggctgtgctcaacgggtcacgggcaaataaacaggttgccgccgataaatatcaggactttgatattgtcttttttgtgcacaatattgaggcggcaaagtttcccgccctgcgggagtcatttttcggcattccggtattacagcaatgccctgatgatatgcttttgggcaatgaaggtatgccgccccgtgcggcgtataccctgctgatgatctatgaggacggccaccggatagatctgacactgtttccgctgacgcattttgcctcagaatataagcatgacagtctgacggtgcctctcgcggataaagacggcctcttcaccggtatcgcccctgcagatgaaagcagttattttatcacgccgcctgatgcccgtttatttgccgaaactgccaatgaattctggtggtgcgtgacaaatgtggccaaaggtctggcacggcgtgaaatcaccttcgccaaagccatgacggaaaacgttgtccgccccgcatttatgcagatgcttgactggaaaaccggttataccagcggctttaatctgaccaccggaaaagacggaaaatatttatcccgttacctcaccacaagtgagatgcaaaccgttctggctacctattctgatgaggaaccggaaaataactggcaggcgttgtttctgatgtgcaggctgttcagggaatatcagacgaccattgctgagctgtccgggtttgaaatcaatacccgggaatgtgatgcctctgtccgttatctccggatggtttataacgacagccgcccatcttccgtataaaggaatacgactatgatcaccctgcccgtcacgcttactgttcaggatctggctgactatcagacgttcagtttccggcatttttatcaggagccggtcggatggagacgtattccttatattcttatctggctgatattatgcggaatgttattacttattttcagtacattttcgccgctgccgggcaagtttgatatttattctgttttttacggcctgagctgcggatttttagcactgctggtgtttatttacagccgttttgtcaaaagcaggcgggttataaagcagctttctgttcagtccggacattacctcctgcggccggcaacgtttgaactgaataatgacgggataaaccaggtttctgccctttaccattctttttttgcctgggaatcggtcattgattatgccgaaagcgccaccgggctttatctttaccacggtaaatatgacggtattattattccgcttcgggatattcagtcagaggcacagaagaaagatattttgcacctgctgtcacagaaaataagaaatgtgcagataaagaatcaggccaataagatggcctgattatccggtgtgtctgcggtgatgattactgtactttgcgtaccgcttttacatccagttcggttttattccactctttgtcgatttccccttcgacctcaatttcatcctgcggcgtgactttcagtccgccccagcgtttcggggaaatttcagcacggatagtcccggtgctgtctttaaattcataatgtttgttatccagctggcggacaatcgtaccgcgcagcacaaccggtgcatcatcggataatttcagtgcatccgcaacggtcattttacgggcatcagggccgctgaaaccgccgttttgtgccactgtggtggttgccgcggctgtcgcgcccggaccttcaaaaccgccattggctgcaaaaacggaaccggctgatcctgccagtaaagtggcaagtaatgcgagtgcaggtaattttttcatcatttatctcctttatgaggaagcgtctttgcttcatggacactattaaaccattaagttcttaacaggatcttaaggggatatcatttttgattatatttttaatttaagaaaaaacaggtggttatcctgagatatctgagttaaaactagtatagcgctatttatacggataagaattatgcggatattattaattgaagatgaccggctgattggcgacgggctgaaaatcggcctgagcaggctcggctttacccctgactggtttaccgatggcctgaccggtcagcaggcgctttatgctgctccttatgatgccgtgatcctcgatctctccctgcccggcatggacgggctggatatcctgaaacagtggcggtcagaggggcgcgacgagccggtactgatcctgaccgcccgtgacgcccttgagcagcgcgtcagcggcttacaacagggtgcagatgattatctgtgcaaaccgtttgccctggcggaggtggcggcacggttacaggcactgatccgccgccgccacggtcagctctctgaaaaattggtgctcggcgacgtggagatggatccggtggcgatgactgtcacccgcaacggcgtaccggtgtcactgaaaggcaaagaactggcgctgctggcactgtttctgcgcaatccgcagaaagtgctgtcccgcgcgatgattgaggagaaactgtataactgggatgaagatgtctccagtaatgccgttgaggtgcatattcaccatttgcgccgcaaactggggcgcggatttatcaaaaccattcacggtgtcggttatgtcgcgggaaagaatgatgaagacgtatagtctgcgcctgcggctgggcgggttattgctgctgctcaccctgctgacctggggggtcgccagtttgttcgcctggatacagaccacaaaatccatcaatgaattattcgatacgcaacagatggcctttgccaaacgcctgtcagttctgccgtccgggctggaatttccgccgtctgcgattcagaaaaccaaaaaaatgctctccggcaaccggggaaagcaggatgacgatgcattcgctttcgctattttcagcccgtcgggcgagcgggtactggatgacggcgaaaacggccggaaaattccgttctcagacaagaaaaacgggttccgtgacggttcgctgacggatgataacgaccgctggcgcttcgtacaactgccttccgccgatggccgctacatcatcgtggtcggccaggagtgggaataccgcgaggatatggggctgaccattatcaccgctcaggcgatcccgtggctggtggcactgccgctgatgctgcttctgttcctgtggctgctcacccgcgcactgactccgctgcgcctgctggcacggcagttacagcgccgtaacccggcggaactgacgccgctggccccgccggtgctgccgaaagaagtcagtccgatgctggacgccctgaacggattatttctgcgcatccgcgatctgcgcgaacgggaaagccgttttacctctgatgccgctcatgaactacgcagtccgctggccgcgctgaaagtacaaactgaagtgatgcagattgccggggacgactccgccacccgggaacacgtgaccgcgaatctgatcaccgggattgaccgcgccacccgtctggtggatcaactgctgactctctcgcggctggaatcacagtctcacccgcaggaatgtacagagctgcgctggtcagccattattaatgatgccattgcacaaacagctccggatgcaactgcacatcaggtcagcgtgatatctgacctcaccgtgcctgaactgacagtccgcggcgaacagctgctgcttaccgttatgctgcgcaatctgctgcataatgctatccgctacggcaaaaccggcggcaccgttcatctgatgctgacaccgcagcagttagtgattgaggatgatggtccgggcgtcagtgatgcgatactggcccggctgggagaacgtttttaccggccgccgggacaggaaaaaaccggcagcggccttggattgtctatcgtgaaacgaattgcggaactgcatcatatgaccatacagttccgccgcagcccgcagggcgggtttatcgctgaaatcaggtggtgagcggtttttccgctccctctgccgcctgttccatcgcctcttctatcgctttgacacggctttgctgtttgctctgaatcagccggatagcgaaatagagatcaggcacaataatcaaatcatcatcattgcgtttgattttattttccgacacccagcgtgtcagttcggtgcgccgtcccgccaggatcagggtaacgcctttgattttcagctcagtcaccagctcattcagtgtgctgaacacactcatgtcattattgataaagctgacggtcgcatccaccgccacccatccgggacgtttcggtgcggtattcaccacctgtaacacccgctttttaaagtacgcaacgttgaaataggtcagcggcgagttaaaacggtacatcaataatccgtcaacctgactaatatccacgttactgttgttgatggaatggatcatcccctgctcatccacacccagtaactgatctgtcggacgaaaaacagtgcgcaggaactgtaccagtcccagcaaaaccgcaaatccgataccgttgatcagccccaccaccagcacagccaccagggtaaacagcgccagtgtgaatgccgatttattccgtttacggaaagagaaaatctgacggatactgaacatcgaccaggaggagtaaatcagcaccaccccgagtgtcgccagcggaatgtgtccgaggaaaccggtcaggaagaacagcaccagtgcgatcaacccggcggcgatcagagacaccatctgtgttttaccaccggtggcatcgttgacggcggtacggctggtcgcggcactgaccgcgaacccctgggataacccggaagcaatgttgatatacccctgtgctcgcagttcctgatccacatcgatggcatagccgtttttctcggcaaaactgcgcaccgtcatcataaagctgacaatactgatcaccgcaaggttcagtgacgggatcaccagttcacgcagcagacccgggtcaaatgccggcattttgatatgcggcagcccgttaccgagattaccgaccacagcaatccccattgaggcgaaatccagctgcgcactgaccagtgtggcaatcgtcatcacaatcagcggtccaggccagctgcggcggacagcccgtaataaaaacagcgcagccaggctggcaccggagaggatcagggtcggcatatgcataaggtgcagatgctccggcagcgccaccaggcactcaatcagctgggacggcagttcatccagcccgagcacattgccaatctggccgacaataattgtcaccgccacaccgttgagcagcccctgtaaaatcggctgtgataaaaaatccgcgaatgcggcgagtttgaaatgtccggcgatcaggcaccagacacccgtcatcagcgtcatgatgatcgccaactgccacagcgtatccgggtcacctttggccagcggaataatcgccgccgcaatcaccgcacaggttgccgcatccggcccgacaatcagctgacgggaggagccgaacagcgcataagtcaccatcggcaggatacaggcgtagagaccgacaatcgcattaatgcccatcagtcccgtgtaagcgatagccaccggcaacgccacggcagcaacagaaagccctgcgcggatatcaaagcgcaggtttttgcgttcatagtgcagaaaaacagaaagtcccggcatccagcgcaatagtcggttcgactgcattatcgccccttataaaaatatcgtattaagatgtacaatttaattttactgctaatagttaaactgatttataaccgaacgcggataaagaagatagtcagaccgcgtcttatggtaaaatattgcaaaatcaattgtaatatattttttttctttaaaaataagtgactggatgccacgtgcttaaaataaatttaaatttcggacagactcaattatgaagcaactactcgactttatccccctggttatcttttttgccatatataaaaccgtggatatctattacgcctccggtgccctgattgccgcctctgcggtggcgctggctgtccgctggttcatgtataaacatctggagaaatctgccgttatcacctttgtgattgtggccatcttcggcaccctgaccatcgttttccatgatccgcagtttatcaaatggaaagtgaccattatttatgcgctgtttgctctcgtgttactgggcggccagtttatcttcggtaagccgctgattcagaaaatgctgggcaaagaactgactctgccgccacaggtctggcagcgtctgaatctcgcctgggctcttttctttatcgtctgcgcggccgtgaacgtgtatgtcgcgttctggttatccatggatacctggatgaacttcaaagtgtttggtctgaccgctgtaacactggtatttaccgttgccagtgtggtatatatttaccgtcatctgccacgggaagaagaaaaataataaaatcaaccggatatcggtttgtttccgccggtatcctttttcgttaaacggatgtaagtgtttctcatgactcaacaacaatgtttacctaacggggaactggtgctgcgcaccttaaccatgccgacagacaccaatgccaacggggatatcttcggcggctggctgatgtcgcagatggatatcggcggcgctattctggcaaaggagattgcactcggccgcgtggtgaccgtccgcgtggacggcatcacctttctgcgctctgtcgcggtcggtgatgtggtctgctgttatgcacgctgcctgaaaaccgggaattcatccatgaccgttaaagtcgaagtctgggtgaaaaaagtggctaccgatcctatcggtgaccgttaccgggcaacagaagctgtcttcagttatgttgcggtggatgcggataaccgtccccgcccgctgcctgacggaaaacgtcattttcagttagacagcagtaacagtgatttaaaataatgcgtttcataccggccactcttctgagtggccgttttgtctgccggaataaaccacaggttccccgcgacaccggcgtccggtaatagtatcattgccgcaaatctctctttttatttaatccggaattttcatcgtgacctcatttgctgaacttaatgcacttcccgcagaacaaattaccaacctgaatgaactgggttatctgaccatgaccccggttcaggccgccgcattaccggctattctcgcgggtaaagatgtccgtgcgcaggccaaaaccggcagcgggaaaaccgccgcattcggcctggggctgttacagcatatcgatgccggacactttatgacccaggcactggttctgtgcccgacccgcgaactggcggatcaggtcgccggtgagctgcgccgcctggcgcgttatctgccgaatatcaaaattctgaccttatgcggcggtgtgccgtttggtgcccagcgcgattcactgatccacccgccgcatattattgtggccaccccgggccgcctgattgaccatctgaacaaagacacgctgcaccttgatgctatccgcacactggtgctggatgaagctgaccgtatgctggatatgggctttgctgacgatattactgaaatcctctcccgtaccccggaagaacgtcagactctgctgttttccgccacctggccggatgagattgcagctgtcagccgccgttttcagcgcgatccgcaaaccatcgaaatcaacagcaccgacgaacttcctgcggttgagcagcagttttatgaagtttcacggcgtggcaaaactgaactgttacagaaattactgagccgcgaacaaccggcatcctgcgtggtattctgcaacaccaagaaagattgccaggatgtgtatgaagccctggaaggcagcggacagagtgttttagtgctgcacggtgatatggaacagcgcgagcgcgaccagaccctgatccgctttgccaacggcagcagccgtgtgctggttgccactgatgtggcatcacgcgggctggatatcaaagcccttgagctggtgatcaactatgaactggcgtgggatccggaagtgcatgttcaccgcatcggccgtaccgcccgtgccggtgaaagcggactggcgatcagcctgtgtgcaccggaagaagctgtccgggcaaacgcactggaagagatgctgcatatgaaactgaactggcagccaatccctgccgggctgcgcatcactccgctggatgcggcaatggcaactctgtgtattgacggcggcaaaaaagccaaaatccgtccgggggacattctcggcgccatgaccggtgatatggggctgaacggcgaagatatcggcaaaatcgtgatccacccgatgcatgcttatgtcgcggtgcgtcagggtatcgcgcagcaggcccgcaaactgcttcagcagggtaaaatcaaagggaaacctgtcagagtcagattgctgaaataattacaaaggacagcatttcccgtcagcggatgacatctctgttttgtatccggccggccttttcaggccggctttattccacctgcatctcagtattctgctgaggcattttctgttaaagggtctttgtatggcagcgctgtttaatgctttagtctctgattcagttattttatttgtcgttatctttattttatctgtcggctcggcctatgccggaaaatacctgttcaaaaaacgtcacggtaaaaccgaattagcagatgatgaaaccaaaattgttctcggtgccgtattatccctgctgggcttattaatcggctttttactgacgatctctatcggcggctataataaccgcgaacagatggaagaaaacgaagctattgctgtcggtaatgcattccagcgggcacaattactgtcgccggaaaataaccttcgggcaaataccctgcttaacacgtatattgacgcacgtattgatttttttaacggcgggtcacaggcaaaaaatgaaaaatggcgggatatctcccttgaggctcagtcctctctctgggagatcgctgcatctgaagcccgtacagccccgaatccggtgattgcctccgtcctgaccgcattcagtgatctctatgtttccgaagaaaaaaccatggccagctggcgctatcagatcccgggagccgcctgggtattactgattttatttgccgtcagtgccaatgtgctgatcgggtataatatccgcggactgcgcggcagcaatatcatgattttaattctgccgctgctgaccaccatggctctgtttatgattgcggaaattgatattccgggtgaaggggttattcatgtggtaccggataacctggtgaatttacgcgctgatcttttcccggcaaaataaaacagaaacaaaaaacccggcatttttatgtgccgggttttctttttttatcggatcactgaatagaggttttaccgtcgatccggaaaataatggttgtcgtcatacctttcttcggctttttctcgtaacgccatttacgcattgcattacggacttcacgttcaaacatatttttcggtgatgcttcgataatatcgatattctgaatacggccatcggtatcgacatcaaatcttacccgcaccttcccttctttaccgaggctgcgtgcccgtgccggatagaccggatcagcacggttcagggctttcgggtcaccaccaccaacatcgctttgtccggcagaagccacatttccgaccgggcctgcaggggctttctgcacgttctgctgaccttccggcgtaccactgaacagtggtttatcggagaccggtgctttggtttcaaccggttttacggccggtttctcaacttttttctcttttttcggttttggctttttctcaaccggtttcttttccaccggtttttcaataaccggtttcacgacaggctcaggttcaggctcgggttccggctctgtttcgggttccggttcaggctgaggttcagccacagctgctgccggggctggcgcaaacgccgccatctccaccatcagcactttaggttcgtcctcaacctccttattcatgttgtagtaaatcgctgcggccacagaggcatgcagacaaagagaaatgagaattggccagctgatccagcgaaaaataggcataatctatacaatcttataagcagctaataatgacaatggtcactagtgtaaatgcaaatagcaatcaatttcaatacgaaagacgcaaccattgtcacttatcgtgctgatggtcacttcttagtggcttaattcagcctgggcaaacagcagcgaacggcgttgtctcgcgatatccagcttgcgcagagcaaaaatccggatgttccgccgggactgactttccagccagcgacgacgacgacgggttgcctgccgtaacatacgccaacgtgcaacttccggtctgctgtgtctcataactaaacccttttttagactgtgtgaaaaaatacgctaataataagggcaattattataaactgcctgacacaataaccaaccgctttcccgcaatatctgcaaacaccggcagaaaaaagtggttaaactgacttaaatcacaaatacagcagcattacagaaagctttctgatacattttccggtggagtatcaatcagatcctgtgcctgtttagtctgcaaaccttattcttagagaaagataatacctatgtcgacattttatacgctgttatattggctgagtattcttttctactggctgctggtcgccggtatctctgtccgcgtaatgtacaangtgggcgccgggatctctgtccgcgtaatgtacaaacgccgcccggtgacatctaccatgacctggttactgatcatctatattctgccgtttatcggaattattgcatatctcgccttcggtgaactccatctcggccgccgccgggttgagcaggcaaaaggaatgtggccgtctgtctccggctgggttgaaaatctgcgtcagtcaaaacacattttcgccacggaaaacagtacccaggctgctccgctgtttcagctgattgaacaccgccagggaattcccggggtaaaaggtaaccagattcagttatttaccacctgcgaagattcattacgtcagattgtcaaagatatcgataatgcaaaacacagcattgatatggtgttttacatctggaaaccgggcggtgatgtggacaatgtcaccaatgccctgctcgccgccgccaaacggggcgtaaaatgccgcattatggtggactccgccggcagctggcacttcttccgccatgattatccggagatgatgcgaaatgccgggatcgaatttgtcgaagccctgccggtcaatattctgcgcttcgccctgcgccggatggatttacgccagcaccggaaaatcgtcactatcgataactatatttcctacaccggcagtatgaatatggtggacccgcgctactttaaacaggacgccggtgtcggtgaatgggttgatatccttgttcgtatggaaggccctgtcaccaccctgttcggtattatctatgcactggactgggaaatggagcgcggagagcgcctgttaccgccgccgccggacgatattgaaatgccgtttgaaaaagacagcggccataccgtcaatattgtggcttccggtccgggttaccctgaagagctgatccagcaatccctgatgacggctatttttgccgcacaggagcgtctgaccttcaccacaccatattttgtcccgagcgatgacctgatgcatgccatctgtaccgccgccatgcgtggtgtacgtgttgcgattgtgatgccgcgcctcaatgactcattcctcgtccgctgggcaagccgtgcgttttatactgaattgctggaagccggtgtggaaatctatctgttcgaggatggtctgctgcacacgaaaagtgtcctcgtggatgaccagctcagtatggtcggttccgtaaacctggatatgcgcagcctgtggctcaactttgaaatcaccgctgttatcgatgatgaaagttttgccggtgacctgaatattgtccagaatgactatatttcacgcgcaacccgcctcgattacaccgagtgggaaaaacgtccgctgaccaaccgtattcttgagcggttatgttatttcttcagtcctttgctgtgataaactgactttctttattatccccgccggtataaaacggcgggggatcaccggaatgtaatctgacctatgagtatctctctgccccgtcgcctcagcgagcaggaaacgattgaaatggcctatgacctgtttctggaacaggcaatggataaccttgacccggcagacgtcctgctgtttaaccttcagtttgaagagatcggcggtgctgaaattgtaccaaccggcagtgactggtcagaatttgcaccttttctggcacaaaacccggcatgtgccgaagtggttatcggcctggctccggatgagaatgctgatatcgaccagatttttgcccgtgtgctgatttcccggcattttaccggcacaccggaatacgctgtccgctggcgggaataatctccccgccggtcacactgtcagcagcggcatttttcccgccgggcaattaatgatcttgtgataatgtcaatttcagcgggatcttccgcagcccccgcccgtaatacaagattccatttgctgataatttttgcgttttctgccagctcagaatgtgcagccagccgcccctgagccatcagccaggacgcgacagcagcccagtcccacagcggggattgcccgcgcaaccgctgcaccggccccggaaaggtgcccgggccgcgcgcgccatctttgagtaacgcgattgcctgacgtgacatgccggtcagttccgcgatatcactcaggccgacaagagcagaatccaccgattccacccgggcattcacaccggctgattccgcgtcttccaccgccgtgcggattgcacaatccagagacggtgcttcccggtcaaattccagatagaccgatttgccgtaaaaacagagtaatgcatcatcacaaccgcctgcaaataaggcatcctccagattctctgtatctgctgtcacaccggacagcgtcagcgtaaaattatacagtgccatcattttcccctttcctgctgcccgttttcactgacaggtatccacttttcgtctgatctgctttgcatggttttccggattccgcggtgttgaccagacactcatctgatgctgccggtgttcatcatacggtgacccgcaccgtaaccggcagaatgcatgcgaggaattccccggcgcaatccatacccatccctgtaacagtgcatattcaatcgcggactgaatatgtttatccggatgtttcttcatttcctgtacctactgtagtttatatgttgacattggtcaacactccgttattgacacacctgaaaaccggctgtgctttttaataacggaatcagtaagctgcctgcaaggccgcaaagttcgctctgtcagattttgcggctggtgcggaaaagcaggatgcggagatgaaaaaaaagcgcccgtaccgggcgctctgtctcaaaaataaaattaacagctttaccgcatttacagcggatcaaccttcaggcaggacactgcatggcggaaactgccttccagcagcggccgggttcttgcgcattcactgtccgccagcgggcagcgggtgcggaagacacaaccggacggcggattaatcggtgacggcagttccccttccagcaactgaatggttttattctgctctctgtccgggtcaggcaccggcaccgcagacatcagcgctttggtgtacggatgcagcgggttgtggtacacctcgtcatacgtgccgagttccaccgcatggccgagatacatcaccagcacacggtcagaaatgtgtttcaccaccgccaggtcgtgcgcgataaaaataagggacaatcccatctcccgctgtaattctttcagcaggttcaccacctgggcctggatagacacatccagcgctgaaaccggctcatcacagataaccagtttcggctcaaggatcagtgcacgggcgataccgatacgctggcactgtccgccggaaaactcatgcggatagcggttcaccaggttcggcagcagcccgactttcatcatcatggctttgactttgtctgtcacttccgtcttactcattgacggataataggtgtgcagcggctctgcaataatatcgccgatagtcatacgcgggttgagtgatgccagcggatcctggaaaatcatctggatgtcattgcggacattgtgccagtctttttcactcataccgcacaggtctttgcccagccaggttacccggccggccgtggatttcaccaggcctataatcgcgcgggcaaacgtggatttcccgcagccggattctccgaccacaccgagtgtttccccttcatacagacggacagtcacaccatccaccgctttcaggctttttgccggctgccagaaccattgtttgttatctctgatggaaaaatggacttttaaatcttcaatttccagcagaaccggacgttctgaatgtgtcattatgccaactcctctgcagttctgaagcaggcacgcaaacggccctgagaaaatgcctgtaacggcggctcatgccgcgcgcactcgtctgtcgcatactgacagcgcgggcggaacggacagcctgccgggagacgcaggaggttcggcgggttgcccggaatcgtggcgagttcactgtcttcctgcccgtcaaggcgcggaaccgccttaagcagcccgatagagtacggatgcgacggatggtagaacacatcacgggccgtgccgtattccatagtacgtccggcgtacattaccagcactttgtcacagataccggcgaccacacccaggtcatgggtgatcataataatcgcggtgttgaactcattcttcagctcattgagcagcgtcatgatttgcgcctgcaccgtcacatccagcgctgtggtcggttcatcggcgatcagcagttttggcttgcacagcagcgccatcgcaatcataacgcgctggcgcatcccgccggagaactcgtgaggatacatattcatccgcttgcgggcttcaggcattttcaccgcgtccagcatccggacagattcctcaaacgcatcgtgagaactcagacctttatgcagcatcagcacttctgtcagctgtttgctgactttcatatacgggttaagcgaggtcatcggatcctggaagatcatcgaaatctcttccgcccgcattttgttcagcgctctctctttcagattgagaatttcacgtccgttgaacaccgcagagccgctgaccacaccattgcgggccagcagtcccatcagcgcaaacgccgtctgtgatttcccggagccggattcaccgacaatcccgagtgtctcacccgccgccagcgaaaaattaagcttgtttacggcggtgacatcgccgtccggcgttttgaatgtcacgttcaggtcgttaacctgtaataactgagtcattggcggcctcctcagcgatctttcgggtcaagggcatcgcgcagcccgtcaccgataaagttgaaacaaaacagagtcaccaccaggaatgctgccgggaacatcagtaaccagggcgaaacttccattgagttagcaccgtcattgagcagtgcgccccaactgcttaacggctcctgtgtgcccagcccgaggaagctgaggaaggattcaaacaggatcatactcggcaccagcagtgaggcgtaaaccaccaccacacccagcacgttcgggacaatatgacgcagaatgatattgcgggtcggcacaccacagaccttcgccgcctcaataaattctttgctcttcaggctcagtgtctggccgcgcacgatacgcgccatatccagccaggaaaccatgccgatagccacgaaaatcagaaaaatattctgaccaaagaaggtcaccagcaggataacaaagaacataaacgggaaagagttgaggatttccagcacgcgcatcatgacagagtcagttttgccgccgacatagccggacatcgcgccgtacagtgttcccaccagcacagcgaccagcgcggccgccagtcccaccatcagcgagatacgcccgccgatagccacacgcaccagcagatcacggccggaggagtcggtaccaaaatagtggccgctctccgtatccggtgctgcggacatcatgccccagtcggtatcgtcatacgcgaactccgacagcatcggcataaaaatcacaaacagggtaattaaaaacaacagacacagactggtgatcgcggctttgttatgcataaagcggcggcgggcatccgcccacaggctgcgtccttcgacatcaagctgctccgtgaaattttccagagcttcgcggtttttttcattcggtaacatagcgtgctccgggactaataacggattttcggatcgataacggcatacagcacgtcaacgatacagttaaaggcgatggtcagtgtaccaaccaggatggtcagactcagcaccagagagtaatcgcggttcagcgcgccgttgacaaataactgccccacgcccggtaaaccgaaaatcgtctcaatcaccattgaacccgtgataatccccacaaatgccggtcccatataagagaccaccggtaacagtgccgggcgcagcgcatgccgccagacaatcttacgcatcggcagacctttcgcccgtgcggtacggataaagttggagtgcatcacctcaatcatggagctgcgcataatacgggagatactggcgatataggccagtgacagcgcgatcatcggcagaatgatattgctgagctgcccgccgttccagccgccgcccggcagccagtgcagatggatggcaaagataagaaccagcagcggcgccaccacaaagctggggataaccaccccggtcatggcaaagcccatgacggtatagtcccatttggtattctgattcagtgccgctatcacaccggcactcaccccgacaatcagcgccagcacaaacgccgccagcccgagttttgcggagaccggaaacgcggaggcgaccagatcattcaccgagtaatctttatatttaaaggaaggcccgaagtccccctttgataactgaactaaataatcaaaatactgaacgtgaatcggatcattaagatggtatttggcttcaatattcgccatcacttccggcggcaatttacgctcaccggtaaatggactgcccggagccagacgcatcataaagaaagagatggtaattaacacaaaaagcgtcgggatcgcctcgagtatacggcgaagaataaacttaaacattgcccgttcctatacagtacccgcttcccggggtacacactacacaggccgcccttcgcagggcggccaaccgtcggtattattttttaatcatatataagtttttggtgtggaagtgatccagcggatcttttccggtatagccacctacatacggtttcactaaacgggtactgacatagtaatagaccggcacgatagcagaatctttatccagctgggcttccgcctgctgatagatctgcgcacgttccgcatcggttttcacctgaagggattgtttcatcagcttatcaaactccgcactcttataatgcggggtgttggtgctgctgtaagaaagaaccatattcaggaatgaagacggttcgttgtaatccgcacaccatgcggcacgggcaacatcataagtcccctgatggcgggtatcgaggaaggttttccattcctggttaaccagctgaacttccgcaccgaggtttttcttccagatagacgatgcggcgatcgccattttcttgtgcagatcagatgtgttatacagcaggttaaatttcagtgggttatctttggtaaacccggcttcttccagcagtttgcgcgctttttcgttacgctgctcctgcgtcatattggcgaaccactcaggctctttggctgacataccatccgcaaacggtggtgtgaaaccaaatgccggggtatcaccctgtgctttgactttattgaccataatgtcacggtcaaggctcagtttcagggcttcacggactttcgggttatcaaacggcgctttttcgttattgatttcgtagtaataggtacacatatacggtgaaatacgcagttcgtccggaatttcttttttcagtttctggaacagttcaatcggcaggttgttataggtcatgtcgatttcaccgctgcggtagcggttaacatcagtaacttcagaggaaatcggcaggaaacggacattattgataacggttttttcgttatcccagtatttcgggttgcgggtcagttcgattttttcgttaaccacccagtctttcagggtgtatgcgccgttgctgacataattgcccggctgagtccacttatcaccgaacttctcaacggtggccggatgcaccggagacatggagttatgcgccagcagtttcggaatatacggtacttcttcggagagggtcagctcaagggttttatcatccagcgctttgatgcccagctcttccggctttttctttccggcgataacatcatcaatatttaccacgtgagcatactggagataactggcatacggtgatgcggtattcggatcagccaggcggcgccagctgtaaacgaagtcctgtgcggtgaccggatcaccgttggaccattttgcatcttcgcggattttaaacgtccagactttaaaatctttattttcccaggagattgccgagcccggcagaatttcaccacttggtccttccagggtaataccttccatcaggtcacggataatattcgcttccggtaccccttccactttatgcggatccagtgactgtggctcagagccgttattgcggattaaatcctgtttatctgccagctgaacaccggccggtacatccgcagcaaacgcctgtgtaccaatacccatccccattgctgctaccacactgagtgccagcagtgtttttttcgttgaattaaccatcttacataaactccccattgacgaatgtgttttgcgtttgttgcgtttttatcaggtgcttttcgttttaactgccgcaccttcatttttttcgcactctgtgagtgcaaattttttattattaatgtgtttctaccatatataagcgcttaatatccatataatcaagcgggtcattgccggtaattccgccgactgatggttttatcagccggacactcacgcgataataaacaggaattaatgcagagtcctgatctaactgagtttctgcttcctggtaagcggattgacgtgttttttcatccgttgccagcaaagcacgctgcattgcactgtcaaacgcggtatttcggtagaaactggtgttattactgctgtctgacagaaaaatgttcagaaacgaggacggctcattgtaatccgcgcaccaggtcgcccgggccacctgataattcccttcatggcggttctgattggaggttttccattcctgatttttcagcaccactttcgcgccgatatttttctgccacatggaggcagcggcaattgcctgctgcttattctgatcggacgtgttatagagcaattcaaaggtcagcggatttttttcgctgtaaccggcttcttccagcagttttcgccctttttcattgcgctgttcctgagtcagggatgcccattccggcgtggtgaaatgcccgccgttaatataatgcggggtaaaaccgtaagcgggaatttgtccctgtcccatgattttatgggtgataatatcgcgatccagccccagtttgacggcttcgcgtactttcgggtcggtaaacggtgccgcagtattatttatttcataatagaacgtgcataaatacggggaaatctgaacctgcgccggaatatcttttttcattttggcaaacagaaccggcggaaccgaactgttggtaacatctatttcaccggcgcgatagcggttaatatcactggtttctgactggagcggcaggaatgtcgcctgttcaatcacggtatctttgtcattccagtatttcgggttgcgtttaagcaccagccgttcattcacattccaggcagacagggtatatgcgccgttaccgataaattttccggcggatgtccatttatcaccaaattgttcaatcgcccctttcggtaccggcttcagtgcggtatggctcagcatatccgggaaatacggcaccggctgagtcagctgaacctgaaaggttctgtcatcaaccgctttgacgccgagactttccggtgtttttttaccgctgataatatcatccacattttcgacataggcataatgcagatagctgccgtaaggtgatgcggttttcgggtcagtcagccgccgccagctgtagacaaaatcctgtgcggtcaccggcgagccgtcactccacttagcatccggccgcagcgtgaatgtccagatgcggttatccggggacgaccagctctctgccactccgggcacgatatgaccgtcaccgtcagtggaaaccagcccttccagcagattaagaataatgttggattccggcaccccttccactttatgcggatcgagtgataccggttcagtaccgttattgataacaataacctgtttttccgccagctttgttcccggcggaacctgtgccgcccatgcggaataagagagtgcactcagcagcagcgcctgcgtgagggaaacagcaatagtgtgttttttcatcttccgtcccttctgaataacacctgttaaatgaacaacgtgattaaaaaatcgcaaatgctttatttataagtgccgtcagcgacgggatcagcctgtttttcggtgctgttttccggcctgatgtgcattttccggggcagtgattgtttttatctgcaaacagtgccgttctgccgctgaaataaaacattaacccaagactgcttatgatccggctgttttgctcagcccggataaaaaagtaaacatttaattaacaaaaagcaatttttccagataaaaaccctgcttccatcacagttttaactgattaaatattaacaaccacttaaaaaacaactgtaaataaaaagagtaaagtaaaaaatttcactgaaatatcaatctggtgagcactgaaaataatggattgacagcaaatatagtttctgttgtttatttaaccacctttatctgttatacccgtttattactgaacggtatgggttacggtatccacccacacagcaccatttttagtgttattttttatgggctgataacccgttgttatattactgctgtttttccgctttttttgccggtgaaatctcccggtcagcaatttcagactatgattaattttggctataaccaaaagttataaacaagcacgtaacagactttgcaaaacagcgccgttttttttaacgtgtcagtattacaaaaaatcaataacaccgcgtttcaggggaaatatatgaaaaaaacatatccggcagcgtcactggctctgctcttttccgtctccgcatttgccgccacaccaccgaataccttaattgttgtccagagtctggatgatattgtcagcctggatccggcagaaagtaatgaactgtccagtatccagaccgttcccagcttatatcagcgtctggtacagccgaaccgcgataatccggagcagcttgacgctatcctgctggaagactggcaggccgatgccgccaataaaaccctgaccgtccggattaaagagaatgcaaaatttgcctccggcaacccggtgcgcccggaagatattatcttctcttaccagcgcgctgtggttatgaataaatcgcctgcatttattctcaatattctcggctggaataaagagaatatcgcacagcagtttgaaaaaaccggcgaccgcacccttaaaataaaatggagtgcagatatcagcccggatgtggcactgaatctgttgtccaccccgatagcctcagtggtggacgaaaaactggtgacaccgaatattaaaaataatgacttcggtaatgcctggctgaaaatgcattctgccggcagcggtgcttattccctgaaggtctatcagccaaaccaggcgattgtgatggccgctaacccgcatgtctccaccggcgaggcgaaaatcccgtccgttattattaaaaacgtgccggatccggcttcccgccgtctgctgattcagcagggtgatgcggatattgcccgtgaactcggtgctgaccagactgcggcactgaaaaacagcgccggggtacgggtggagaatattccgtccgccgagcaggattatatggcgttcaacaccggcaacagtgccaatccgctgctgaaaaacccggcattatgggaagcagcccgttatctggtcgattacgaaggcattacccgcgatttactgaaaggccagtattttattcatcagagcttcctgccggtcggtttaccgggcgcgctggaaaataacccgtataaatttgatccggccaaagccaaagagattctggcaaacgccggaattaaagatgcccatttcaccctcgatgtggaaaacaaaccgccgtatatcactatcgctcagtcacttcaggccagttttgcgcaaggcggcatcaaagtggaattattaccggcggcaggcagtcaggtctattcccgcgtgcgggcacgccagcatcaggcggccatccgtttctggatcccggactattttgatgcccattccaatgccagcgctttcgcctttaatgacggcaagagcagcaccgtcgcgtggctgaacggctgggatatccctcagttatcacaaaccacactgaaagccgtggcggagccggataaagccaaacgtgcgcagatgtataccgccatgcaggaagagttacaacgcagttctccgtatgtgtttatggcacagggacaaaaccaggtggtactgcgtgacaatgtgaaaggctatcagcagggactgaacgcagacatggtgtattacgacagagtcaccaaataatctgctgattttccggttatcaccccgtcagtaccgctgacggggtttgtgtgttttgtttttattcaggaactgctgtatgtccgatatttcccccgccggaacactgtttcgccatacgctgcgtgtgacgcttcagagtatttttacccttgcgctgacactgctcgggttactggtgatcacctttgcattgtcggcactctccccggttgaccgggtattacagattgtcggcgatcacgccagccatgaaacctatgagcaggtgcggctggagctggggctggatcagcccttctatattcagttctggcattatgcagagcgtctgctgcacggcgatctcggcatggcctcctctatgggacagccggtgcttgacggcgtactgactacgctgcccgcgaccattgaactggcaacactctcactgctgatcggcgcttcgctcgggatcctctgcggcgtgttatgtgcccgttatgcaggtacgccgtttgattttatcatccgcaccctgacactcctcggcaactcggtaccggttttctggctgggactgctgatgctgctgctgttttatgccacgctgcaatggagccccggaccggggcggctggatgatatctatcagtataccgtcgaggcgaaaaccggttttgtgctgatagatacctggttgtccgatgactccggcgcatttaccaatgcggtggcacatctgatcctgccggtgtcgttactggcctatttttgcctggcggggatcacccggctgacgcgcgccgcctgtctgagtgaaatgaataaagagtatgtcacgctggcccgtgccaaaggcaatactgaaatgcaggtgctgttccgccatgtgctgccgaatatccggggaacgctgatcaccgtgattgcccttgcctataccggaatgctggaaggcgcggtactgaccgaaacggtcttttcctggcccggcatcggccgttacctgaccgccgccttatttgccggggataccaccgccgtaatgggcggaaccctggtgatcggtatctgctttatctttattaataacgtgacagatatgattgtgcgtttaacggatccgcgggtgaaatcatgacattactgccgaaaatccgccgttctccgtctgcactgacgggcaccctgattattctgtttctgctgctggtggcgctgtttgcgccgtggctcgccccttatgacccggtactgcaaaacccggcacagcgcctgctggcacctgatacacaacactggctcggaaccgacagctacgggcgtgatgtgctttcccgcctgatctacggcacccgtccgatgttcggtctggtcgcgctggtggccgccatcaccctgcccgccgggttattgatcggcattctggccggtttttacggccgctgggtggaaacgattctgatgcgctttaccgatattgtcatgtcgatgccgcgcctgatcctcgcgtttgcctttgttgccattctcgggccggggctgattaacggcgcgctcgctctcgccctgacctcctggcccgcctatgcccgtcaggcgcgcagtgaaatccgccatctgcgtaacagtgattatctggccagtgcggaaatgctggggatccgtggtctgcgtctgctgtggggacacatcctgccgctctgtttgccgtcagctattgtccggctggcgctggatctcgccaccattatcctggcggccgccggtctgggtttcctcggcctgggcgcacagccgccgatggcggaatggggagccatgattgccgatggtatgcaggttattttcgaccagtggtggatagccgccgtacccggcgcggcaattctgattgccggtatggcattcaatcttctgggtgatggtttacgggatattatggagccgcaacatgactgagccgcttatttgtgtccgtaatttgtgtgtggattacccccgtgcacaggtggtgaaaaatgtctcctttaccctgggtcaagagcgcctggcgctggtcggggagtccggttccggtaaatccatgaccgccagggcgctgatggggctggtgcgcaaacccggaattgtcagtgcggatacgctgacattcggtcagacctccctgctgtctctgcgggaaaaacagtgggcggcactgcgcggcaatgacattgccatgatcatgcaggatccgcgctatgcgctgaatccggtcagaaatctgtatcagcagattgaggaatccctgctgcgtcatcagacactgaacaaatctgatcgccgcgaccgtgtttttgaaatggcccgggccgccgggttatcagaacaggcgctctcccgctatccgggacaactttccggtggtatgggacagcgcgccatgattgcgattgccctgatcaacaacccgtcggtcttaattgccgacgagccgacctccgccctggatgcccggctgcgtcaccagattctggagctgattgtcagccagtgtgaggaacgccggatggggctgctgctgataagccacgatttaccgctggtggcggctcattgtcagcgcgtgatggtgatgtatcagggtcagcaggtggatgaactgcccgccgcacaactgccgcaggcaacgcatccttatacccgtacattgtggacctgccgcccggatgcacagacgtacggcaccgatttgccggtattggatcgcaccgccctgcaggcgttactgactcaggagacacatcatgccggaaaataattcagcgccgattattgaggttaataatctttccgtcagcttcggacagcggcaggtgggttgccaggccggttttcatctcaatgccggagagacgttcagtcttatcggtgagtccggctgcggaaaatccactattttacgcgtaatcgccggattacagcgggagtggctgggcggcgtgcaactgctgtcacaacatatccaccccggccagcgctatcagggggctttgcgccgcaatgtacagatggtcttccaggatccctatgcgtctctgcatccgttccatactattcaccgggcgctttcggagccattacgaattcaccgtgaaaatgatatcgacaaccgggtggcagaagctattgtatctgtcgggctgccgccggatgtggcactgcgttatccgcatcagctatccggcgggcagcgccagcgtattgctattgcccgcgccctgatgctgcacccacagatcctgctgctcgacgaaccgacatccgcacttgatatgtctgtgcaggcggaaattctcaatctgctcaatcacctgaaaaccgcccacggcatgacctatctgctggtcagccatgatgcggatgtggtggcgcatatgtcagaccgagcggcatttatggcgaacgggaaaattgaactggaatttgatcgtgccgccctgctgcgtggcgaccaccggatggagaacagagagatataaaaacgagatgtaaaaacggggccgatggccccgttcagataataatgaactgtgtgattatgacaataatcccgggaaactcattttcataccggtaatgatcagctcaatacctaatgacatcagcatcagacccataatacgggtcacaacgttgataccggtttgtccgaggtatttcacccacagccccgccgagcggaacaacagccagcagcagaacgcgaacacgatgctggtcagcgccagtccgaggaagttctgccagccctgccagcgggcactccagaccacacaggaactgatagcccccggccccgccatcagcggcagcgccagcggcaccacaccgatattgtcgcggatagccgtttccgactgctcctgtttgttctgcttatcttcccccagcttaccgctgatcatggacatggcaatgaggacaatcagtgtcccccctgctatccggaaagattcgatggaaataccgaacataatgaggatcttatcgccgaccagaagtgatgtgcacaaaatcacggccaccgaaaagttcgcaatcatgttggtcttattgcgcactgcggcagtctgataatttgtcatgctcataaagaccggcagaataccgaccgggttaactaaggcaaataagccgacaaaaaattttaaataaccggaaaaatccagcaaagtgttgcccacaaaggatcctcaacctgatgataatacagtgatagtctgctgataataacagcaggctatcgcctggggggttgtaataattataaatgtgattattaacacagacatcataccgttgaatgtgcaggaaaaggaattgctttacgcagaatattttctgcttccggctgactcgatacagttatatccccttacttctgcctgaatttcagacaatcatcagttcttctgtgaaattgagacccgatatcatttacgttacggtgtgatgttcccgttttgacccgtgctgaatggtgtcagcttgatatatttgtgatttggatcactttaatatttcccctgaatgttaagctgctttcattatagttgaatcgattcaactataatgcgaacagaaagacctgacgggctttttaagcaaatcagcgggcatatctgcattatgttaccggcaaaatcgatttagttaccggaagatatcaccgctataatcaaattgtatcaatccgctgatttgcttaaaaagtttaacaatttatcaggagtgatctgtatggccgtaacgaacgttaccgaactcaatgaattagttgcccgcgtgaagaaagctcagcgcgagtttgccggtttctcccaggaacaggtggatgctatcttccgggcggcggcactcgctgcagcagatgcccgtatcccgctggcaaaactggcggttgaagagtccggcatgggtattattgaagataaagtgattaaaaatcattttgcttctgaatatatctataacgcctaccgcgatgagaaaacctgcggcatcttatcggaagacccgaccttcggcactatcaccatcgcagagcctatcggtattatctgcggtatcgtcccgaccactaacccgacctccaccgcaatttttaaagcgctgatcagcctgaaaacccgtaacgggatcattttctccccgcatccgcgtgcgaaaaaagccacaaacagagcggctgaaattgttctcaacgcggctgttgccgccggtgccccgaaagatattatcggctggatcgacgagccgtcagtggaattgtccaatgccctgatgcatcacgcggacaccaacctgatcctcgccaccggcggaccgggcatggtgaaagctgcctacagttccggtaaaccggccattggtgtgggcgcgggtaacacccctgtcgtgattgatgaaaccgccgatatcaaacgtgcggtagcctctattctgatgtcaaaaaccttcgataacggcgtgatttgtgcctctgaacaatcggttatcgtggtggatgatgtctatgagcaggtcaaagaacgttttgaaacccacggcggttatattctgaaaggcaaagagctcaaagccgttcaggacatcattctgctcaacggcggactgaatgcgaaaattgtcggtcagtctgcggtgaaaattgctgaaatggccggtatcgaggtgccgtcctggaccaaaattcttatcggtgcggtctccgtggtggatgaatccgagccgtttgcacacgaaaaactctccccgctgttagccatgtaccgcggcaaagattttgaagatgcggtgatcaaagcggaaaaactggtggaaatgggcgggatcggccacacctcctgcttatatactgatcaggacaaccagccggagcgcgtgaaattcttcggtgagaagatgaaaaccgcacgtatcctgattaacacccctgcatcacagggcgggatcggcgacctgtataacttcaaactgtctccgtcactgacactgggttgcggctcctggggtggtaactccatttccgaaaacgtcgggccgaaacacctgatcaacaccaaaaccgtggcaaaacgagctgaaaatatgttgtggcataaacttccgaaatctatctatttccgccgtggttctctgccggttgccctggaagagatcgccggtgacggtgcaaaacgcgcctttatcgtgactgacggctatctgttcaataacggctatgtggatgaagtcacccgtgtgctgaaatcctacggtatggaagtggaaattttctttgaagtggaagctgacccgacactttctgtggtccgcaaaggtgcggagcagatgaacagcttcaaaccggacgtgattattgctcttggtggcggctccccgatggatgcagccaaaattatgtgggtgatgtatgaacatccggaaacccattttgaggaactggcactgcgctttatggatatccgtaaacgtatctataagttcccgaaaatgggcgtgaaagcaaaaatggttgctatcaccaccacatccggtaccggttctgaagtaacaccgttcgcggttgtgacagatgataccaccggccagaaatacccgctggcggactatgcgctgaccccggatatggcgattgttgatgccaacctggtgatgaacatgccgaaatccctcaccgcgttcggcgggctggatgcggtcactcacgcactggaagcgtatgtatccgtgctggcaaacgaattctctgacggccaggcattacaggcgttgaaactgctgaaagagtttttaccggccagctatcacgaaggtgcgaagaacccggttgcccgtgaacgcgtgcacaatgccgcgactatcgccggtatcgcatttgccaacgccttcctcggggtatgtcactccatggcgcacaaactgggttctgagtttcatattccgcatggtctggctaatgccctgcttatctgtaacgtcatccgttataacgctaccgataacccgaccaaacagaccgcgttcagccagtatgaccgtccgcaggcgcgccgccgttacgcggagattgctgaccatctgcaactgagtgcagccggtgaccgtaccgcgcagaagattgaaaaactgctgatctggctggatgaaatcaaagcatctctggggatcccgaaatccatccgtgaagccggtgtgccggaagcagaattcctggcaaaactggataaactgtccgaagatgcctttgatgaccagtgtaccggtgcaaacccgcgctatccgctgattgcggaattaaaacaaatcatgctggatacctattacggacgcacctatgacgaatctgttcctgttgcggcgccaaaaccggttgccaaacggaatgctaagaaataatcatcaatccggcaaataataaccataaagccctccccggagggcttttttatatccgtctcataataattattaaataattgtctttgtattaacagctgttcacttttgatcatgttttccgctgcagccggtttttaatatttcacttaatacccgttacaaaactgtggtaactcccgggggtattcaccggtattttatccctgctgactcaaataccgcctcatcactttccctgcagaaaccgttccggtgttttttgatatcaggcgcaatccgcagcggatataaaaaagccggacaatgacgtccggcactttttgtataacagagaggcttccctgatttatgaccgatattctgctgcttttacttcgcgtatcgcttcattgtaatgtttgcggcagacggatacatttttttcattcccgccgatgtcaatttgtgcaccatctgacatcacccgcccctgtccgtcgtaacgtaaaacacggctggcttttcgtccgcaataacaaatagtttttaattcaactaatttatccgcccaggctaataaataatggctgccgctgaataactcacctttaaagtctgtgcgtaacccgtaacacagaaccgggatatcaatatcgtcgacgatatagcagagctgttccacctgtgctttggtcaggaactggcattcatcgattaatacgcagtgtacgggtgtctgctgatgttcacggataataaccgagctgacgtccgtctcagggccaaatacccgtgcatcggcgctcaggccgatacgtgaggtgactttgctctgctcatagcggttgtctatctctgcggtaaatatcagcgtgcgcatgccgcgttcattgtagttataggatgactgcagtaacgctgtcgattttcccgcattcattgcggagtaataaaaataaagctgagccaccggctctctccccttacacattcaagatccgggacaatactaacacattagtgttaaaaacagcgcaatctgtatttcacacatgccgtgatcgcatgcacaatatcctgagttcatcgcacacgtaaattcacacaggtcatggttacataccggatattcactgttgttatcgggtatccttcgctttatcctgtttttcattataccgggaccgaagaataacgtttctttacataagataaggttaaatataatttgtattccctaccacatttatgaacaatttttatgaagatgctgaacatcaacgcattttcaccccgtccccttatcaaatttaaacgaaaagccaaaaagacccttattattcctcagaaataattgcttttaaaaaaaatgtgttttaaccttactccgaaatttgctattgcagatttttaaatagcaatctattattatctatacaccagccaacatttaatttgagaccaggattatgagtgaatctttgaagccatttaataatatccgtactcttcgcgctcaggcgagagaatccagcttagaagttttagaagaaattctggaaaagctgacttctgttgttgaagaacgccgtctggaagaatcccaggctcaggctaaagaagaagagcgcacccgtaaattagaagaattccgtcagctgcttgaaaagcagaatatcaacccggaagaattaattcagtctatgggtacaggcaaaacagcccgcaaatccaagcgtgctcagcgccctgccaaatatgaatatatcgatgagaacggtgaaagtaaaacctggaccggccagggccgtacaccagctgtgatcaaacaagctatcgataacgaaggtaaatctctgaacgatttcttaatcaagtaagtgataatatctgccgaaaaagcccttctctgaagggcttttttatatctgccggtcagacggacagcaaaaaggaggctttcgcctccttttttatacttataaccgttgctgttatttatttttttccgtgataaaacgacatataccagtcaacaaactgctgtacgccgtaattaaccggcgtatccggtgagaaaccaatcgttttgtacaattcggaggagtctgcacaggtggataacacatcaccatcctgcatatccatatagtgtttgtcagctttaatatccagcgccgtttcaatcgcctgaataaaatcacccagccgggtcggctgaccgttaccgacattataaattttgtacggcgcagagctggctgacttcagcccctcttccaccgtccagtcattattcactgccggaatcacatccaccagacgcaccaccgcttccgcaatatcaccgacataggtgaaatcgcgcaccatattgccgtggttatatacatcgatcggttttccgtccagcatggctttcacaaacttaaataacgccatatccggacgcccccacgggccgtagacggtgaagaaccgcagaccggttgtcggcagctgatacagatgtgaataactgtgtgacattaattcattggcttttttcgttgccgcatacaacgacaccggatggtccacatcatcctcaacagagaatggctgtttgcggttcagaccgtataccgaacttgaggaggagtaaatcagatgcccgacgttatgatgacggcacccttccagaatattcatatgacccagaatattcgcgtcaatatacgccatcgggttctggatggagtaacgcacacccggctgtgccgccaggtggatcacccgttcaaatttctgtgcggcaaacagctcactgacagccgctttttccgacaaatccattttaaaaaactgaaattgcggatgcggtaataacagatcaagacgggcctgcttgagattcacatcataatagtcattcaggttgtcggcaccgacaacctcgtgcccctgctcaagcaggagctgcgagacatgataaccaataaaaccagccgcgccggttacaagtattttcatattcagactcagattaccggattaatggaagcaccacggcctataccataatagataaagccgcgattttctaaacgttccgggtcataaaggttacgtccgtcaaaaataaccggggttttcagtcctgctttgatagcatcgaagtccggcgcacggaaactctgccactcagtgcagataaccagtgcatccgcattgtgcagtgccgcttctttggtgcccatcagcgccaggtcatcgcgcagtccgaaaatgcgctgcgcttcctgcatcgcttccgggtcatacgcctgaactttggcaccggcggcccataattcctgtaacaggatacggctggacgcttcacgcatatcatcggtgttcggtttaaaggaaagaccccagaccgcgaaggttttaccttccaggttttcaccgaaatgacgtttgataaaggacggcagtttatatttctgctgctcgtttacttcttccaccgcacgcagaatacgcggggtaaagccgatatgttccgctgtgcggatcagtgcctgcacgtctttcgggaagcaggagccaccgtagccacagcccggataaataaagtgataaccgatacgggagtcagaaccgataccctggcgtacattctcaatatccgcgcccagcatttccgccaggttggaaatttcattcataaagctgatttttgtcgccagcatacagtttgctgcgtatttggtcagctccgcactgcggatatccatcacaatcatgcggtcgtggttacggttaaacggctcatacagttcgcggataatatcgataacacgatcattatcacagccgataacaatgcgctcaggacgcatacagtcagcaacagccgccccttccttcaggaattcagggttagacaccacgtcataggcaatatccgcgccgcgttcagccagtgcggctttaatcgtggcgttaactttatccgcagtaccgaccggaacggtggatttgtcgataaccactttgtagtcctgcatatgctgcgcaatagtgcgggcaaccgcggtgacatattgcagatccgcagagccgtcttcgtccggcggtgtaccgaccgcgatgaattgcagtgtgccgtgtgccacacccagtgccgcatccgtggtgaagctcaaacgaccttcttcatagtttttcttcaccagcggggtcaggcccggttcaaaaatcgggatcacaccgtttttcaggttttccactttttttgcatcaacatcgacacacatcacatcatggccgacttccgccagtacagtcgcctgcacaagaccgacatatccgattccaaatacggttactttcatagttcacctattgcaacaattattaattctgtaatgttttcagccagtctgagaattcacggcccaggtgcttatgacgcatgctgtactcgacaaaagctttcatatagcccattttgtcgccgcagtcatggctgcggcctaccagacggtacgcctccaccggatttttttcaatcagcatggcgatagcgtcagtcagctggatttcatcaccggcccccggggcagttttccccagcagcggccagatatcctgggaaagcacataacggccgacaatagacatgttcgacggtgctttggccggttccggtttttccaccacggcaaacatcggcttgctttcaccggcagccaggctttcaccgtggcaatccaccacgccgtaatttgccaccatctcctgcggaaccggatcaaccattacctggcttgcaccgtgttcttcataacgtgcaatcatttctttcaggttaaatttcgccaggtcagtgctgtattcatcaataatcacatccggcaataccaccgcgaaaggctcatcaccaatcattggtctggcgcataatacggcgtgaccaagccctttggcgatcccctgacgggtctgcatgatagtaacgtgacgcgggcagattgactggacttcatccagcaactgacgttttacacgtttttccaggatggcttccagttcaaagctggtatcgaaatggttttcaatggagttttttgatgagtgggtcactaaaataatttcagtgatccccgccgcgatacattcattcaccacatactgaataagtggtttatccaccagcggcagcatttctttcggaatcgctttggtggccggcagcatacgtgttcctaatcctgcaaccgggatcacagccttgtgtactttatttttctgcactgacatacatcatcctcaatgcgcataaacagaataaatacgcgatttataaaaaataatgagactgagtataccagctaattttccgggataaatactctgtgccgcgtaaatgcggtttagtgttaagagatgtttaatatctgaacgggttggtaaagtccggtaattatccctgatgcggtccgggggtcaggcttaatttaatctgactgctgctgttccagatccggcattgcagatggcggctgaattcacttatctgactggaataaacagaagagagtgtccccagcggaataccccggttaacgcggatcacatgattgtcagagcgtaattccgcactgataccggcactggacaataacaccgacttacgccgggtgtgataataccccagcaacagcggcagctgtcccggaatacccgcatcctgtaataaccggttcagcttatttaagatggcggtcatgctcggtaatttccggtggtgattatgaatatagcgtttaagcaaatcgttaaagatgacgcggattaacatcgccatcaaagggccgttgccggtattctggctgatgtcgagacaataaaacgccacttcattatcagaaaattctgccacatcaaataccagcccggcccggcaggtatcggataattgcgcataacggatctgataattggccagcacctgactcggcggcgggttcagctgttttaataaacgtaaaacatcatccacattatgctgtaactgagcccagatcccggagagatcattattttccagcacccccggtgagaaaaatgacgggtacaggtgggacagacataattttttcacttcttccagcctgttcaggggttttaacagcacatcttttgccccgagacgcagtacttcatcgatatccgacattttttgtgtcgcagagataacaatcaccggaatggccggtaaatcagactgtgaccgggcaataaattccgcgccggtcatcaccggcatattgaggtcacagaaaatcagttccggctgaaagccctgttctatacattcccatgcgcgtgcaccgtcaccggcagataacaccgtggcaccgagaaggcgcagataggatgacagcgccatattgaatgccgggtcgtcatcgatgactaacaatcgttttccgtccagtgcctgcttcatcgcatcccctttctgcccggcctcacaactcagcgtgcccggaacaccgggaatgccgctgctcccgcactgctgctgagattaaggatagcgtgtgatcgctatttccggtagcatctgagctctgttccttacgattatttaccctgaacacattatttgataattatgtctcattttacagataccgatccctgcccgtgcggcagcggggatacttttgcacagtgttgtcagccttatctttccggtgcgcagtccgcccccgatgcgcgggcactgatgcgttcgcgttacagtgcgtttgtcacccataatgctgatcatctgatccggacatggtatccgccggtacgcgcggaagcactgcgggcagaactgaccgccggattcggtgaaacggaatggctggggctgaatgtcattgattttcagcccggctccgcgccggacgaggctttcgttgaattttgtgcttgctttattgataaaaagtccgaagataaacaattcattcacgaacgttcccgttttcgcctgactgacggtgcctggatgtacctcgacggcgtaaaaccacagaccggccgtaatgatccctgcccctgtggctccggaaaaaaatataaaaaatgctgtgcctgacaccggacaggcacgttctgtaaacaaacatcaccgacatcagttattaaggatccacaccttccatgcaacaccagacgagccagaaaaaaattctgcgaaccatttgccctgacgcaaaaggtcttatcgccaaaatcaccaatatttgttacaagcatcagctgaatattgtccagaacaatgaattcgttgatcaccgtaccggccgcttttttatgcgtactgagctggaagggatttttaatgacgaaactctgctggctgacctggatgatgcactgccgaaaggctccacgcgcgaattaaccaccgccggacgccgccgcattgtcattatggtgaccaaagaagcacactgcctcggcgatattctgatgaaaagcgcctacggcggtctggatgtcgaaatcgcagcggttatcggcaaccacgatctgctgtctcatctggtcacgcagtttggcattccgttccatcatatcagccacgacggactgacccgtgagcagcatgatatgcagatcattcagcagatcgatcagtatcagccggactatgtggtgctggcgaaatacatgcgtgtgctgaccccggcatttgtgcagcactatccgaaccagattatcaacatccaccactccttcctgccggcctttatcggcgcacggccttatcatcaggcatatgagcgcggcgtgaagattatcggtgccaccgcacactatgtgaatgataacctcgatgagggtccgatcattcaccagagcgtgattaacgtcgaccacacttacagcgccgatgatatggtcatggccggtcgtgacgtggaaaaaaatgtgctcagccatgccctggggcgtgttctgacacagcgggtattcgtttacggtaaccgcactgtcattttataacggcttaattgcctgaagttgcacggttaacgtgcacttcgggcaaaaaaacaacgaccgcactttttttctctttttttactttacagcgtccgcatatttgctattatgcagcccgtcccaaggcaacagctgaacggacagacaatttgatttttggtgggatacccaagcggccaaannnnnnnnnnnnnnnnnnnnnnnctcttctctcctgttatttcatattctcaatacaatccattattttgttcagcacacttgcgtgtgatttcgatttgtacagataacaatgattttccgcctcactctgcgataacggcagaaaaatcagttcatcgctgtacggcagcgttttcgggtgctcatcaataaagcagagataatctccgtcaatcagcagatgcagataactgttcacattgtcgatcagatgcacatgttcatgtttgctctgttcaccgagctgcagcaataatgttttgagtaacgggctttcatataataacggctcacataaccagacacaggaggataataatgtctgtaaattgttatcacagtcctgaaacagtgaacgacggcagcagatcccgatttgtccctgcggtaaatggcgcagcaacgtaaaacgttcgctgataacctgctctgacgacagtatcagcgtattgccctcaaaatcatttatttcatcaatacaatcatagtggaaacgaaatatattaatttgtatacccgctttgaatgccgtccggtacagtgccgcaatatatttacttttcccccagtcataaaatatattcaccttattacatatcgttccgctgatatgctttttggtaatttctttttcctgcatatagagatctttaagatcattgtacaactccatcccttcccgtgtcaggctcataccaaatttttcacgtttaaataaacgcttacccagcgagatctcaaaatccttgatagacttggccaccggcggggttgtcctgttcatcacttttgctgccttgctgagcgagccgtattcaacaacagccataaaggcttctaacttccttgaaaaaaacataatgtcgattcctgtgctgtagtaaataatcagttaaataattacttattgatatgtaacgactttatttctggtgtttttttcttacacaaagagtttaaatacgatttttattaaaatttatacaataacaataatgcaatgttatatttttattattctgttttattaaatttcattttaaagattaatacataaacacaaaaatcttccttccgatttttatcacacccatttcatttcactgcacagaagaaagaataatcattattaatgctgattattttgtcaattaaaattaagacatattaacccctgccgggtgtgccggtttttattattctgccggcgggttactttttttctgcgatctgttactcttttgttgttaactcatcaaccggttggaattctatgaagtttgtctcttttaacattaacgggttaagagcccggcctcaccagctggaagcgattatcgcacagcatcagcctgatgttatcggcctccaggaaaccaaagtccatgacgagatgttcccgctcgatgacctgaaacacctcggctaccacattttttatcacggccagaaatcccattacggtgtcgccctgctgaccaaagcagagccgcttgccgtgcgcaaaggcttcgccggggatgatgaagatgcccagcgccgtctgattatggcggatattgataccccggccggggtactgacagtaattaacggttatttcccccagggagaaagccgcgaccacccgctgaaattcccggcgaaaactaaattctatcaggatttacaggactacctgtccgggcgctccaaccaggatccgattgttattatgggtgatatgaatatcagcccgcaggatattgatatcggaattggtgacgccaaccgtaaacgctggctgaagaccggcaaatgctccttcctgccggaagagcgtgagtggatggatcgcctgctcagttggggactgaccgacacttaccgcgcgatgtatccggatgcagacgaccgtttctcgtggttcgattaccgttcacgcggctttgatgacaaccggggactgcggattgacctgattctggcaagcaacgcgctggcaccacgctgtaccgccaccggcattgattatgagatccgtggtatggaaaaaccctctgaccacgcgccaatctgggctgaatttgatttaacccgctgataaaaaaaatgtcccgtcaaagcgggacattttttattcttcttcctgtggcggcgttttttttccgccggtcttccctttgctcttcgcggcggttttacctttgcctttcgcgccggccttcttcgcctgcggcggcggtggtaaatcacggaaagcgcggacattccggttctgccgggcctggtttatcagtccggtcagtgtttcagacaacggcaccataaaatcctgataacgatactgtttttcactgatttgtgtcagcgtggattcccagtgtgccgtcatatccggtaaggtggccatttcgggcagaacatggatcagtgcgcgaccagccggagatgaatgaatattccgcccttttttatacaaaaactcgcggcggaacagcagttcgataatcccggcgcgggtcgcttcagtacccagtccgtcagtttcgcgcagtacttttttcagcgccttatctttcacaaaccgggcaatcccggtcatggctgacagcagcgtggcatcggtaaacggtctcggcggctgcgtctgacgctccaccacttcaccgcgctcacacaggagttcatcccctttggtcagcaccggcagcggcgtgccttcgttttcctcgtcacgctctttggcgcccagcatggtccgccagcccgcctgagaaaggaaacgcgcctttgccacaaatttgccgttggcgatatccagttcaatcacacatttgcggtattgtgcatccggcataaactgcatcagatactgacgcgcaatcagctcgtagatattggcttcattctcactgagcgacacggagaccgatttggcggtcggaatgatggcgtggtgcgcatcgacctttttatcatcccagcagcggttacgctgcgaatcatcgaggttatcctgcggcagcagatgcggggtatgcacagaaatcgcattgagcacactgtgacgcccggcaaaatgctcttccggcagatgacggctgtccgaacggggataagtaatcagtttgtgggtttcatacagacgctgacagatatccagcactgcctgggcgctcagcccgtagcgtttggcggcctcaatctgtaacgcagacagtgaaaacggcagcggcgcgatttcattttccgttttatcctgaaaatcagtcacaaaagccggtttaccggtgatacggctgaccacatgctccgccagcggccggtgagtcaggcgtccttcatcatcctgataatcctggcaggcctcactcggcacccacatcgccgtaaaacgttcgtccgccggggtaacaatatgtgcccgcacttcaaagaaatcgcggggcacgaagttttcaatttcctcatcacgccgcaccaccagcccgagcaccggggtctgcacacggccgactgaaagcacaccgttatacccggcattacggccgagaatagtgtaggcgcgtgtcatattgatgccgtaaagccagtctgcccgtgcccgggccagcgccgaaacacacagcgggataaaatcacggttaagacgcattttatccaccgcccgtgttaccgcctgcgggttaaggtcattgaccagacaacgctgcacctgctgacgcttttccggcgcgagctccaggaaatccagtacctcatccaccagcagctgcccttcgcgatcggggtctccggcgtggataacttcagttgcggaactgagcagcgtaccgatggtgcgcagctgtttcgccaccgcgtcgcggggtctgaggatccatttttgcgggataatcggcagatcagccaggttccagcgggcataacgcggatcatacgcatccggctctgcctgctccagcaggtggccgacacaccaggtcacacagtcattctgaccgcagcggataaagccgtccccccgctggtgcggtttaggtaatacatccgcaatcgcacgggcgaggctgggcttttcggcaataaacaaacgcatgtttatgcggtgacttcaatcagtgcacgggatgcgtccggctcagtcagttcaccgaccgggcttaatgtcaggccgtatttgcgggcaaccgcttccacttcctcacgcgctgccggatcaaccgccagcagcaggccgccggatgtctgcgggtcacacagcagtttgcgctgaacatcggtcatttcaccgataaggtggccgtagctgtcaaagttacgctgtgtgccgcccgggcagcagccctgtgcaatatagtcatacacaccaggcagtaccggaacagaatcggtatgaattattgcctgtaacccggagccctgacagatttcgctcaggtgaccgagcagaccgaagccggtcacgtctgtcatggcttttacaccgtcgatttcagagaagtccgcacccggtttgttgagctgacacatggtgtcacgcgccaggtttttatgttcagggcgcagtttgctctgtttttcagccgtagtcagaatgccgatacccagcggtttggtcagcagcagctggcaaccggcttttgcacggttattttgtttgattttatctgtcgggacgataccggtgaccgccaggccgaaaatcggctcaggcgcatcaatggagtgaccgcccgccagtgaaataccggcatcgcggcagaccgcacgtccgccttcaatcacctgctgtgcaatttccggagccagtttggcaatcggccagccgaggatcgcaatcgccataatcggcttgccgcccatggcataaatatcactgatggcgttggtggccgcgatacgaccgaaatcatacgggtcatccacaatcggcataaagaaatcggtggtgctgatgatgccggtaccgttgccgatatcatacaccgccgcatcatcacgggattcattaccgaccagcagattaggatcgatgaattttgcctgctcactgtgcaggatggtgtcgagcactttcggggaaattttacagccgcaacccgcgccgtgactgtattgcgttaaacgcaccgcttctgacatgatagtctccttgttaacgtcaatccgctcagaaatacgtgacaaacggtgtcagatccggtgccgccactttggcaggcgctttcagtgccggagtgccgagatacagaaagccgacaattttatcgtgctcctcacatcccagaccttcccgtaccaccgggtcctttgtccacgaaccggtgcgccagatcccgccgaagccctgagccacagcagccatctgcatcgcatgaaccgaacagcctgccgccgcgacctgctcccattcaggaactttatgttccggcttcactttcgcgataaccgtgataatcagcggtgcgcgcagaggcgcattgcgggctttctcttccacttccggcccgagtccggctgtttttgccgctttttcgagcaattgactgaatttggtgatgccgtcatcctgcatcacgataaaatgccagggctgtaacgcgccatgatccggcgcacgcatccctgcattgagaatattttttaatgcttcgccttcgggtgcaggtgtggtcagacgagaagcagaacggcgattgagtagtaatgtcagtgcatccatcggttttccccttttttagtcgctaataagctaccacttttttcactatttttaaggatagattgcttaactgcctatattttccgcaatgtgtcgttttcaggctgacaaatccgcacatcctctttacgatagcaggacatctttgtctttcggagccgtcatgcatactttatggactatcattgccggaatatttaaatggagctggcgtatactgaattttgtgcgtcagcttgtcgccaatgtcctttttatcatcatactgctgttagccgccggggcctatgcactgctgagtgagcaggatactcagaccagccgtgaacccggagcattatatgtaaatctttccggtgttgtcgtcgatcagctgacccgtaacagtccgctggaaagtctctcgctccagctgcttggcgcgtcttccggtcagttacaggaaaactccctgtttgatgtggtggaaactatccgtaccgccgccaccgatccggatattaccggaatgatcctgaagctggatgatttcgttggtgctgaccagccgtcacttcagtatatcggcaaaaccatcacggaattccgcaaacagggtaagcgggtctatgccgtcagcggcaactataaccaggctcaatattacctcgcatcctatgcagacaagatatatatgccgccacagggcagcgtcggtatctacggcttcgccaccaatacgctgtattataacgaattgctggaaatgctgaaggtgaaaacccatatcttccgcgtcggtacctataaatcggcggttgagccgatgctgcgcaacgatatgtcaccggaagcccgcgaatccacacagcgttttatcagtgtgctgtgggataactatctcaccagtctcgcggaaaaccgcaaaaccggtaagaacactattttcccgggcgcacagcagatgctggctctgatgaaaacggcaaaaggtgataatgccgcttatgccgtcacgcaaaaactggttgatgagatcatgccggctaacgtgtttgaatcagaaatggccaaaactttcggctgggataagaagaacaacacaatcaatgcgattccgtttgccgagtatgccaaaaacatgagcatcggcgtaccgcagggcaaaaccaccggtaatatcgccgtggttgtggttcagggtgctatcgttgacggcccggatgcccccggcatggccggcagtgataccatcgccgcacagctccgcgaagcccgtctggatccggaagtgaaagcgctggtactgcgggtgaacagcccgggcggcagtgtaacggcatcggagcagatccgtgcggaagtcgcagcactgaaacagagcggcaaggctgtggtggtttccatgggcggcgtggcagcttccggcggttactgggtctcaacaccggcgaactacatcattgcctcaccgagcaccattaccggctccatcggtattttcggcgtagtcaccacttttgaggactctctgagcgaaatcggcgtacacactgacggcgtttccacctcgccgctggcagatgccacagtgaccaaagcactgacaccggaattctcagagctgatgcagctctatattgaaagcggctacagtaattttattaatctcgttgccaaatcccgtcacaagacgccggaggaagtggataaaattgcgcagggtcgtgtctgggtcggttcagatgccaaagctaacggcctggtcgataaactcggtgattttgatgatgcggttgccaaagcagcagagctggcctctgttgagcatccggtactgaactggatgcagccggaaatgtcctttatcgacagactgcttgcagaaacggccggtaatgtgaaagtgacactgccttcatcattgcagggactgatcccggcaccggtcggtgcacaactgacacaacaggcatcctttatgaaaatgctgacggatccgcagtaccgctatgcgttctgcttaaattgcaccaatattcagtaagttttattctcagctgacaaaagcctgttcgtgacgaacaggcttttttttatttctgaagcccctataatttccttccctgtactcattgttaagagcagtaacatgcaaaagaaatccatttatgtggtttataccggcgggactatcggtatgcagcactcggcgcagggctatatccctgtttccggccaccttcagcgccaggttgccaaaatgccggagttcttccgtccggagatgccggatttcaccatcaccgagcaccagccgctgattgattcttccgatatgacaccggatgactggcagtgtatcgcggatgatatcaaagcccagtatgaccactatgatggtttcgttatcctgcatggtacggataccatggcgttcaccgcatcagcactctcctttatgtttgagaacctgaccaagccggtgattgtgacagggtcacaaattccgcttgaggcactgcgctcagatggtcagatcaatctgcttaatgccctttatctggcggcgaattatccggtcaacgaagtgggattattcttcaataaccgcttataccggggcaaccgcaccgtcaaagcacatgctgacggttttgcggcctttacctccccgaactacccgccgctgatggaagcggggattaatatccgcaatcttaatactcacccgctgccgcagagtaccgcacctttcacgctgcataacatcaccccgcagcccatcggcgtggtaaccgtgtatccgggcttgtcggtggatgtggtgaacaacattctgcagcagccggtcaaagcactgattatccgctcctatggtgtcggtaatgcaccgcagcagccgaaactgctcaccgcattgcgggaggccacagagcgcggcatcattgtgatcaatctgacacagtgtatttcaggacgcgtcaatatgggcggctatgccaccggtcatgcactggcagaagccggcgtgatcagcggctttgatatgactttcgaggcagcgctgaccaaactgcattatctgctcagccaggattacaccagcgatgagatccgcattctgatgcagcaggatctgcgcggtgaactgagctataacgacaactgaggagtctgcaatgaaaccggcactgcttctggtggatattcagaatgatttttgtcagggcggcagcctggctgtccgcgacagtgatgcggtgatccgcacagcgaaccggataatagcccgttgtcagcaacagaatatcccggtgatcgccagtcaggactggcatccggctgagcatctgagctttgccgtaaattccgggacagtaattggtgaatgcggcgaactgaacggattgccgcaggtctggtggccggtgcattgtgtgcagaacactccgggggcggattttcatcctgacctgaataaacaggctatcactcatattatttataagggtgaaaacccggccacggacagttacagcgcgttttatgataacgaccaccgggagccgaccgccctgctgaaactgctggcaaaactgcagatcacgcatctcgctgttctgggaattgccaccgattactgcgttaaatttacggtgctggatgctctggcggaaggatttgccgtcactgtgatcacagacggctgccggggtgttaatttacagccggatgacagcctcaccgcatttgcagagatggagaaagccggtgcgcggttgcagacagccgctcagttctgcggcgaaaaagaacagtaatcgtcatgacgggacagtcagcactgtcccgttttacactcagtcctgcggtttcagtgtggccagatgcgtatcggtaaacagcgctttcagttcctgcttacttttcaggctgatttccccgtcagtacccaccgtcatatgtgccggatctgcattatggcgggactgccatagcatcaccagttgcagactgctgcttttctgagatttcgtcagtggtacaccatcggcccatttacccagttcgacggctgtcaccaggcgcccgtagacttccggcgtcatggcggacaataaatcatcaatttccatacagttccttccccgaaagcgtctgatttcacgttttgatcacatcagaagctgaatcgttttttctatcgttatacaaatgttaaatttcaatataaccaaactaaccgtttgttattacttttgttttttcatcttcgaaactcagtgatgctgagttaatacaataacgctgccctgtcggcgcaggtccgtcaggaaaaacatgtcccagatgcgcatcacaatggccgcaacgggtctcaatacgatgcatgccatgagaggtatcgtcaatataccggactgcacttttgctgaccggctcataaaaactcggccagccgcaaccggcatcaaacttggtatccgaataaaaaagcggagaaccacaacaaatacaacgatataccccctgtttctcattatagagcaggcggccggtaaacgggtgctcagttcccgcttcctgtgtgacatagcgctgaatctctgtcagctcagcgggtgcatcccgctttttatcagtcccggacatagctgaatccttatcattattgtgcagggtcagtcagaatacagaataacaaaaaattaacatcaaatgaccggatgttattctaaacttgtcatgtcagcattgacaccacttatttgtgacatgtttcacatttatgccccatacacgctgtctttattccggtaagtcccgataatagcggcgacaaatttactgaaagtggcgatttgttgagcagattaaatgttaaatgacattaattgacacgattccgcttgacggctggcaaggttttggtaactttagtagcaactttaattcactaacaaatagctggtggtaatactatgactatcaaagtaggtattaatggttttggtcgtatcggccgtatcgtattccgtgctgcacaagagcgttcagatatcgaaatcgttgcaatcaacgacctgctcgatgcagattacatggcatacatgctgaagtacgactcaactcacggccgttttaacggtaccgttgaagtgaaagatggccatctggttgttaatggtaaaactatccgcgttacctccgaacgtgaccctgcgaacctgaagtggaacgaagccggtgttgatgttgttgctgaagcaaccggtctgttcctgactgacgaaactgcacgcaaacacatccaggcaggcgcgaagaaagtcgttctgaccggtccttccaaagatgcgaccccgatgtttgttatgggtgttaaccacaaagattacgcgggccaggaaatcgtttctaacgcatcctgtaccactaactgcctggcaccactggcaaaagtcatcaacgacaaattcggtatcgttgaaggtctgatgaccactgttcacgccaccactgccacccagaaaactgttgacggtccttcacacaaagactggcgcggcggccgcggtgcatcccagaacatcatcccgtcttctaccggcgcagcaaaagcagtgggcaaagttatccctgcactgaacggtaaactgaccggtatgtctttccgtgttcctactcctaacgtctctgttgttgacctgactgtccgtctggaaaaagcagcaacttacgctgaaatctgtgaagctatcaaagcggcagcagcaggcgagctgaaaggcgtaatgggttacaccgaagatgacgtggtttccactgacttcaacggcgaagtactgacttctgtgttcgatgccaaagccggtatcgcactgaacgacaactttgtgaaactggtttcctggtatgacaacgaaaccggttattctcataaagttctggatctgattgcacacatctccaaataagtctgcactctgtatcctcacaaagagccgcttttgcggctcttttgttttgtggtaaacagtcgtaaagtagaaagtaaatgtcctgtttttattacaaaagggtaaattatgattgagcgccttcttgcgttaccggttaccagtccgatcaccccttcgctgtcccagcgtcagatgggggatttgccggttattgtgatcgaccatccgaaagtccgtgctgcggtcagttttcagggagcacaggtgctggcatggcaaccggccggttcagaacagccgggattatggctcagtgaaaacagtgcatttaccccgggcgtggccatccgcggcgggatcccgatctgctggccgtggttcggtccggtgcaggcaccttcccacggttttgcccgtattatgcagtgggagtttacggctcataatgaaaatgaagagggtgtatttctcacattcactttgcgtgacagtgcggaaacccgcaagttgtggccgcacgagttcacactgatcgcccgcatccgcctgggagacacctgtgaggtcgagctggaggcttacgggcagtatcaggcaaccgcagcgctgcatacctattttaccgtcggcgatattgcacaggtcagtatcagcggactggggcagcatctgctggataatctgtcgcagcgtgaagaatataccgaagagacaaagctggttttcaacggccgtaccgaccgtatctataccgagccggaacaatccacctatatccacgataagaaattaaaacgccatattgaagtggtgcattttcatcacagcgatgtggtgtgctggaaccccggtgcagcattgtctgcttcaatggcagatatgccggatgacggttataaaacgatggtgtgtgctgaaagtgcgcggattaaccgtcctatggctccgc

SEQ ID NO: 18 - DNA, 198184 bp, unknown
  Altogen 322075 strain
  misc_feature (62623)..(62652): n is a, c, g, or t
  misc_feature (62993)..(62993): n is a, c, g, or t
  misc_feature (120667)..(120667): n is a, c, g, or t
cccggaaccccggtgcagcattatctgcttcaatggcagatatgccggatgacggttataaaacgatggtgtgtgccgaaagtgcgcggattaaccgccctatggccccacagggcgataaaccgtcccatctttccgtccgtatccgcctgaacccgaaaatcggctgacgggctgctcaggaacatataaggccggtgaatggttaccggctttcatataccgttgtcagcagcggtgaatcaaacacagccaccggcgaaatcacggtttcattcagcggaaccgcctttccgtaccgttctttcatctttgcctgtacttccggtgaggataaatcaaactcccgcaatgtctgtaactgaccgatctctgtattcagggcatttttatagattttccagaccagttcagaacaataaatccgctcatcatcccatgaaaatgtcaggtcgtaaggccgggactgataccgcatcgcctcacggtacaattcctgctgctgtgaggcactcagtgactttttcaggcgtttcaccacgtaatggttaccggtaccgcgtgcaatccactgtttcagcggtgtaaagcggactgtgtttgccgcctcatacacatacggcttaccgtcacgcagcagaataatccccatatggctgtagaccgaccctgtcgctttttgtatagcgaggctctgagaggagcgcgaggtatggaaaataatatcgccctgctgcggctgccacgcgtacacggcggaggcaaaaaaacagagcaacagcagacaatgacgcaatacactgatcacagaagtcctccggcatggttaacagccataaaaaaactgcaccggacacaggtcgggtgcagttctgttataccactgaattatcagaaagtataagtcacaccagtccacaggatagaagtgtgttttttgtccaccatcgggctgtctttggcctcacttggtaacagatcaatacggcccatggcgaaggcagaccagttttcatcaaacttataatgaccggtcagctcaacatacggtgtccagctgctgcccggacggtattcatccaggccgctgcggcgggattcagcagcggtgatcccgtattcataacggttctgtttttcgctggaccagattacacccacacccggctggacagaccatttgtcgccctcaaaaccgtaaaggtaagcggcatcaaaacgcataccgtcgcttttacccaggatatctccggagaagttggtacgcagtgttccccactcttcatgatggcggtagctcagcccggccattgcggtatcacggcggttatcaagcttgcgcatacgggaatctttattatctttggcacggtatgcctgcggatagtagaacaggtcaacggacagctgatcttttttgtcattccacagataataaccggtcgctaaggtatgaaaataaaagtttttaccttcatagttaaccatcggaaccggcataaatttgtcagatgtttttgtgccgcggtatgcctgctcctgataaagtacggaagcaccgacagaccattttccgtcgtctgcaaaggcagaggctgacatgacagttaacatactgagactgagcaggccggttaatttcttatgcattatcatttcctgagttaaattcatgtacaaattaccgcaacaaatgtttgcggggcgcatatattacggtgaatgataattcagcgatgataaaaattacaaatatttactgtgctaaatcgtgccaccggtttcagttaagtaatgtcattgccgcgataagtgcctgacctgccgctattccgccatcaccgcatggtaactgacggggttcccgcacctgtctgtggcttaatctgtccttaataaagcgacgcaataaccggttattaaacaccccgccggagagcacgatggtatccgtatttctccgggttgctgtctcatccgccagcccggcaaccgtatttgccagcagtacatgaaaacggaatgctctttccggtattgtcagagcatcatccgccagcatctgccagagcggacgtaaatcaatagtgttatccgcagtcagcggcagtatttcaccggttatattctcatcctgattgtgacactgtaacgcacagttttccagtgcacaggctgcttccccttcccagcttatctgatctgcggttaatcccagcgcacaggccaccgcatcaaacaaacgcccgcaggatgatgctttcggggcattgatgccccgctcaatagctttaatcagcaatgatatattcttcccggcaagctgcgatgtcagaggtgaagacaaccacaaaccggcgtgatgcagatgagccagcaggttccgccacggctgtaccgctgctttgtccccaccaggcagactcaccgccggtaacccgccggtacgggtcatatgacggtaatcacccgccaggatttcaccaccccataatgtgttatctgccccgtatccgaggccgtccagcgctatcccgacgacttcgccatcttcctgacgccagccgtgttctgccagacaggctgcaatatgcgcgtgatgatggtaaaccggtataaacggcacctgatgcgcctgtgccagtgccatacccatctgatgactgatatagccgggatgcgcatccccggcgataaccagtggtttgatctgataaatctgctcaaacagtttcagcgaagcctccagttgcccctgtacggagagatcagccaaatccccgagatgcggcccggtaatcagttgctgatgatgcagcaaacagaaggtatttttcagatcaccgcccagcgccagaaccgcgggcggatttttgccggtcactgcgctgacatcgatagcatccggcacataaccacgggcacgccgcaacacctgaatatctccggcctgataacggacaagggaatcatcagcccgctgaataatttcgcggttatgtaacagaaaagcatcggcaatggaactgagctgctcaaatgccgctgcgtgatccagcgccggagtatggcctgatgcattcccggaggtcataatcagcgggcgctgaatatcatgcagcaacaggtgctgtaacggattagacggcagcataatgccggtttcacacaatcccggcgcgaccagcggagacaatgcggcgatcactcccggttcatctgtcagcacaatcggtgcggcagggcttttcagcagagttatcaggccgggctccggcttctgacctgtgcattctgccagccagtcaacggacggtatcatcaccgcaaatggcttggcagaccggtgtttgcgggctctcagtatggccacagcttcattgttttgtgcatccgccaccagatgaaagccacccagcccctgcatcgccagaattttgccatctttcagtaaacggactgcggctgacagagcatcatcataacgagcggtaatctgctgctgcggatccgtcagccagatatgcggcccgcaatccggacaggcattaggttgcgcgtgaaagcggcgatctgccgggtcacggtattcatgctgacacaccggacaaaacggaaaaaccgacatcgcggtattcggacgatcatacggcattcccctgataatggtgaaacggggcccgcagtgcgtgcagttaataaagggataacggtaacggcggttgccggagtcaaacaattcactcagacaaacatcacaggttgctgcatccgggataatttcggtatccatttccccctgtccgctggcggtgatggtaaatgccgccggacactgttcaaaggtataatactgctgcccgatatggtcgattcgcgccagcggcgggcattgtgcctgtaactgactgataaaaccggcgatatccgcatctaccggaaggtggataagtaccccttcactgtcattgctgacatccccgcacaatcccatctgatgtgctatctgccagacagccggacgaaacccgactccctgaacttttcccttcacccggatttccacacccgcctgcataacgcactcctgcctgatttcaaccggaacagtttactgtgcacagcgtggccgggtatttatcaggatcataaaaacagccggaaagacgtataattacccggcagggatccccggtccccgccgtgccagtgctgtcaataattcatagccgatagtcccggcatattgtgcgacatcatccgccggaagattcgcaccccacaattcaaccggtgtaccgatatccgcctccgggcaatgggtgatatcaactgtcagcatatccatggagatccgtcccgccagcgggcagcgctgaccggcaatccagaccggtgtgccatccggtgcatggcgcggataaccatcagcataaccacaggctatggtggcaatccgcatcggcgctgcggcagtaaaacgactgccgtaacctaccgtttcaccggcttcaatatcatgaacagcaataatttcactgcggagagtcatcgccggtttcaggccgaactctgcaatatccgcactgttgccgccgggtgagacaccatagaggataataccgcagcgcacttcatccgcgcgggtgtccggttcccacatggccgcagcagaatttgccagacactgcggtaagttcagagaactgaacagcgcaatacgcgacatctgtttatgaataccggcggttaaaaccgcatccgcaaaatggctcatcagtgtgatagtgccgacctgcggcaatactgtcaggcgctggagtgcattcaggtacgccgccggtgaaaaacccaaccggttcatgccgctgttcagtttcagatacacattcagcggatgaataaatgatgcttcctctatcgctttaatctgccactcactgtgtacagacgttgacagctgataacggtcaatcagtgacagatcttctggctgaaaaaatccctccagcagcagaaccggcttttgccagcccaatttgcgaaccttcaccgcctcactgaaatccagcagcgcaatgccctccgcctgcgccagtgccggaaaaatccgttcaatgccatgtccgtatgcatccgcttttaccactgcccacacccgggacgggctgacccgctcttttacccgggccagattatagcggacagcttcactgtcaatcacagcctgtatcggacgaggcatagaatcaccgctccttattttgttggttatgcggtatgtaactgctgcgggatcaccagccgggttctgaacccgtccagataacgggatactgccagatcatccgcccggatagccggtttatcgccggacataatatcggcaagcaactgcccgctgccgcaggccattgtccagccgagggtgccgtggccggtattgaggaacagattgctgtacgcagtcggcccgacaatcggggtaccgtccggtgtcatcgggcgcagaccggtccagaatgtggctttgctgatatccccgccgccgccgtaaagatcctgtaccaccattttcaatgtttcgcagcgccgtctgacaatatcaaggttaaaaccaaccacttctgccatgccgccgacacggatacgctggtcaaaacgggtcaccgcaattttgtaggtttcatccagtaccgtggatgcaggagcacggctttcgtcaataatcggcatggtcagagaataacctttcagcggatacaccggaatggcgatatggccgtgcagtaattttgtcgagtatgaccccagcgctaccacatactggtcaccggtgatcacttcctcatcacaaatcaccccgctgacacgatcaccgctgaattgcagacggtgaatattgacaccgaaacggaatttcacgccggcctgctccgccatttccgccagccgtttggtgaacagattacaatccccggtttcatcattcggcagttgcaggccacctgccagcttatgttccgcatgggccagcgccggttctgcctcatgcagttcaccggcactcagcaggcggtacgccacgccttcctgcttcagaactgcaatatcattggctgcattatccagctgtttttgtgtgcggaacagttgcagtgtgccgccctgacgcccctcatactgtattccggtttcggcgcgtaatgctttcatgcagtcacggctgtattccgcaatccgtaccatgcggcttttattcatgacgtaataatcagcaccgcaattgcgcagcatctgccacatccagcgcagctggaacagcgaaccatccggcctgatggccagcggggcatgtttttcaaacatccatttcacggctttcagcggaatacccggagcgccccacggcgtggcataaccgggagagatttgcccggcattaccgaagctggtttcttccgccgccgccggctgcctgtcgataacagtcacatcgtgccctttctgcgcgagataccaggctgttgtgacaccgataacaccacttcccaggatgacaatgttcatgttgccgccttgttatttatttcacattagcatcagcataatatttcagaaacattttgccaacatagcggaatcccctcacgtcatattaagtctgtttctttgctgccggtcacaaaacagtattttttttaatcactgatataattaattaaattatccttttatccgaaaatgattttattatcttgtaatataagcatttgttaaatagtatgcagcctatctgtcgcaggcaccgctgcgaactcatcgcgaaacgcaaccggacacccgtctttgttgccgatgacgccagactgaataaataatccgtatatttacgttacgccggttatttatcagaaaacccctcttcttttttatgccttccggcatattttccggtaataacgatgaatattaaaaaccaacgcaaaaacatcaccctcttacccgatggccgcctcttcagctggtatgattccggcccggaaaccggtacgccggttgtgttctgtactggtgcaggcatgagcggctctgccgggttcggcattccttacctggcagacaataatatccggctgataaccccggatcgtcccgggctcggggattcttctcccgatgccggaaaatccctgaaatcctttgccgcagatgtcacttttctgatgcagtcgctgggttacacccggttcagggcagccggattctctcagggtgcggtttatgccatggcactggcgtattatgcgcaggtttccgcgctggcactgatttccgggcaggatcagttcgattacccgccaacccgggcgctgttatctgctgatatcattgatatgcagaataacgcacggactcagcctgacgggtttaccgcatgggtacgggaaaatatcaccgcagactggctgatgagtttcattctgaattacagcggggaaacagacctggcggtttatcaggcggcagattttttaccggtttaccggcagtgtatggcagaagcattttctcagggaaatgaaggctatacacaggatctgctgattgcaatgcaggaatggggatttacaccggagcaaattacctgtccggtatcgctgtggtacggagaaaaggacaccagtaccgtgcactccccggatggcggcaaaattctggccggacgctttccccgcgcggagcatcatctgtttgcggaagaaggcggctccctgctctggacacagtcacaggcgatattacaggcactggcccgcgcataacaaaaaaccggctcagcgccggtttttcatcatatacagtctgtgttactgcggattcagatcctgtgcaatgccactctgcatggtctgccagatagtaccgctctctttgccgtagctgcggacacaatccagcactttatcataggctttttcgcggcacaggccggtcagctgctgataaaaattccgcgccagtttacgggcttccgggcttgcgaaatagaagcggccgacacgggtgtataaccctttcagaccgttgaggatcagaccgtaaatcgggttaccggaggcaaatgccagaccgcggaagacgtcataatcatactggctgaacgcatcggaattatcatccggttcattttcctgactgagaatttccagtgatttttccggattattgcgaaacgccgtacggataaaaatagaggcaatattggtcctcgctgccagcaggttctcaatcagtttcggcgcgctttcgtgatcgagacgggcaatggtttccaggatattcagtccggatgtttcccagaagttattaatttttgtcggtttaccgtgctgaatcgtcagccagccatctctggcaaggcgttgtaacacttcacgcagggttgtccgggtcacaccaatcagttcagataactcacgctctgcgggtaaaatggatcccggcggaaagcggttattccagatactttcaataatatactcttctgcaaaccccgcagggctctgcgccttgattaccataggtgacttcgtccaaaacaattaaccttccaattatccggatgataacagaatgtgacgctgcgatatagcaatcagcttgcgaaagagtgaatccggtcataaatcacaatggcacaacctgtgaccatcagttgatttaaattcttaataaattcagaataccggcgtagtataaagcactgtagttatacgcggatcatcttttcaccccctgcggaggacacacagcaacaatggaaatatcaatgcggcaggccttcctgaagaacttcatgggtcactcccctgactggtataagcttgctattattctttttttaattataaatccggttgtttacttctttattgacccttttacagccggctggctgctggtcattgagtttattttcacccttgcgatggcgctgaaatgctatccgctgcaacccggcggcctgctggcgattgaggcggtactgatcggcatgacatcgccggcgcaaatcagccatgagattgtgaataaccttgaggttatcctgctgctgatctttatggttgccggtatttactttatgaagcagctgctgctgtttctgtttaccaaactgctcctgtctatccgttccaaacgcgcgctttctcttgctttctgtctggcaagtgcctttttatccgcgtttctggatgcactgacggtgatcgccgtggtgatcagtgtgtctgtcgggttttatgcgatttatcatcagtatgcctcttccggaaaagaaacggtgacgctcagtgatgatgaatttatcgacagcaccgaaaagcgtcagacactggatcagttccgtgccttcctgcgcagtctgatgatgcatgccggtatcggtaccgcactgggcggcgtgatgaccatggtcggtgaaccgcagaacctgattattgccaaacatgccggatgggatttcgtgaatttcttcctgcgcatggcgccggtgacaattccggtgtttgtctgtggtcttctggtctgttacctggtggaacggtttaaactgttcggttacggtgcagaactgccggagcgggtcagagccgtactggaggataatgcacaaaaatccgcggcacgccggaccaaacaggaaaaaatgcagttaattgttcagggccttatcggtatctggctgatcactgcactggccttccatctggccgaagtcgggcttatcggtttatctgtcattattctggcgacggcattctgcgggatcacggaagaacatgctctcggtgaggctttcgaggaagcactgccgtttaccgcactactgactgtgtttttctccgtcgttgcggtaattgttgaccagaaattattcacaccgtttatccagttcgttctcagttcggatccgtcgtcgcagttgtcgctgttctatctgttcaacggcctgctctcggcggtctctgataacgtctttgtcggcacggtgtatatcaatgaggcaatgacagcgatgaaagccggactggtatcctatacacagtatgaatatctggccgttgctatcaataccgggacaaacctgccgtcggtggcaacaccaaacggtcaggcggcattcctgttcctgctgacttccgcactggcaccgctgatccggctttcctacggaaaaatggtgataatggcgctgccttacaccatcgtgatgacactggtcggtttcttcggtgttgaattatggctggtaccggtttcagaatggatggctgccaatggtgtgattacactgccgtaaccacctttttacactgcactaaccggaataacagtgttattccggtttttttatttctgcccgccgtaaatgcggaaaaggggtgcgctgctgtattttttatcgtacagtcgctgcgttagttaatctgtttcttattaatcggataacccggatacaattatgctgacttatctttatgagtgttcgcggggccgcagtgcatggtttttactgatgatctccgcactggcactcgacggtatcgccctgttctttcagcacggaatgggattacagccgtgtgtgatgtgtatttatgaacgtattgccgtcttgggcattgcatttgccggattcctcggctggatagcgccgcgcagcgccatcatccgctggctggctatagccctgtggatttacagcgggattgccggattacagctgtcatgggaacacaccatgatccagctctacccgtctccgttcaatacctgtgatttctttgtgaatttcccggaatggctgccactcaacacctggcttccgtcagtgttcgaagcatccggtgactgtgccgttcagcaatgggtgttcctgaaactggatatgccgcagtggcttatcggtatctttgctgtgtatctgctgatcagtgcgctggtattattatcccagttcattcaccgcaaacagccgcgtcgcctgttctgatcttactcagtcaataacagccgcgctgtcttaacgcggctgttccggacatccctcacaataccgacccgcaacttccggaaagcagtgactgctggctgcagcgtttgccgttggcaaactgacaccccggtgtctgtgcgccgttcagctcgcggataagtgacggcgttccgcctgcatagctgcagctggcacgggcatcttcggttaaatcaattaacggctgctgatagcgcgggatctgtttctgctgcaccgtatccggtgaactgctgcaacccgcagcaaaagccgctgccgcaacaataacactgcacaatacccgccccgggcggcggaaaaatggaactgatatcatgattatggcctcatagctgcggatacagctcagtgaacactgcttttcgagaataaatttatcactaatacacccgcaataatgagagccatcccgataactgcgggtaaatccagtttctggtgatagataaaataagcggcggcagagacaatcacgatccccattccggaccagatagcatacgctatccccagcggcatcatccgcaccacctgagacagtgcccagaacgacacacaatagccgataaccaccacgaccgacggtatcagccgggtaaaaccatccgccgcccgtaacattgaggtcgccaccacttccgcacccacggccagtgtcagccacaataaaccattcataaatcacccgttcatatctttatcactcagtaaggcggatattataaagaaatcagaaaaaaaatcccgcagcgaaacggtgcgggatatgattaatttatgacggattatgcgaggtaatacggctctccgctttcggcctttgtataaacaaggcccggtaacggctgaaaacaaacagtgagataagcacacccgccacagcaaataccgccccggcataacctatctgttccattcccatatgaataatcacctgattaccgagcagcgccccgccgccgatgccgatattaaaaatgcccgaataaacagacatcgccaggtcggtggcatccggtgacaaatcaatcactttgacctgtaatcccagcgcggtacacatcataccgatcccccagacaatcccgaggataatcagcgcggtatcggtcacgcggctggtcatcagcagcatcagacagactgtcagtaatgttatcgccgcaggcagaaacagcagcggcaaccgggtattgtaacggctgaaaatgacactgccgataatccccgccgccccgaaaatcagcagaaacagcgtggcgaaatcctgtgacttcccggcaacggtctgcacaaacggctcaatatagttataagcagtgaaatgcccggttaccacaatcgcggtcagtacaaaaattcccactaacgccggtcgtctgaacaaaaccggaatacttttcagggagccggaatgctcactcggcagcagcggaagaaaacgtgccatcgccgccatggtgattaacgccaggccgccgatacagaagaacgtcatccgccagccgacccactgcccgataacacggccaatcggcagccccagcacggttgccagcgccgtaccggtcgccagcagtcccagtgcctgggattttttaccgggcggagccaccctgacagccagagacgcggtgatcgaccagaacaccgcatgtgccagtgcgacaccgatccggctgaccaccagcacatcaaaacgctgcgccagcccggacactatgtggcttaccacaaatacggtaaacagccagagcagtaatttgcgccgctcaatacgcgccgtcagcagcatcagcggcagcgacgtcagcgctaccacccaggcataaatggtgatcatcagtccggtctctgcgggctgcatcgaaaaacccgccgagatatcactcagcagtgcaaccggaataaattcagtggtattaaatacaaatgccgccaccgcaagtaccatcacccgcagccaggcctgatttcgtgacagggtttcagtcattatggtcccccgtaaagaaaagctgtatcgatacagcttttgagcaaaaaagtgtgaccatggtaacacatgtggttttcacgggaaacgagggaacagaagcaaatgcccggcatcagcgccgggcaaacgcattataacgcgcgttttgactgttccgggatggcatcaaaaatcgcttttaactgcgcttttttcagtgtcggcccgacaatacggacacggcggctgtttgccggatgatagctcagaatataagagtccgtggaaaacgagaccattaacgctttcagccccttcacttcctgcagggaaaaatggccgccgtcaaacggcattgccaccactttaccgaccgcgattttggatgtcagtttatcaccgtacactttaatcaccgggaactgtgcgatatagacatacaccgtcagacccagtgcggcagccacacccggcatccgtgtctgaaataagtacgccagtgcgatataaagcacaataaccacaaagaatgtaatgatacaggtgataattctgcgtttctgatcaacctgatataccgtttctgctgaactcataacccatcctgttgctgaatttccgctgccggaaaaataaaaaaactcaaggccggacagaataacgaaaataccggcgattgacagtaacattccggaaaaaaatcattcctgcgtactctgcggaaatcacggaaaacgagggtttacaatccggcatttatttgacaccattgccgcagttcatttcccctgaggatgtctgccgacatgatttaattgcctgaatcccattgctgtatcatccgcatttttactaatgcgctgttttgatatcgggcaggcagctatcctcgtcatcgttttcttttttatccggcatatccgcctgcccctgtttattcaggagcttttgtatgtccgtacaatgccatttttctcacttatcagtgacatttaacgatattccgctgtttgacaacatcagcggtacattaacccgtcaggttcaggggctgaccggccataacgggcgcggtaaatccgtactgatgtcgctgctcgcgcagcagcgacaaccggcctccggtaccgtcagctggcaggtgccgttttattatgtgccgcagctgacccgcctttccggcatcacactggcggatgcactcggaaccgcagaaattctggccgcactgcgccgcacagaggacggtactgccaccgcagaggattatgattttctggccgataaatgggatatgccacgacagcagcagtccctgctggaaagtgcgcagctggcgcatctcccggcggacaccctctgtacaagtctgagcggcggtgagcaaacccggctggcactctgccgtgcctttttacagccgcgcgccttcctgttactcgatgaacccggaaaccatctggatgccgccggacgccgctggctgagtgagcaactgcggaatcatccggccggcgcactggtgatcagccacgagcgccgcttgctcgacaccatgcagcggatttttgaactcacgccgtccgcactggaagagtacggcggtaattacacccattatgcggagcagaaagcctttcagatcagcgcattacagagtgaggagaagcaattacagtcacagctgaacaaagaaaaaacggagttgcagcgcacactggaaaagaaagcacagcgccgccgtcagggcgagaaagtgcgttcatccggctcctcctctgccctgctgctggatatgaaaaagaacaaagcggagaagcagcaatcaaaaataaccggccgtcatgaccgggttatgactcagctggacagccagcgccgggaagtaaatgagaaaatacagcatatcaccccgcagatgctggcctttaattataccggagagcaaaaacgggtgcggatcaatacccgtgatctgattttgccgttcggcacacaagagccgctgtcactgactatttccggtggtgaacactggcatattgccgggcgcaacggttgcggaaaatccacattactgaaagtactggcgggcctgctcactgccaaatccgaagattactccctgcacggccgtctgcggtatctggatcagcacctggcgctgctgaataaagacctgccggttacagaagcgctgtgtgagtttgatccggccattccggcacaaacctggcgcacccatctcggggcattgcggatcaggggtgataaggggttaattccgctgtcacaattaagcggcggtgaacagctgaaagtcacactgctggcattaacattatccgaacctttgccggatattttgttgctggatgaaccggataaccacctggatctcgattcccggttattactggaaaatgtgctgcgcagttataaaggggcattattactggtcagtcatgatgaggcatttactgaacattgtgccattacccatacactgaccttagcctgaaaaaagaatacggcggtaattccgccgtattgctacagtttacagatattcacgataacataacgtgccgcgttaatattatgctttgccgcatcggcggcagcggcattattaaacagcgcgataaaacgttccgcttccgttctgctgatatcagtattaatagccacatggctgcggaataataccgagccggttaaccccagaccttcataacacacaatatatttatccatatccttctgaattccctgcgatgatatctatttactatcatagtgtgtattgccggccggggttatcagtatttccttaaactgccggacagtgctgttattttaacgcccgcccttctttggcacccagcggggtatgaagctgtgacggcacaaatacaccggtgctgtcattacgtccctgcaataatactttggcgtctttctgaccatgctctttaactgcctgttttgataactgcccgataatggtatccggtgaacgcagacggttaataatcagcaccacctccgtatccgggaagtcagacatcatattctggtcgccttcactgtcaccagcaactaataacggccctttaccggcatatttatcctgaataaacttgcggatagtctctgttttccctttaccctgagtctgcggataaaccggatccagatcggatgtcagtttgttatctttggtgcgcagtaaatgcatggcaaatacctgtgactccggtacagaatacggtggttgcgtgacaattgatttaatcacttccaggttcgacgcggaaatcacatagacatcaataccggatttttgcagcacctgatacaagtcctgcatttccggcaccagacggaaaccattatgccagtcaatttcaacaatacccgcctgtcccggtaacgattcagggctttcccataccacgccttcaaccggctctgatttctgccattcaatggtcttggcggtaatatccgccacctgctccggtgtcatattcataaataaataggtgacccacggataggaaacggcatgatcaaatgtgccgccgattgccgcatataaatagcgcattttggtgatgaaattctgataatgcggcgattttttaatttcagacagcggcttatcacccttcaggccatcatagttgtcatacagccactggtagctttccagaatatcggcaccgaccttctcaatattgaccggtttaccgtctttattgttgaactcagcggaaaaattaccggccggaatatctttgaaaataacggatttcagttcctgtggtgtcatggcaaataacagatgctcaagctgatagatcatcaccgcttcttcgatatccagaaatgccgtggtgttatcaaagtcaaacaccgcataataggtatgtgccggtgactgttttgctttggcgatcatggcatccaggcgctgtttattaaaactgtcccactgcccctgctgtaacaccgctatttctgtcacagcctgcggtgctacggtggtattcagggaaactgtctcagcctgtgcagccatattcagtgacaacataccaactgccagtgcaattgcactgtaacgattaataaatttcattgataatcccctttgaaataaaaaaactaataaaagggataccacaggctatttttttgctatatcaaaaatcagcaacggatgacattaagcgaaactgatcacattcttttaccgggtccgttccgtcggttacgtgatattatcatgccagtcacaaaccggttatttacagcggataaattcatgagtaatcattttgatggtaaatacgaagcggaaataaaatatcgcctggctgatcatagcgcttttttgtcgcaattaagcacaatgcatgcagagccttttgtggtaaataacgaagaaacagactggtttttcgatacgccgcaaacgcatctggcagacggcaatgtcagtatgtcggtcagaacaatgacaccctcgggtattaagctgtggatagtgaaaggccccgccgccagcgaatgcaaagctatcaatattgatgaccatgagcatgtcagaaatatgctgctgacgctgggttaccgctgcacaatgacattaaccaaaacccgcagtgtctggtttctcggtgatattcatatcacactggatcatattaacggcgcaggctggtttgccgagtttgccattatgacgcacgatgaaaccaaattagcagaatacagggaacggctgcgggagaaagccgcagaatttggtctgacagacgatatgattgaaaaacagagttataaacaactggttagtgcaatgcagaaaaacagctgtaacgcggaataaataaaaaacggtgctgaatcatagtgataatattcagcaccgcaagtacctgtttatttcagtgtatacatggtcagcacagtataagtgacatctttttcatcatttatctgtaccagattggcattactgaccacacccaccacaacctcggtatcttctgattcatatttgcgcttaaactgcccgatttttcctttggcaacttttgccaggaacggcgttttgcgatcatattcttcatttatcccggccggtttgccgtagattttctccatttccgcattcactttatcgtactcattcagtaatgcggcctgatcatggctccagacaccgaagcgggatattgcatttaatttttgcccttcaggtgaaaagaccatcataaagaattgcttttcaacctccggtgatgccagtgagctgcataattgcccgccatcacgggtttttgtgcagtcaaaatcgtccagattcagggcttttaattctgcgggcgtctgcccccatgtaaagccccagggtgcttccggtgttttacttcctgtacctgcgcagccggataataatgcggccataatccctgacagaataaattttctcattgccccgcccgtatacattgagttacttattactgatcataccaaagaccggcaagtgaccagaagccttactgtcgctttattcatcaaaatcagatttgatgaagatgttactgcgtaattatacgctttattcagcagatatccggtatatatacccggagccgcacgatttaatcagccaggcggatatcaagcacccgcagcagattcagggcttcgtatgcggaaaatgtggctttggcagttttgttttcacggatatcgatataaaaagagtgggaaccggaaaaatccgccccttccagattagtgtgcataaacagtgtgtcggttaaatcgcagtcatgcataacggatttgttcagctccgcctgtctgaaatccgcattatggatccggcaagactcaaagtgcgactcatgcaatctgaggtcaaaaaagttattactgtccaaaatgcactctttgaacaccaactgagaataaaaatcaaacttcggccagtatgcttttgtccagtcaataccaatcattttcgttccggtaaattcagtgccggaaaaccgggtttccggaacggccagcagactcatattgcactgctcaaacacacagtcagtgaaacgacactgctgcgcaaccgccgagctgaaatcacagcggataaaagtgcagtcctcaaacaccacactacggattgtctgctcactgagatcggctttttcaaaccggctgccggtatattcatgattattctcaataactgtcattatccctctcccccggtgtgttgttttattctcagctgttccctgtaaatctcctgattttcacggatagtatttactgtgctgtttttataagggtcatcgagattcttttcatatttttccggttgtgtacccggtgaaacacatccggacagaatcagtacaataaacaggcccggtatttttttagtcactctgttattccttttaataatatggctacgtgaataaacggatattacgcaccaatacgtaatctgtattggtataatttgaccattttacacaacattcagattattctaccttttaaaaaaagggaaatgctgtaaaccttcacaccagcataaatcatatgattttcgtagatgaggtaagtatgtctgtcagcaataagactgtttattctgtatgctccagattaaccctgatggttatgaagctgaccggccttgagcgggttattactgtcggtcagtattttgagcgggcaacagataaatcactccttcagcgactgattgaagaaaacagagatctcagcacaccgttctcagcactggataaatcaaacaaggactgcaaaattgagctgattgaatatctgaatacggcaatccgtgaatacgccgcatccgaaataaaggaaaactacgctgcactgaaaaacggtaatctgctggttgtaaaaacattcaatacaattatgcaaaatcacgcttaaattttatccgttatcatggctgtcacggggatctgttgtcagccatgacatatattccggtgaccttactgatgcattgaatgattaaaagaaggtaataacgaataatatcgcaggtttttattgctcccacctcaaatagttgcattgttgttataattgtttccgtttggatataaacaagcgtttaatttttcctcttcataacgaattatcatttttaataaacaatgctccggtatgaacggaaaagaacaaaaagagaatatcattatcaacacaatgaaataaaagatatttttgagttaatcatgactcataaaagtaaagaaaaacaaaacattaagatattaaaactaaagatattgatgcttttgccgttatcttttcgatcccccggcggatatctgatttttacaattacacatctttttgtgacgaacagaaacaccggggcacacacctggtaaatctattggttttacttattgctatataattacctgctcaaagacatactgatgtcgtaaactctgatatattccattattataattacaaaaagaatatcatcatattgttcatcccccggcaaaacccgcaaaatgtgtataactacaccatgaaagtgttatttatcccgccgtcgggcaatgcttttatttttttcttaaaaatcaaacaaatacacaatgagtcagactaacactttcctttcttatacacattgcagtatctgtatattttcagtttttaattttactttttattttttttgtacatttttattgcgaattttatttattgacaaccattatagggcttgcatattatgcacaatatactgtttttgccttgcagatatttcctataatagtatttaaaatatacattaagtttaatgacgtcctgatggtatctttatgcagcccgataattgccacgcacttagttgtcaacaccaggtctttaaaaaggagcttcatgcagttataggccaggaaattaaaatattacgaaaatcaaaaggtatcaccggccatgagttaggttcaatagtacagttatcgcagcagcagatatcccgttacgagaatggtgacagtgctattccgctggatacactgatattaatactgcgtatttttaatatatcgccggagaaatttatacacagagtattatttatcttaaacagagacccggattcaaaaaagctattatcccatatgtcgaatcatcttaattcttatactgacggaagttatctgggaacatttgaacaatataaacacaattaacataattactatatttaagattacacacagcttttaatttaagggcatagcatatgaatgagagagaaatcagcctctttatcggtcagcaaatttcacggaaaagaaaatcgctgggattatcaggtatggcgcttgccgaattactgggtttaagccagcagcaaatatcccgctatgaacagggcattaccaatataagagccagtacattactgcaaatcgcttttttgtttaatgttgacgtaaaaagtttttttactgactgtattgaaaaaaacagcaaactgagttcacttaactataaagagaaaaagagtcaggaaacagactatgacacgatcactattgatatgaagaacagaggaaggggtaaaatccgcagtaaaaaataacccctccggaaagtaccaacagcccgcccccgtcatcccggatcattccgttccgggctgtcatcctttttaatccatacgtatccgaatcccctgtccttctgctatcattgcgtccttatttcagatttccgttgccgtgcggccggcctgacacaggcaccagccaaacccgttaagaacagtaagacatgaatacaccgaaagaacagtacaacatcaataaattgcaaaagcgcctgcgcagccataccggcaaagcgatcgcagattttaatatgattgaggacggcgaccgcatcatggtttgcctgtccggcggcaaagacagttacaccctgctttccattctgcagagcctgcagcagagcgccccaatccgtttttccctggtggcggtgaatctcgatcagaagcaaccgggtttcccggagcatattttgccggaatatctggaaaaactgggtgttgaatacaaaatcgtcgaagaaaatacctacgggattgtgaaagagaaaattccggaagggaaaaccacctgttccctctgctcccgtctgcgccggggtattttataccgcaccgcgactgagctgggtgcaacaaaaattgcccttggccaccaccgcgacgatattctgcagactctgttcctgaatatgttttacggcggcaaactcaaaggcatgccgccgaagctgatgagtgacgacggtaaacatgtggtgatccgcccgctggcctattgccgcgagaaagatattgagcgtttcgccgaagccaaagggttcccgatcattccgtgtaacctgtgtggctctcagccgaacctccagcgtcaggttatcaaagatctgctgcgcgactgggataaacgctatccgggccggattgaaaccatgttccgcgccacacagaatgtcgtaccatcacatttatgtgacactgaattattcgatttcaaatctatccatcacggcagtgaagtcgtcgacggtggtgatctcgcatttgaccgcgaaactctgcctgttcagccggtatgggaagatgaggatgatgacggcgaaagcccggatttcacagaattacgtctggatgtgacggaagtgaaataatcattctgtcatagtgccgtgccacggagggtacggcctgaatattatctggtttgtttcaggcaaaaaaaaaccgatgtataaaatacaccggcatgataatggtcaatattctgtataagaactcaatatgagaaaaactacaattatggagcacaacgttcatcgctcaacgttgtattcacctgcgggagtaatagtgccctaaccgggcgtggtatttcttgatatagctcaagtccggtacgtaaaatcatataaaaatacacgtttttacaaccagttactcttacgtaaccaccaggcaacaaatccgataacacccgccagtcccacacagaacaaactgaaagcaaacgggaaatcgccccccgggatcccgccgaggttgaccccgaacaatccggtcagaaaggttgtcggcagaaaaaccatcgccagcagtgacatggtgtaagtacgccggttcatggcatccgccatcatattggtgatttcatccgaaataaccgatgtccgcgcgatacaggagtcaatatcgtcaataatccgccccaggcggtcactgacatccgtcagctgatgtctgtcctgctctgagagccaggtgtaacgctcggaggccagccgggaaaacacatcgcgctgcggtgccatgtagcggcgcaggacaatcagctgcttgcgcagcagtgccagctccccgcgggccggaatatgctgatcgagtatcgcatcttccatatcaatcagggtatcgtgtaagtcctcaataaaatctgccacttcgtcggtgatgcagaacgccgcttcagccagccattctccggtattttttgcaccttcaccgttttgtaaatcatcctgaatggtctgaatggaatgcactttacggtggcgggtggagataatataactgccgcagatccagatacggaatgccaccagttgatcaggccggtcgccgtcattattgttgatggtttgcagggtaattaatgcaccctcaccaatacggagtgtcctggggcggataacattgtttgtcagcccgtcacgcgcctgcggcggcaacagttccgtttcacgcagccagcgctggttatccgcggataaatagtccaggtgcagccacaccggttcttttatcccggcaacggcgttgacatccaccggcgtacaaccgccctctccgtcaaactgcacccggcagatgggatctgttccctgaaaagcggatccgtacaaagcgctcatgcgtctctccccattgtccgtgaaaacagctgctgagtgtgttcagccggttcctgcagccgtccgcagcaggaaccggaggcaggcttagtgtttaataatatagagattatgactgtatgccacatcttccggattattgaccggatatcccttcagccacggtttaatcaggcggccgttggtgtactggtagattggtgctatcggcatgtcttccgccagcagtttttcggcgtcgttatagtcggtattacgggcgttatcatccgtttccagcgcagcagttttcagcagagcatcatatttttcattatgatactgcgcgatattgccgctgtgtgtgctggtcagcagagacaggaaggttgacggctcgttgtaatccccgacccaggaggcgcggatcacatcaaaattgccggtattgcggctgtcgatataggttttccattcctgattgaccagtttcacttccgcacccagttttttcttccacatagaaccgacggcaatggcaattttctggtggttttccgagctgttatacagcagggataatttcagcggattgtgcgggccgtaaccggcagcggccagcagggtttttgcctgactgtccagttcctgctgggtgaatttctgatacagcccggtttccggggtaaacccggcggtgacatccggcgtgaaatgccaggccggtttttcgcccgtacccagcactttctctgcgatcaccgcgcggtcaatggtcatggaaagcgcctgccgcacacgcgggtcatttgtcggcgcacgctgtgtgttaaaggcgtaataataggtgccgagctgatccgggatataaatctgatccggaatcgcctgtttcagtttctgatactggtttttcgggaaagactctgtgatatcgaggtcattggacagatagcgtttggtggcctgggattcatggttaatcggcacaaaggtaaccgatgtcagtaccgtgtgtttgtgatcccagtaatacgggttcggtgtcagaacaattttttcattcactacccgatcatgcaggacaaatgccccgttgccgaccagatgcccggtgcggatccagctgtctccatatttctcaacagcggcacgattgaccggaaaaaggctgaaattggcagccaggctcgggaagtacggcacagggcggtctaacgtgacccgcagagtccggctgtcagcagcttcaacgccgagggtttccggcagcattttaccgtcgataatcgcctgtgcatttttaatgccggccagtggcgcaaaccaggcgaaggtagagagattttgcgggtcccccagccgctgccagctgtagacaaagtcctgtgcggtcaccggtgagccgtctgaccagcgggcatcgtcacgcaggcggaatgtccatacctgattgttgcgggtctcccaggagagagcgacaccgggcaccggtttgccgtccgcaccctggctggtcagcccttcaaataaatcacgcaggatctgggcttcggtcagcccgaccgctttaatcgggtccagggacgcgggttcatccttcagatgacgataaacagattgttcttttgccagctgtgttcctgcggggatctccgccgccgttgcacaaaacagtgaagaaaacgtgaaaaacgtcccggcaagaagtgcggaacgggaaaattttgctggcctgaacataacgggcgccttgtattaaaaatggtaaaccgatagattatctgatgattaccgaaacacaacaaccggatattacatttttattaacgatatccggtgagaaaacacctgccaggtattatttataccaacaattatgagcccgttcagaggatgataaaaatgacacaaactgtaaaacttcagggtaatgatgttctggtttacggcgcactgctgcgtgccggcgaaaaagccgtaccatttaaattagtcgctaatgatttgtcagatgtccagctcaccaaattcgccgggaagcgtaagattctgaatattttcccgagtgtggacaccggtgtctgcgccgcctccgtgcgcaaattcaatgaaactgccgcaaaactgtccaataccgtggtgttatgtatttccgctgatctgccgttcgcgcagtcccgtttctgcggtgcggaaggtattgagaatgtggtgatgctctctaccctgcgtgatccggaattccgtgagaattacggtgtcggtatcggcagcggcccgctggccggtctgtgcgcccgtgcggtgatcgtactggatgagaatgatactgtgatttacagccagctggtcggtgaaatcaccgaagaaccggattatgacagcgcactgaatgcactgaaataagttacccgtatctgtaaaaaaaaccccgctgccggtgacggtcgcggggttattttttaccggggaaagaattattcttcctccccctcatcgtcttttgccgcaccgcgccgctgactcagcccgtattcgcgcagtttattggcgatcgcggtatgtgagacattcaggcgtttcgccagcttacgggtgctcggataatggcggtaaagccgtgtcagtacagagcactcaaaccgtttggtgatatcatccagcgagccgctgaggatatcctcactgaaaccgatttccgcttccagttccggcagaacgatgtcctgcggacgcagcagcgagccttccagcgaagagagcgcctgataaatcacattgcgcagctggcggacgttacccggccagtgataagcacaaaggaactgccccagttccggcgccaggcgcggttcttcacagccctgctcttcggaaaagcgtttcacgaaatcgcgggtcagcggcagaatatcttcctgatgctcacgcaacggcggaatagtcagcgtcagcacattgaggcggtaatagagatcctcacggaatttgccctctttcaccagctccagcagatttttctgggtcgcacagataacccgcacatccacttttacctcatgctcttccccgacacggcggaatgtgccgtcattcaggaaacgcagcagtttaatctgcatctgcggggacatttccgcgatttcatccagcagaacggtgccgccgttggcctgctcaaagaagccttttttcggttcagtgctgttggcgtaagctccggcggcgtaaccgaacagttcagtttccaccacatcatccggcatcgaggcacagttcagcccgaggaacggctgattgccgcgcacactgtagagatgacaggctttggcaaacacatctttcccggtcccggtttcaccgaccagtaacagcggggaatccatttttgccatgcgctgtgcctgttcgaccacatggcgcattttggcgcttttcgccaccaaatcatcaaaactgccggaatgcatcacctgcatacggcgtttctgtccgttaccgccctcactgacagtgcgcagcagcacaactgcaccgatagtggcggaggcgtcatctttctcatcaaaattaatcggcgtcacactcagggtataagagcggcctttgagactgatggtttccttgtacggcgcaggttcttcatcctcaatccagcgggtgaagttgaactggctgaaatagtaagtgatattgcgctgacggatgcgctcttcggtggtggcaaacagggagagtgccgcgctgttggccagttcaatgttcccgcgcagatcgagggataaaatcgggtcttccagggattcgagtaatgcccacatggcgcgctgttcgcgctcagacggcataaagtgaacagttctgacatccaccacgccctgaatccggcggatctcagccatcagagactggaacacagaaaaatcgatctgcatgaaattgaggtatatccggccattccgggcaatttcgatgcctttgaggtcgatattttgtaataccagcagatccaataactcccgcgtcagtccgattcggtcctggcaaattacttccaatcgcatcgttacgatcctatttacacttaagttattattttcccgttaattgaaactgattttacggtataaaatgaaaactgtcacgatttgttgacacaataaatgcgttcctgcggtgtttatccacagttccgtgtgaaaaggcaatgaaagtacagatatgtcagtcggttaacgaagctttattcagcgcggacggcaaaccgcgccggagaggtgatacagtgacccgcagggagcatagcgggatcgccgtgaaaaaaacagtgaccgggcaccggtttctgcataaaaaagccggatgacatcacaaaatgcgcatccggtcgggatattggctacgaggtagatttttccgcactcttcccttttggtacagcctgtttaagctgctgtaacaactgtttacggaaatccatgagtttaggtttatctgttgcagtccacggcagcggacggcacagttccatcgctttgatccccagacgggcggtcagcagtccggctcccatgccctgtgcggcacgggcggataaccgtgcggtgatgtcctgggagagccagtccatccccacttcgcggataagttcggatgcccctgcgaaggcaatattgagcaaaaccagtttaaacagacgcaggcggctgtaatatcccagctcaataccgtagatagccgccacctggttgatcagccggatattacgccaggcaataaaggccatatccaccagcgccagcgggctgacggcaatcatcagcgcagattccgccgcgaaacggctgatcacccggcgcgcttgttcatccgttaccggctgaacaagctggctgtacagggtcaccacttcgcggtcattaaggctgctctgtaacaggctctgccattgctgtaacgcaggatggtgtgacgggatattggcctgtttcgccagtttttcacaaaatgcacgtccgtcaccgatacggtggctttgcagcagttcctctgcggcctcgcgctctgtagcccgctggcgcaggcggtacatacgccgccattccgtgataaccgatccggcagcggcaatcagcaccagaaaggtggcggcaatcccgccgagggctgtccagtcattacctgtccaggcatcattcacccactgaatcagttgtgcaacggcgctgatccccagcaatccgcccgcgacaaagaccagtttacgccacaggctgcgccggggtttcagcgcctgaatcagcaaagcttctgcttccccgtctgtatcctgttctgccgtgaattccgtgcgttcaaactgtatgctgtcatcgtccgtaaactgttgcgccggttttatggtgtcctgtagcggcggcgacagcggtgcttcctcaaaatcaatacgggatttgataggctcactcatgacagtttatctcccagtaaaaattccatcgcactgtccatccggatatgcggcagcggcgtatccatccgcatcggtaatggcctgaaggactcaaactgaaacccctgctgctgccagaagtctgcatccggcagccgtttcggtacttcgccgggatagaaagtcagcggggtattatctgccagccgggtgcctttcagcgcgggcattttttccccgttgtgcatcaccatgccgtattccgtggcctgtaccgacgccagcccggtgcagtccattttaattccctcaaaagcggcctgctgccaggctgactgcgtcagctgctgaagcagtgccacaagattggcgtgctggtcggcagtgacatgatccgctttgctggcggcgaacagcagtttgtcgatacagggggaaaacaggcggcgcaataatgtgcgtttgccgtaatggaagctctgcatcagctgggtcagcgccagacgcatatccgtaaatgcctgcggcccgctgttgagcggggtcaggcaatccaccagcacaatctggcggtcgaaatgctggaaataatgcttatagaaacctttgaccacatggtcacaatagtactgatagcgatcgcgcagcatgccgagaacactgctttttgccgctttagccagccgggacggatccggcatcagatcggtaataaacgggaaaaactgcaaccccggtgcaccggccatatcccccggcagcacaaatcgtccgggctggataaagtggaatcccgccgctttacagcggtgcaggtaatcggtataggcctgcgcaatagcggccagctgctgttcatccgcctgggcatccgggtccagctgacggcacagtgccagccatggctccgcccattcgccccgctcacctttgagcagggttttcatctgctgcgaccaggtgaggtaatcctgttccagcatcggcaaatccagcagccactcccccggataatcaacgatttccagatagagcgtggaggtttccttaaagtgacgcagcagactgtcctgagtacggtagcgcagtttcaggcggatttcgctgacaccgcgtgtcggcaccggccagtccggcggtgtgccgtacagcgaggccagtccttcatcataggcaaagcgcggcacgcccaggtcccgctgcggaatgcgtttcacaccgagaatgcggccgtcacgggcggccgaaaacagcggcagacgcgcaccgctctgtacattcatcagctgattaacaaacgaggtaataaacgcggtcttgccgctgcggctcagtccggtaacggcaagacgaagatgacgatccagcccccggttgacgagggcgctcagctcattttgcagtcgtttcataattctccggtgtaaaacggccaatcacttttttcataccggcacggataacaggttccagtaccagtattgccgccccgcgcagagcaggacgggtaaccgatttcagaatcaccgcggcaatacctccgggtgctgccgccagtgctgcggtggttaacagctgcgccccggtttttccggcacgcagcagggtgtgtttatccggccacttcatactgttctccgtctgacagattacaggtcacggaagcggcggttgagcgcatactgttctgaggtcacatagcgctcaatgtcgcggatccgtttttcggtacgcgcctggctgcgttctgtctgttcaagcagcatggccgcattcactccgccgtcgcggccggggtaatcacgcggcaccaccggcagaatcattcccatcagaatatagagggtaatagtcagccagaaaaagccggtaaatgttgccaccaccgcgataatgcggatcatccaggccggtacatcaaaatagttggcaataccggcacatacgccccggaacataccttcatccggatagcggtacagtttacgtgactgaaattccattatgattgcctccagcccggattttccgcatccagaatcgcttccagagttttgatccgcgcttccatctgctgagcattctccgccagcgccgcaaggcggcgggtttcaaattcaccggcccggcttccccgctgactgttatagtgcagccataaccagatcggcagcacgaacaacacgaaaattgtcagtggtatacctaaaaatacaaatgccatatttttgtccttaatggtattaattcaggaaagcctgttaccgaccttattcgcccttttcttctttttcaagacgtgctttgatggccgcgatttgcgcgctgatctcatcttccgctttcagctcggcaaactgctgttccagtgatttttctttccccagaccatagcttgcggcctcaccttccatatggtcaatccgcgcctcaaactgctcgaaacgggccattgcctcatccatccggccgctgtcaagctgacggcgcaccgcacgggatgattttgccgcttcgtgacgcaccaccattgattgctggcgggcacgggtttcagtcagtttttgttccagttcgttaatttcatttttcaggcgggcgatagtttcgtccagaataatcagctcatgacgcagtgtatcgacatggccttccacgcgctgtttttccagcagtgcggcgcgggccagatcttcttttcctttgacaatcgccagttccgctttttcctgccagtcactcacctgacgctcaccactttcaatctgacgtgacagatttttgcgttccgccagggtacgggcagaggtggagcggatttccaccagcatatcttccatttcctgaatcatcaggcggatcattttctgcggatcttccgctttatccagcagtgatgcaacgttggcgttaatgatatcggcaaaacgtgaaaagattcccatgattgatgtccttttatcagcagttatgtcttatgacacgttcactattacaatatgtgtgccaactccgtgattttctttacccgtttgttttttctcaggtttatttatttcccttttgtcatgactttttgtaaagtggttatattcgccatttagtggtcaaattaatcatgaaaaataatacagaaaccctgatcggtattgataatacctttctcgatgcactggaaaaagtgtcgcggctggcaaaaattgcccggccggtactgatttgcggagaacggggcaccggtaaagaattatttgctcaccgtcttcattatctctctccccgctgggatgagccatttattgcgctgaattgtgcggcacttaacgataatttgctcgattccgagctgttcggacatgaatccggggcttttacgggggctcagcgccgccatcagggccgttttgagagagcggacggcggcacactgtttcttgatgaactgggtactgcgccgctgaccgtgcaggaaaagctgctgcgggtaattgaatacggggaatttgagcgtgtcggcggacagcagaccctgaaagcagatgtaaggattgtctgcgccaccaatgcggatttaccggcgctggcggcagaggggaaattccgcgccgatttactcgaccggctggcttttgatgtcgtcaatatcccgccgctgcgcgagcgcccgcgcgacctggccgagcttgccggtcattttgccgtgcagatgtgtcaggagatgggcacaccgttttttgccggtttttccccgcacgccctgcaacagatgcaaagctatcactggccgggcaatatccgtgagctgaaaaatgtgattgagcgatctttgtaccgtcagggagataccaccgaactgctggcagaactggtgatcaacccgtttgtcaccgtgccggctccttcagcggacacggaagcacaggctctgccgccgctgccgttctccctgaagcagtggcagcacacacaggagaaggacgcgctggatgcagcattacagcgcgcgcagtttaatcagcgggaagcagcacaattgctgaatctgacctatcatcagtttcgcggattactgaaaaaacatgccggtggcccgcaaccggattaaatgcttccgtttttggttagtcgcacaaattgcgatacaatgccctgttcatttttaacggtaactgatttatgcgccattggattatccgggcctgtgcggttctcctgcctgtttcaggctttgccgccgcacccgccccgcagacagaccagccggtaaaaccggtcacggctcaggccgctccgctgccgccggtccgcgataccggttttgtctattgtgtgaacggtaacgtcagtacatttaacccgcagctggccagcagcgggctgattgtcgagccgctggcagcacagatttatgatcgcctgctggatgttgacccttacacctaccgcctgatcccggaactggccgcccgctggacggtgctggataacggcgcgacttaccgtttttatctgcgccgtgataccgattttcagaccaccgactggtttaaaccgacccgcaaaatgaatgcggatgatgtggtgttcagcttttcccgcgtggtggataaacagaacccgtatcactatatcaacggcggccgttatccctattttgacagtctgcagttcgcgtccaatgttaaatccatccgcaaaatcaataattataccgttgaatttaaactgaatacgccggacgcctctttcctgtggcatctggcaacccattacgcgccggttctgtccaaagaatatgccgataatctgctgaaagcccgtcgtcaggagcagttagactggaaaccggtcggcaccgggccgtattatctggatgattaccagagcggccagtttgtccgtctgcagcgccatgataattaccgcaaaggtaaaccccgcatgcaggaagtggtggttgacctcggggcgggcggtaccggacggatgtcaaaactgatcaccggtgagtgtgatgtgctggcctatcccgccgccagccagttacaggtgctgcgcgacgacccgcgcctgagcctgatgctgcgtcccggaatgaatatcgcgtatctggcgtttaataccagcaaaccgccgtttaataatccgcaggcgcgccgtgcgattgctttcgcgattaataatgagcgcctgatgaaatccatctattacggcacggcggaaaccgccgcgtctattctgccgcgcgtctcctgggcgtatgataaccagacccgggtgacagaatataatcccgaaaaagccaaagcgatgctcaatgagctgggactcagcggtatgacgctgaatctctgggtaccgaccgcctcgcagtcttacaaccccagcccgctgaaaatggccgagctgattcaggcggacctggcccgtgtcgggataaaaatgaatatccgcccggttgaggggcgttttcaggaaaacagcctgatggatcgcagccacgatattacccttgcgggctggtcaaccgacagtaatgacccggacagtttttttcgtccgctgctcagctgtgcggctatcggttcgcaaaccaacctcagccactggtgttccccggaatttgatgatgtgatccaccaggcgctgcttgagcagcaactgagcagccggatagagtattatcacaaagcgcagcagattctggcacaggatctgccggtactgccgctggcctactcactgcggttacaggcattccgctatgatatcaaggggctggtactgagcgcattcggtaatacctcttttgccggtgtctaccgtgataccggggatgacccggagccggaggctgaaccatgattatttttattctgcgccgtctgctgctggtgctgatcaccctctgttttctgtcggtgctcagtttcagcctgagttacttcccggcaaatgcaccgctgagcggcgcttctctgacggatgcggtactgttctactataagagtctgttttcatgggacttcggcagttccgtgattaacggcgagccggtcagccagcaattgtgggcagcactgcccgccacgctggagctgtgcggcctggcgtttctgctggcgctggtgatcggtattcctgccgggattattgccggggtctggcgcaataaaatggcggatatcgccatcagcacctttgcgctggtcgggttttctgttcccgtattcgggctggcgctgctgcttaccctgttcttctctctgcggctggactggctgccgggctcccggcgcattgacctgctgtatgatttaacaccggttaccggatttgcggtgattgatgcctggctgtcagattcaccataccggcaggcgatgatcctcaatgtgctgtcccatatggtgctgccggtgatcacactgtccattgcgccgatgacggaagttatccgcctgatgcgcaccagtaccgaagagattatcagccagaactatattaaagccgccgcgatccgtggtttatctcggctgaccattatccgccgtcatttgctgcacaatgcgctgccgccggtgatcccgaaactcgggttacagttttccaccatgctgacgctggcaatggtcacggaagtggtctttaactggccgggcatcggccgctggctgatcacggctatccgccagcaggactttgccgcgatttccgccggtgtcatgctggtcggcacgatggtgatgattatcaatatgctgtcggatattctgggtgccgtcagcagcccgctgaaacataaggaatggtatgccttcagataatttctaccgtgaagaccggatgccgtcaccgggacgggttatctggcagcatttcaccgcagatattccggctatgatcggtttttacggcgtgctgtttctgattgcactagcgatcggcggcgcctggatagcgccttatgcgctcgaccagcaatttgccggtcaccagttgctgccgccctcctggtcacattacgggaatgtcgccttcttcctcggtacggacgatctcggccgtgatattttcagccgtctgatcctcggtacacaatccaccttcggcggtgcactgctggtgaccatcattgccgctgtcgccgggattatcatcggctgtctggcggggatgaccaccggcctgcgctcagccatctttaaccacatgtttgataccctgctggcgctgccctctctgctgctggcgattattgtggtggcctttttcggcgccagtctcagccacgccatgattgccgtggcactggcgctgctgccgcgtattgtgcggatgatttatatcgcagtacatgatgagcttgataaggaatacgtgattgccgcccggctcgacggtgcatccaacctcaatattctgatccatactgtgctgccgaatatcagtgccgtgaccgtcaccgaactgacacgcgccttgtcgattgctatccttgatattgccgcgctcggttttctcgagctgggggcacaactgccgtccccggaatggggagcgatgctcggggattctctggaactgatttatgtggcgccctggaccgtgcttctgcccggaaccgccatccttatcagtgttctgctggtgaatctgctcggtaccgggttacagcgcgctattaatgcgggggttgaataatgccgttactggatatccgcaatttaaccattgaatttatgaccgccgcagggccggtcaaagccgttgaccgcgtgacattatccctgaccgaaggagaattccgcggccttgccggggaatccggttccggtaaaagtctgatcgccaaagcgattgccgggattaccaaagataatctgcgcgtaacggcagaccgtttccggtttaatgatatcgatctgccgaaactcacaccccgccagcgccgccgggtgatcggccacaatgtgtcgatgattttccaggagccgcagtcctgtctggatccgtcagaaaatatcggcaaacaattgattcagaccatccccggctggacttacaaaggccgctggtggcagcgctttaactggcgtaagcgccgggcgattgagctgctgcaccgtgtcggtattaaggatcacaaagatgtgatgagcagctacccctacgagcttaccgaaggggaatgccagaaggtaatgattgccattgcgctggccaatcagccgcgcctgctgatcgccgatgaaccgaccaccgccatggaacccgatactcaggcgcagattttccgcctgctgacccggctgaaccagaacaacaatatgaccatccttctgatcagccacgatttgcagttaatgagccagctggtggatcgcattaatgtactctactgcggccagactgtggaaagtgccgaaccggacgacctgcttctcaaaccgcaccatccgtatacccaggcgctgatgcgggctatccctgattttgaaaaggcgctggctcataaatgccgcctgaataccctgccgggcgcgattccgtcgctggagcatctgccggtcggctgccgcctgggaccgcgctgtccgtatgcccagaaagtgtgtattgacgcgccgcgtctgcggacagtcaaaaaccgcagttttgcctgtcacttcccgctgaatatggaggatgtgtaatgcccggtccgctgctggaagtcaaaaacctgagcaaaacctttcgttaccgggatggttttttccgccgtcatcagcttgaggcggtcaaaccggtcagttttacactgcagcccggccagacactcgccattaccggcgcaaacggctccggcaaatccaccctcgcgcggatgttatccgggatgatcgagccgagcggcggggaaatcctgatcgacaaacacaaactggctttcggtgattacagctaccgcagccagcgcatccgcatgatattccaggattcagccacctcgcttaatccgcgccagcgcaccgggcaaatactcgagctgccgctgatgctcaataccgacctggatgccgccggacgccgtctgcgcattaacgcaacactgcgccaggtgggtctgctgcctgatcacgcggattattatccgcacatgctggcttccggacagaaacagcgtgtggccctcgcccgtgccctgattttgcagccggaagtgattgtggcggatgaagcgctagcctctctggatatgtcattacgttcacagatcataaatctgatccttgaactccaggaaacgcaaaaaattgcctatatttatgtcacacagcatctgggcatggcaaaacatgtcagcgaccagatactggtgatgcacaacggtgaagttgtcgagcgcggtaatactgccgaggtactggcatccccgctgcacgatgtcacgcgccgccttatcaccagccactttggtgaagcactgtccgccgaagcctggcgtcaggatatggattaactcccggtattctgattattcaggccggttacatctcaatttccggtagcgtgttaatatcagccggatttttactaaacgcgtcacctgccgggttgcggcgcagaaggtgacagagaaaacacaaggaaactgctatgggttttatgaccggtaaacgcatcctgatcacaggggttgcaagcaaattatcgattgcttacggtattgccaaagcaatgcgtgaccagggggcggaacttgcattcacctaccagaatgacaagctgaaaccccgtgttgaagagttcgctcagtctctgggttcctccatcgttctgccttgtgatgtggcagaagatgaaagtattgaaaatctgttcacggaattagccaaagtctggccgaaatttgacggttttgttcactctatcggctttgccccggctgaccaactggacggcgactatgtggatgcggtaaaccgtgaaggcttccgtattgctcacgacatcagcgcgtacagttttgtggcgatggcaaaagcctgccgcagtatgctgaacccgaattccgccctgctgaccctctcttacctgggcgcggagcgcgctatcccgaactacaataccatgggtcttgctaaagcctctctcgaagcgaacgtccgttatatggcgaacgcgatggggaaagaaaccatccgtgttaatgcggtttctgccggtcctatccgtacactggcagcatccggtattaaagatttccgcaaaatgctgtcgcactgtgaagcagtcaccccgctgcgccgtacagtcaccacagaagatgtgggtaacgcggcagcgttcctctgctctgatctggccggcggtattaccggtgaaatcctgcatgttgacggcggtttcagtatcgcggcaatgaatgagctggaactgaagtaatcctgcttctgtccggctttccattaatatcaccgccggacaggtcaatcagttgacagcaggcaagcggacgaaaagcatgcgcgtcatggatgacgcgcctgagcgcacagggaggtgtttacagcgtcttttcgttttgcctgctgtcagctgttccccgcactttcagagagcacttcttttaattaccggcctgtcagcaatttctccgtcagccgctgcgcataaagcgcctcttcgccgctgaccagcggttgtgtctgattggcaacagattcgataaaatgccgcaccgcaccgtcaaatccgcgctgaaccagtaccggatcccacgctttcgggtgctgttcctgtatcccggcggcagtttcactgcgccagtgattcatatccgtcacctgataacagccgtcacgtccggtcacactgacctgctcccgctgactcgccgcacagcggtgcatagaggctgtcagccaggtgccgttatctgtctgtaaatggtgctccgcatacagcagctgattttcatcattcacctgcatatgaccgcttttcagtgctgcattaccatcccgtcccagccagagcagggtatccgcgatatgcagataatcatcggttactgtaaaagccacatcatgcggaccaacactgttgctgcggtgtttatccatacggatcgatgccgcttttccggcaatctgttctctgagctgcagataaaacggtgaaaagcgccggttgaacccgaccatcagcgcccgctgttttttctccgccaggctgacgagtgcctctgactgttcacaggttgcagccaggggtttatcaacatacacatgacaccccgcattcagtaattcgctgacgacctgaaaatggctctctgtactgctgtgaacaaacacggcatcacattgttccgccagcgtacggagtgacggaaacataggaaagcggtacgcatcacagacctgacgtgccttttcctggttcggcgagaacccgccggacagcacccagttatccgttctggtcagaatcggtaaatacgctttttgtgctatcccgcccagtccggcgatcccgatacggattttattcatgtatgctttaccttttattcttttgtaacaatggattacaaagtcttcccataaattgaatctgtggcgattatatggaaagatagcgttaaccgacaaataattcgcattctgaatacatcccgcccgcgaataccggtctatacttcatcactactgccatgtccgttcttttgttttaactgaggagcataccatgcaattgttctataccccgggaagttgtgcactgtcaccccatattattttgcgtgaaaccggcctggatttttccctggtccgtgtcgatctgaaagcaaaaaaaaccgaaaacggtgatgattacctgaaaattaatccgaaaggacaagtccccgcactgagtatcagtgacagtcagctgctgaccgaaggtgtggcgattgtgcagtatcttgctgatcagaaaccggatcgcaagcttattgccccggcgggaacgatggaacgttatcatcagattgaatggcttaactatattgccagcgaagtgcataaaagctacggcccgctgttctctccggaaaccccggaagattaccggccaattgcgctgcgcaatctgatgaataagtttgcctatgtggacggcgtgctggcgaaaagcccgtatattaccggcaacagttttaccgtagcggatgcttatctgtttactgtctgcggctgggcaccgcatctgaagatttcactcgagccgtatccgcatttacaggcgtatctggcgaaaattgcccatcgtccgcatgtgcaggatgcgatggaagcggaaggtctgatttaatctttctgatacgcagagacaaaaaaacgccggattatctgcccggcgtttttttatgctgatacagtgttcagaccggttcagtcgatctgttcagcgcagaatttgtgtgtcggaagcaccatttcatcctgagccgcaaccagttgcagttcgtactcattcatggttttggttttcagcatcacttcatacacagcggcagcaacgtgttccagtgctttcggcagttcttcacctttcagcagattcaccagcatcagaccactggtcaaatcgcccacacccaccggctgacgttcaccgaagtccaccagcggacggctgacatgccaggcgtgctcagcagtgaccagaatcatttcgaagcggtcagcacggtaaccggcgcgggacaggtgcttaaccagtaccagacgcggcccttttttacacagctcacgggcagcggcaacggcttcatccacattatgaatggtttgtccgctcagtgtttccagctccagcaggttcggcgcgatcatatcgctgactgccagcgcttcctgacacaggaaatccgccactcccggcgccacaatacagcctttttccggatgtcccatgaccgggtcacagaaataccatgcctgcggatttcgggttttgacttttttcaccacatccaggatacgcttgccctgctctgccgagccgaggtagccgctgagtaccgcatcacagcgggtcagctggtcgattttatcaatgccgtccacaatctccgtgatgtgctctgcgctcatcacgcagccggtccagccttgtgcatactgtgtgtgattagaaaactggacggtattcagcggccagacattaacgcccatgcggcgcatcgggaattcagccgcactgttaccggcgtgaccatacacaacatgggactggatagagagaatatttttcattgatacaacctgattttttattattactgtgcatatcatattctgtgaaacagaaaagatcctgctgacagatcaaaaagggcaactttcgttgcccttgtttaccgtaaactattatttccagcagatcagacagtaatgttttttgccccggcgcagcagtgtgtaacgcccgaacagcttgtcgctgtcagtgaagcggtattccgcatcagactgtttttcgccgttgagagacaccgcattggagccgatcatggtacgggcctggccgcgtgacggaaccagttccgcaaccaccagtgcctgctgtaaatccgcatcgctgtccagttcgatatgcggcataccatcctgtgccagctgcgcgaagtcatcttcagtcaggcttgatacatcaccgttgaacaggctgtcagtaatacgacgggcagccgtcagtcccgcttcgccgtgaaccagttttgtcacctgctctgccagaacgtactgggcacgcggtgctttgccgctggctttgtcttccgcttccagtgcatcgatatcttcgaggctcataaaggtgaagaatttgaggaaacgatagacgtccgcatccgcagtgttgatccagaactggtagaatttgtacggactggttttcttcggatccagccataccgcgccgccttcggttttaccgaatttggtaccgtcagatttggtgatcagcggaacggtcagaccccaggcctgctgctggttcagacgacgggttaaatcgataccggaagtgatgttaccccactggtcggaaccgccgatctgcagttcaacgccgtgatctttattcagacgggcgaagtcgtaaccctgcaacaggttgtaagagaattcggtgaatgaaataccgacatcatcgcggttcaggcgctgcttaaccgcttccttgttgatcatctggttcacagagaagtgtttaccgatatcacgcaggaaggtcagcacatccatagagccgaaccagtcatagttgtttgccgcgatagcactgttcgcaccgcagtcaaaatcgaggaacggggaaacctgctgacggattttatccacccagccgtgaaccgtatcctgtgtattcagtttgcgctccgttgctttaaagctcgggtcgccaatcagccccgttgccccaccgaccagtgccaccggacggtgcccggctaactggaaacgctttaagcacagcaacggaaccaggtggcccaaatgcaagctgtcagcggtcggatcgaaaccgcaatagagggagatcgggccctgcgccagtctctctgctaacgctttttcatccgtaacctgggcaatgaggccccgctcttgcagttgttttatcaggttcgtaccagacatcaatgactccgtcagttctgttttgtctatgcaaaaattgtggattagaaatatgaaggctatagcataaagcggcactccgtgaagtgccagcaattaaaatgattttactgaagaaattctgacaacagccggttacggcgccaggcggtcaatatcccagccgtctgcggtacgggtgtacaggaagcggtcatgcagacggtgttcaccgccctgccagaactcaacagaactgaatttgatccggaaaccgccccagaagcttggcagcgggacatcaccctgcttaaatttctgtttcagttcgagaaatttgccttccagaataccgcgtgcggaaatccgcgaggattgctgagacgcccatgcggcaatctggctgtctttcggacggctgtggaaatatttcactacttccagtgtggataaacgctccacctcgccgaggaaacagacttgtctgtccaggctgtaccacggaaaatgcacactgattttcggattttttgccagatgctgcgccttgcggctgcccatattggtgtaaaaaatcagcccgtctttatcaaagtgcttgagcagcacaatacgctgatacggctgcccggtttcatccacggtcgccacacacatggccgtcgggtcggtcagttttgcctcacacgcctgtttaagccagcgttcgaacatttccagcgggtcgtcgctgagatcacggcggcgcaagccccctctggtgtattcacgtcgcagatccgcaacgtcagtaaactcatctgacatgccttttatcctcttatcttatctttttaataactgaaactgtgttgtcttttattacggctgccggcggataacaggatataccgcgcccaatacggtttcccggtctgcgccggtgacagacggcagattgccgggttcaccggccagtgtccgcgccgccagccaggcaaatgccagcgcttccatatcatcgccgctcaggccgtacttatcagtcgggctgacttcagtgcccggtaactgtgcggataactgcgccataatctgcggattgcgtgccccaccgccgcaaaccagcaggcgctcacagccgccgcacagcgtaacctgctcactgatactgacagtggtcagtgccagcagggtcgcctgcacatcctccggtttcaggccggggaaattatccagttgtgtggtcagccactgcatattgaaatattcacgtccggtacttttcggtgccggacggcggaaatagggatcactcagcatctgtgccagcaagtcctgattaacgtgcccgcttttcgcccattcaccgtctttatcatacggctctgcacggtgccgccatgtccagctgtccatcagcatattgcccggaccggtgtcatagcctctgacctccgcccccgggatcagtgtggtgatattggcgatcccgccgatattcaggataatccgtttttcatccgccgcgccgagcaccgcctgatgaaaggcgggtaccagcggcgcgccctgcccgccgtaagccatatctcggcggcggaaatccccgactgtcatgatattggtcagcgcggcaaccctgttgttatccccgagctgcatggtgaaaggtgtttcgctgtccggctcatgccagacggtctgtccgtgacaaccgatgccggcaatatcctgcggattcagccgggtttgtgccagcagcccgccgacagcgtcagcaaacagtgtgcccagttcataatccagacggccgatttctgacagcgtcgtctgctgtccctgacataccgccagtatgcgctttttcagcgtgtgcggaaacggatgcgaatacgccgcctgctgcgccaccactgaatcattaatcgcagccagaacaacatccaccccgtcaagactggttcctgacatcacgccgatataacgtcccgaacgcataacctgttccttttaatcaataaccgtctgataaaaatatagtattcatattccgtgtgactactataatcagggcgccccgcagattcaccccttttcgtaccgtgaccccacttaatcctcattctgatgcacgcttcacatttgtgaaataagaggatttaccttgccgccggaacgtttcgctttaagctgttcctaatgaagatgaaaataaaacgtttttaatgctaaattattctgcgataatagataagatattacactacagataatgaacacatctgaatctgtgaatacaataatcaggagttaagtatgtataagcgttttctcgtcggtgtatttgccgtcgtggccctttccggttgtgtgaatatggacacactgagtggtgacacttatagtgcagaccaggcgaaacgtgttcagaccgttacctatggtacagtgatgagcgcccgtccggtaactatccagggcggcagtgacgaaaatatcctcggtgcggccggtggtgcaattctgggtggtattttaggcagtactgtcggcggcggcaccggtcagactctggctaccgcagcaggtgcaattgctggtggtgttgcaggccagaacgttcaggcagcaatgaacaacacctccggtgttgagctggaactgaaacaggataacggcgaaatcattgttgttgtacagaaacaaggtaaaaccccgttctccgtcggtcagcgtgtccgtatcgcgaaatccggttcaacctataccgtatctccgcgttaattttcacggtttaccggcaaaaggcgaaacaactgtttcgccttttttattacctgccgtcagttacggttgtgcaactgcacgatattgttatccagttttctgacaatctccgccagcgtatacaattcatcctgcgtgatcccgcccagaatttcacgccgtgttttttcaatcaccgcgtccacctcgcggataaagggttcggattcctccgtcagtttaatccgtttcgctctgcggtcattaatacagatatgccgtgtgattaaccgcttttcctccagctgatccagcgtgcggaccagcgacggctgttcaataccaatcgcttttgccagctgaatctgagactgatccggcggcagcaggctgatattgtagagtgtaatccagtgtgtctgtgtgagtttcagtggtttgagccggtggtcaatcagtgatcgccaaatccgcactaacctcgctaagtctgatcccaatgttaactccacaaatttctccttatgtgaatacggtacggacgcatatacacgccatcatgtctttcaatcacccgaaaaaggaagcgcagcgctgcggtgtttattaacagcggacgcaatattgctgtgtgacaaaaacagttcatgcttattttatagtcaatttaataggcatgaaataattagctttttatacaaatttaattgattaagctgatgaacttgtttcacattaagaatagcgatcatcactgaacggatctatatttttttacataaccaccattttatttttaacaaaaaataattgagatatgatatttccaatattaaacagtgagttaatgaaacatcgccactgtgatgaataaggcggtaattttatatttaatttatataatttcactcttgattataaataaagatgaacttaaaaatatcatttatctgcaacataaatcctttatgctaaataacacccctacattaattcatgtctaatatatagatttataattatttatttaaaataaatccagctgtccggatggcgtttccggcggtgagtccccttttgcggctctgtaacgacgctgacggcacagccgaatcacattttctttttgtgcgttactcagtgacagccactgaaaacgctcatcacggctccggtagcatccccggcagtagcctttttcattcagctgacatatccccacacaaggtgaagggatatcaaaaaagtgaagttgttctgccatcggctgatgtccttttgtctgatgccctgccggacaggtaatggttatcctgtaaccatcagcatcctgataatttgaattgtagtcaattatcacgttatagtgtgagccattactgataaataactgaaagcactctgagaggttactttatgcgtgtactccataccatgctccgcgtgggtgatatgcaacgttctgtcgatttttacaccaaggttctcggcatgcgtttactgcgcaccagtgaaaacccggaatataaatattctctggctttcgtgggttacagtgacgaaagtgaaggctccgttatcgaactgacgtataactggggcacggattcctatgagatgggaacggcattcggccatatcgcactcggtgtggatgatgtcgcggcgacctgtgatgctatccgcaaggcgggcgggaatgtgacccgtgaagccggtccggttaagggtggtaccaccattatcgcttttgtggaagatccggacggctataagattgaattaattgaaaataaaagtgccggagctgctctcggtaactgagtgactccgtaagaaggatccgaacgatccttcttttccggctcagccctttctccctccggcaagccgcgctagaatagtgcgttttgtttgtttaattaagagtcccatgtctgaaaatcaaaatcacaatactctgagcgcacgtttccgcggctattaccctgtcgttattgatgttgaaaccggcggttttaatgccagaacggacgggatgctggaaattgccgccattaccgtcaaaatggataacaacggctggctgatgccggatcagcggcttgaatttaatgtgcagccttttgagggtgcaaaccttgatcccgccgctctggcctttaccggtattaatccggccgacccggagcgtaatgcggtaacagaatatgaagcgctgcatgccatttttaaaatggtgcgcaaaggcatgaaagatgcggattgcaagcgggcgattatcgtggcgcacaatgcaaattttgatcacagctttgtgatggcagcggcagaacgctgcggactgaaacgcaatccgtttcatccgtttgccacctttgataccgccgcattaagcggactgtcactgggacagaccattctggcaaaagcctgtatcaccgcagggatcccgtttgacagcaaaaaagcccacggtgcggcttatgataccgaccgtacctccctgctcttttgtgacatcgtcaaccgctggaagaaactgggcggctggccgccggcggcagaaagtaatcagtgagaaaacgccaccgttatggtggcgtttttcgctgtattgtcattaacgcgggcaatatatccactgattaaagtttcatcagttccggcagaattttcccgcggatttcggatatcacctgaccaacgctttcacggaattccgcttcaaatcccggtctggcaagatactcttttgctttgcccaaatcagcgatactgccaagctgagagaattccccctgtgccacttcctttctcagcagatttcccgattcttcacggataccttcagaacccggctcatatattttcccgtttatggaactgagctgggtaataacccccctcagcggaccacctgagatactcaccagcatgtccggttgcagaggttcattattctcaagtttacctgccagtgtatccagatgctttggcagacattcttttgctgactcaagtaaaatctgagaaaacgacgctatctgcacaggcgggggcggcgtttccgcttgtatttccgttttttcgcaacgaaaagagatattttttatccggtcacctaactgatgcagtgagttattcacttttccttttgctgacataaaaaaatctgccacgctgttgcaaatgccactgaatcgctcagccagcccggggactcttgctgctgtgtcttcagtcagtgtaccgatcgcagcacccggcccgctgtatgaaatatacccggttaaaataacattctgccctgctgatgttggctgcattttttttcctttctgtgtaattaacagctccactctagaaaataaccgcccggacaactttcatttcaccgccatcagaaaagcaaaagccccgcagtggtgacactgcagggcttttataaacagtacgggacgtgattattcttcgttttcagtccggtattttgctgcggtttctttaatcagtggctgtaattcaccgcgctggaacatttccataatgatgtcacagccgccgaccagctcaccgtcaacccacagttgcgggaacgtcggccagttagcgtattttggtaattcagcacggatatccggattctgcagaatatccacataagcaaaacgctcttcacaggcagccagcgcctgtaccgcctgggcagagaagccgcagctaggcagtttcggagagcccttcatatacagcagaatcgggttttctttaatctggcgttcgattttttcaatagtcgtcgtcatgtaaaacgtccttcacttcagatcggttagtaccggtgttaacttacccgcagaataccacttttccctgcaaagcgatattggttttaacatactgttaaaatcagtcagatgcattacgtccgtgtattttcagctgaaaacactctggtcaaaaccgatcattacagctgttatttacggtattttcctctggtaaacaagaccgccgtcattttttatcttacgcagtaatgccataatccgcacattgtattctgttaacaatctgatgagctgaaaatgacctttgagtggtggtttgcctatctgatgacatccgttattgtcagtctgtctcccggcgcaggtgccattaacagcatgacgacctctgtcaatcacggctaccggggcgcgattgcggccattgccgggttgcagaccggcctgatgatgctgattatcctggtcggtgtcgggctggggacattgctgtcacaatcggttcttgcttttgaaatactgaaatgggcaggggcggcctatcttatctggctggggatccgccagtggcgcgcagcgggaactattgagctgagtgcacaggcggcaacgctgtcacgcaaaaagctgtatcagaacggtgtgctggtgaatatatcaaaccccaaaagcattgtttttctcgcagcactgtttccgcagtttattatgccgcaccagcctcaactgatgcagtatctgattctgggcgtcaccacggtggcggctgatattattgtgatgacaggctatgccgtactggcacgtcagattgcggtgtttatcaagagcccggcacagacccgcgccatgaataaagtgttcggatcattatttatgctggtcggcgccctgctggcctttacccgtccggcctgaaccggaatacgccccgttatttgcggggcgttatatcgctactcaaaaacatcattaataatgtaggtcaccactgcggtgctcagtgcaataagcactaaatcatctccggctattttccactcatagcccggataatgcggcagacggtcacgcatatggacaggcaccgaccgttttgcaatgcccggcggaagcggttttcctctggcaaggtttttcgcaatccccggcggcagagcatgatatcccagtaatccgctttctgatgccagccagcgtgcctgtgcgtaactcagatcctttctgtactgacgataatagcgctctccctgatcatcctgattatctctgtgcttataatgaccatgatgatgctcatgccggtgactatgccctttatcgtgtccccgatccgcataagacgctgccggagcgactaaaagcccggtcatcaacagcacgacgttacatacctgtgtaaatctgcgcataacacaacctctgcgtattaatactgacaataagcgttgatcactccgcaaaattacgcaataggataaccggacaacatgattcgccactgtactgaaaattggttatcatccccttccgctttttacccggataacccgatgtctgacattaccgatacctttatcgccccgccgtgcccggagcagattgacattctgtatcaggacgaacacctgctgctgattaacaaacctgccggactgctcagtctttcgggaaaaaatccgcagaatctggattccgtgcattaccggctggtacagctgtttcccggctgcacgctggtacaccggctggatttcggcacctccgggctgctggtggtggcccgcaataaagctatcaatgccgcgctttgtcgtcagttcagtcagcgtacagtgcagaaaggttacagtgccctgttgtgcggacatctgaatgagaatgaaggaataattgatgcggcgattgccaaggatccggcgctgtttccgcgcatgacgatatgtgctgtccggggaaaaccggcccgttcacattatcaggtgactgagcgattttattatgaaactgaagacgggatctctctgccggtcacgcgagtggcactgacaccggaaaccggccgtacgcatcagctccgcattcattgtcagtatctgggccatccgattttagggtgtgatctctatggcgggaaactattgccgggcacagaaaatattccgcggctgatgctgcacgccggggagctgaactttgtgcatccggtcagcggtgaaccggtaactgcccgcagcccctgcccgttctgaacagggaaagcaggcagatgcggatcaccacattaaatcatccggaattttaaaatcagcatacggatcgtcttcatccgcttcgtcctgcgccagcgcattatttaacacaatgctttccgcatcacgctgtgtgattttatccgcaacaaccgccgggataatggcatattcactgacagcgctgttttccgtgcttaaccgggctatcgccagacggccgttgatcagctgagactgtgtggttttgtccacggcaatgcttttaatcacgttgttgtcggtgaaattaaaatcaatactgccttttgaaataatgatccggttcatttcaatcagctgcttcacctgagctttatattctctggataaaacagcctgtttttgctgctcactcagctgtttatcacgctcaagctgcgcttttttattctcttccaccgcttctctggcctcacgggcctgaacgcgtgatttttttgctgttctgcggactttatccatttttttgctggtcaccagtccggctttcagcatctgctcttgtaatgtgagttttgtcattgtcttttctgaatcagtttaatattgcaggtaattataccggtaattttcaggattgtatccggcacgtcaggccagctgcattttcagccagtaaccctgctggcacagactaaaaaattctttgtgctgcggagaaacggtttgcgctttatctcccgtgaccgtccagacaatccactgttccggacactgttcgtcgccggtctgcacggcagtttctatctcttcactgcacatcagctcaataccatcgcggaactgccatttgcggacccgccggatcacttcagagagttcatctttctgataatggtcacagataacattgcaatcagtatggttttgtatcgcgcgggaaatatagtctgccagcatcgtgatcattcttgtacttttgtcataacggagattgtaaagggtctgcggccggttgacaaacggcggtcattgtcacgctttctgtaaaattgttaaatttgcgcggatttcagccggtaaacccgttatatttaagattccgcagtcatacggggaagacagaatgaaacgctattataactggatctgccgccataagctgtacaccctgcttatcgcctttattgtgacagatatcattctgtgggcgattttgtctttcaccatgtgaataacatcaccccggtatttcacgctgttttttatgacaaaacttgttaagataattcgcagaataataacagtaacccgtctgtgatgaggttactgatttaaccttaacaaggagaatgcaatgtcgtttgaattacctgcactgccttatgcaaaaaatgcattagcgccctatatttctgaagaaacactggaataccactacggcaaacaccacaacacctatgtggttaatctgaataacctgatcaaaggcaccgcgtttgaaggtaaatcactggaagagattatcaaaacctctgatgccggtatcttcaataacgctgctcaggtctggaaccacacgttctactggcactgcctggcaccaaatgccggcggcgaaccaaccggtaaaattgctgacgcgattaacaaagcgttcggttcatttgccgaattcaaacagcagtttaccgattccgcagtgaaaaacttcggttccggctggacctggctggtgaaaaaagcagacggcagcctggctatcgtcaatacctctaacgcggcaacccctgtcagcggtgacgacaaaccaatcttaaccgttgatgtctgggaacacgcttattatatcgactaccgtaatgcccgtcctaaatacctggaaaacttctgggcattagtgaactggaaatttgcggaagaaaacctggcgtaatccggaaacacatcatccggaaacacaatacagttgatcaaaaaagggcggaattttccgcccttttgtactgtaaggggtgtatcagaaaagcataattgaaaacagtacgatcataaccagtgctgcaaccgctgttgacaaaccatatttcagatctgtatccattcttatctccaaaatagctgcttagtgaccaatgatgactacctgacatcctgaatcatcaaaataattaaaacggatggtctgaccggaaaacccgaatagctgaccatatcaataaccatagcacaggtaatattttttacttttgacccggatcagacaacaatgcctgtttttacagaaatttttctattgttaccgcataatggcactataatagcaatcgattaaccgaataataaaatacagaccggcaggtcaggagttgttttcatcatggcaacgattaaagatgtggctaagcgctcgggcgtttcgactacaaccgtctcccatgtcattaataatacccgtttcgttgcggaagaaacgaaggcggctgtctgggctgctatcaaagaactgcactattcaccgagcgccgtggcgcgcagtctgaaagtcaataacaccaagtccatcgggctgctggccacctccagtgaagcgccgtattttgcggaagtgattgaggcggtggaaaacagctgctacagcaaagggtataccctggtgctgtgcaactctcacaataatcctgacaaacagaaagcctacctggcaatgctggcacagaaacgtgtcgatggtctgctggtgatgtgctcagagtacccggatcagctgattgccatgctggaaggctaccgcaatatccctatggtggtgatggactggggtaaagcgcgcggggatttcaccgatgcgatcattgataacgccctgcacggcggctacctcgccggccgttatctgattgaacgcggacaccgcgatatcgcggtgattccggggccgcttgagcggaataccggcggcaaccgtctggaaggattccgcaaagcaatgaaagaagcaggtattacggtgcgcgatgaatggattgtccagggcgattttgaaccggattccggttatcaggccatgacacagattttatccggcaaacagcgcccgaccgcggtattctgcggcggtgatgctatggcgatgggcgcgatttgcgcagccgatgagatgggtctgcgcgtgccgcaggatatttctgtgatcgggtatgacaatatccgtaacgcccgttactttacccctgccctgaccaccatccaccagccgaaagagcggctgggacaaatggcactgaccatgctgctcgaccgcatcgtcaacaaacgcgaagatgcgcagaccattgaggtgcatccgcgcctggtcgaacgccgctccgtggcggatggtccgtttatcgactaccgccgctgaggatcagcgcagccattcggcattgagcgtgttgctgtccccgagataatcgagcagccagctcagtgccggagaggtatctttatccacccaggtgatacagcacgggctgtccggcaacggctgctctatcttcagcgctgccagccgccccgctttaatcagcggatcggcacggtgcgccggcatcattgccacacataatcccgattccacacaggcaatcccgcgatcccagtccggcaccaccaggcggcgctgattatccagtgcccacgtatcgcgtttcggcagagaacgcgaggtatcttccaggcacaaactcgggtacggcaccatttcctcattggtcaggacatgaccggcagaggccagcggatgatccggactgaccaccgcacgccacggcataaagcccatatcgcggaaattgtagcgctcaccgataggagatgcgcgtgtcgcaccgattgccacatccacccgtctgtccaccagcgcatcccacaccccgttaaacacttccggataaatatacaactcgatatccgggaaatgatgataaaaatccagcagaagtcgcgttatccgttccggttttacgatacagtcaacagcgatactgaattgtccgcgccagccgttggcaatcatctggcactggtgacgtgtggatttcatttttttgatgacatcacgcgcttctttgacaaataacgccccggcgggtgtcagttcaacatcgcggtggcgccgttcaaacagcggaaccgccagccactcttccagctgacggacactgtagctgatggcggaaggcacccggtgcagttcctctgccgccgcgctgaaactgcctgtccgcgccacagcatccaccacatccagcgtatattctgaccacataatccttcctttcaaaaaatttcacagcagtgtgcaaataataacgttttacaagggaaaactcgaatagttaaaatactaactcacgcattacacttatttaacattcaggtatttctctgtgactgtcaataaatcgccttcccgcggctttctcttttatctcgccggactcagcatgctgggttatctcgcgattgatatgtatctgcctgcattcggtatgatgcaggactctctgaactccacagccagcgcaatcagcgccagtctgagtatcttcctggtcggctttgccatcggccagctgttatggggaccgctctccgataaaatcggccgtaagccggttctgctgatgggtctgagtctgtttgccctcagttgtctggccatggtctgggtttccaccccggcccagttattattactgcgttttgtgcaggccgtcagtgtctgctctgccgctgtcacctggcaggcgctggttatcgaccgttatgacgatcaccgtgcgcagcgtgttttcgccgcaattatgccgctggtggcactctctccggcactggcaccgttactgggcgcatggctgctcaaccacggcggctggcatgaaattttcctcgtgctcggcggtatcaccctgctggtgctgatcccgaccctgatgctgaaagaaaagcatcatatcgcgccggatgcggtcaaaacggaaaaacagaaaatctccttcttccgtctgctgaaatccccggtttacagcggtaacgtgctgatttacgccgcgtgcagcgccggtttctttgcctggctgaccggttcgccgtttattctgcgcgatatgggttataacccgaatgatatcggtctgagctacattccgcagactatcgcctttatggtcgggggctacggctgccgtgccctgctgtcgcggattaacggcaaaacattattaccgttcctgctggccggttatgccgtcagcatggtgggcctgtatgccatggcaaaattcggtaacccgtcactggtggcgatcctgatcccgttctgctttatggcagcaatgaacggcgcatcttacccgattgcggtatcaaacgccctggcggtttacccggaacacagcggtaaagcagcggcattacagaatgccattcagctcggtttatgctccgcgatcagtttcctggtctctgccctgatgcatgagccactgctctccaccacggcagtgatggcggcaacggtggtgctgaccatcggcggttatattatccagcgccgcccttcgcgtacctccgtgacgattgcggaacaaaatcaatagattgcaatatgtactaggaatattcctaattataagccgtactcaggtacggctttttttgtcattgaattttaatttcaggctcctatacttttctgacaattcgttttaaatccggattttgagctttgtttttgtcttaacgatcacgttaatacgcagactgtcacccgatgacggccaattacaccggttctgttgttcccgcgcaaaacgtcataaataaagcactcagaatcccgctttgataaaaattggagataatatgagttctgattgtgtcgaaaatcaaaaaacgcctgccgattcctggcagcggattgcctccgatcttttagacgaagccggcattgagattaatggttcccgccctttcgatattcaggtacataaccagcagttctttaaacgggtcttacaacagggctctatgggactgggtgaaagctatatggatggctggtgggactgcgaacggttagatattttctttcagcgggtattacgcgccgggctggaaaataaactgccgcagaatatcaacgatattataaaaatcgccatggcccgtctgcgtaatctgcaaaccaaaaaacgggcgcggattgtcggcgaagaacattatgatctcggtaatgacctgtttgagctgatgctcgacccgtatatgcagtattcctgcggctactggaaaggtctcagtgatgacccagccaacctggcgaaagcgcaggaacagaaactgcatctcatctgtgaaaaattacagctgaaaccgggtatgcagctgctggatatcggctgcggctggggcggcctggcggcgtatgccgcgaaacatttcggtgtgtcagtaaccggtgtgaccatttccgctgagcagcaaaaatatgctcaggcgcgttgtgcggatcttgacgtaaatattattctggaagattaccgcgatttgcatgaacaatatgaccggattgtgtctgtcggaatgtttgaacacgtcggcccgaaaaattacgccacctattttgatgtggtcaaacgtaacctgaaacccgacggtttatttttactgcacaccatcggttcaaaccgcaataaagtgaatgtggatgcctggatcggaaaatatattttcccgaacggttgtctgccgtctgtgcagaatatcggcgacagcagtgaaaataaattagtaatggaagactggcataatttcggggctgattatgaccggacactgatggcgtggcattcccgatttcaggcagcctggccgtcactggaaaataattacacaccgcgctttaagcggatgttcacctattatctcaacgcctgtgccggtgcattccgtgcccgtgatatccagctgtggcagatattatggagcccgcagggttgtgagggcggattacgcgttccacgctgaatatcctatccgcaataaactatccgcaataaactatccgcaataaaaaatccggtctgacaaaaatcagtaccggattttttttatctcaataaagtcaggcctgtggtttttccgtcggcgccggcggtgtcaggctttcctgcaactgctgcattttctgcgccagcacccgctcggtggtatcaacaatcgcctgcgtctgcggatccagctcaatattcactttatcgcccagccgttttttacccagcgtggtgcgctcacgggtttccggaatcagatgcacgcaaaaacggttattgaccacatccccgatagtcaggctgataccgtcaatgccgacaaagcctttatgcaggatatatttcatcagggctttatcttcgatgcgcagccagatctgataattattttcagagacaaagattttggcaatttccgccgtggtgacaatatggccggacataatatgcccgccgatttcatcaccgtatttagcggctctttccagattgaccacatctccggttttaatgctgccgagattggtcagtcttaaggtttccttaaccagatcaaaactgattaaatccccgtctatttttgtgactgtcaggcaacagccgttatgtgccactgatgcgcctgtttctatcccggccagcatatcaggcgggaatttcacagtgtgagtacgaaagttttctttttcttcgatggcgacgacggggcctttgccttgtacaatcccggtaaacatgcggatctccagtcagtattcggatagatttatgcagtttatcctgaaacagagaattaaacagcccttcccgttacatcccgcacatttaattgtattggcttgtatttgattaatcgctagaatgatttttccgcctgatccggtaaatgtattacgaatcccggaaagtctttcctcctccttttatcagaataaataaggtgtattacgtgcagaagtatttgaaagaagcgcgtactttgctggctcttggtattcccgttattatcgcgcagtttacacagacagcgatgggcgtggttgacactgtgatggccggcagagtcagtgcgacagatatgtccgccgtggctgtcggtacctccatctggctgcccgctatcctgttcggccacggtctgctgatggcgctgaccccggtggtcgcgcagctcaacggctccggccgccgtccgctgattgccaatcagatccgccagggtatgtggctggcggcatttttatccgtcctggtcatcgcggtgctctataacagccgctacattattgaaaatatgccgcatattgacccggtcctggctgaaaaagccgtcggattcacccacgctattatgtggggggcaccgggttacctgttttatcaggtgctgcgcagccagtgtgaaggactgtcgaaaaccaaaccggggatggtaattggttttctcggcctgctggtgaatatcccggtcaactatatctttatctacgggaaattcggcgcacctgccctcggcggtgtcgggtgcggtgtcgcgaccgcttccgtgttctgggcaatgttcctgtttatgcgctggtatgtgaaacatgcccgttcgcagcgtgatgtgcagccgaagagccgctttaccccgccggactgggcggtaatgaaacggatcacgcagctaggtctcccaatcgctctggcgctgttctttgaggtcacgctgtttgccattgttgccctgctggttgcgccactaggtgtgacggcggtggccggacatcagattgccctgaacttcagctcgctgatgtttatgttcccgatttcactggggatcgccaccactatccgtatcggctttaacctcggaaaaagttccacggagaaagcgcgtgtatccgcctataccgggctgggtgtcgggctgatgatcgcggcggtgacggcgctctttactgtgctgttccgtgaacctatcgcgctgctgtataacgacaatccggaagtagtgattatggcctccggcctgatgctatttgccggtatttatcagctgtcggattccgttcaggtaatcggtgccggtgtgctgcgcggttataaagacacgcgcgccatcttctatgtcacctttacggcttactggatcctcggcctgccgtccggttatattctcggactgacagatctggtggtaccggcgatgggccctgccgggttctggatcggttttatcatcggattaaccgccgccgccatcggtatggcatgccggatcctgtggttacagaaacagccggacagtttcatcctgcaacgcgccggtcgttaacggctttttgacgggggaaatgcacagttttcagtccgatagcattaaatacgagcagtcggacaagaaaatgtgtttttccccttgcaagagtcggttcggatcgttaatattcgtccccgttgtcagcgaagatattaaagaatgcgtccatagctcagttggttannnnnnnnnnnnnnnnnnnnnnnnnnnnnnacttcgcaaagcaattatcacacagtgcgtccatagctcagttggttagagcaccaccttgacatggtgggggtcggtggttcgagtccacttggacgcaccatttacttcgcaaagcaattatcacacagtgcgtccatagctcagttggttagagcaccaccttgacatggtgggggtcggtggttcgagtccacttggacgcaccatttctcagcagttccgttttacctcccttttgagttcatccggttttcagtcagttactctcttctgttttcattgtacttctgcgtatcaatacggctgttttcttgcgttaccgcaagaatgttaatttnctttcgttaccgcaagaatgttaatttatttctgattttatgattcaaatcacactaataaccctctataatgcctgcgtagttgttgaatggattcagcttgctgatttacaagcactgaaacagagaggcgtgataaaaaacacgctatactgaatctgtttttttacaaaaacgactaattttaataaccggggatcacgacaattgcctattcttactcatgcggtgtgaatacaggcggttgttcactatttactctcaataactgtagatgggctgtcatgaaaaagaccaaaattgtttgtactatcggacctaaaaccgaatcagaagagaaactcgaagcactgttagatgccggcatgaatgttatgcgtctgaacttctcccacggcgattacgaagaacatggtcagcgcatcaaaaatctgcgtgctgtctgtgcgcgtaccggtaagaaagcagccattttactggataccaaaggccctgaaatccgtaccattaaactggaaggcggcaatgatgtcgcgctggtggcgggtcagacctttacctttaccactgataaatctgtcatcggtaacaatgaacgtgttgccgtcacttatgcgggcttcgcacaggatctgaaaccgggcaatatcgttctggtcgatgacggcctgatcggcatgcgtgtcaaagaaaccaccgcaacagaggttatctgtgaagttctgaataacggtgaccttggtgaaaacaaaggggttaacctgccgaatgtgtctatcggcctccctgctctggcagaaaaagacaaacaggatctgattttcggttgcgaacagaatgttgacttcgttgccgcctcctttatccgtaaacgttccgatgtggacgaaatccgtgctcacctcaaagccaacggcggcgaacatatccagatcatctccaagattgaaaaccaggaagggatgaacaacttcgacgaaattctcgaagcctctgacggtatcatggttgcccgtggtgacctgggtgtcgaaattccggttgaagaagtgattttcgcgcagaaactgatgatcgaaaaatgtaataccgcccgtaaagtggtcattaccgcaactcagatgcttgactccatgatcaaaaacccgcgccctacccgtgcggaagccggtgacgttgccaacgccatcctcgacggtaccgatgcggttatgctgtccggtgaaagtgcgaaagggaaatatccggttgaagctgtcagcatcatggcaactatctgtgagcgtactgatcgcgtgatgcacagccgtctcggcgatttacaggccggtaaaaaactgcgtgtgactgaagcagtctgccgtggtgcggttgaaatgtcagaaaacctggatgccccgctgattgttgtggcaaccgccggtggtaaatccgcgaagtctgtccgtaaatacttcccgaaagccccgattctggcgctgaccaccaacgaaaccactgcccgtcagttactgctggtgaaaggtgtgaccaccaaactggtgaacgaaatcttatcaaccgatgatttctaccgtatcggccgcgaagccgcgctggaaagcggtctggccaccaacggtgaaatcgtggtgatggtatccggtgcgttagtaccaagcggcaccaccaatacctcatccgtacaattactgtaatatttttcagcattatctgaattaatgagagcacccgctgcacgggtgctttttttattctaaactgtaggggaacatgaaatgaagcaacgggccgcagaataattgccgctttctgaatacgggataataccgcactgctgtatctgtctccgcatcagattatttggttgagaattacgcaattgccgtttttttttgatttattttgcggtttcaggaaaataatctttgtaaacgctgaatttctattctctttccctattgaaatgtgtaatatcattactgctacttggtgattaactttaatctagagggtattaaaatgggtcgttctaagattgtattaggtgctgtagttttagcttctgcattattagcaggttgttcttctaacgctaaatttgaccaactggacaacgacgttaagacgctgaatgccaaagttgatcaactgagcaacgacgttaacgcaatccgcgctgatgttcagcaggctaaagacgaagcagcacgcgctaaccagcgcttagacaaccaggttcgttcttacaaaaaataatttgtaatcacgatctgaagaacaggtggcgtagcataaattatgttacgccattttttttatgcctgcgatttatgccgggcgtaaaaaaaccgcctcacaacggaagcggttttcatctgtcacagcgtaaaagcgatattactctgcgctgttttcctcacggacaatcggacccggctgggttaactgacccggagcaaaatcggccggtttcaggttcagtgctttcacttccgcttcttcgtccatttccaccggtgcaaagttggttttctctgccggtgccgcttcctgcttatactccgcatcacggctgacattcaccggcataccagagcggcgggcaatcgcctgctcaacgatggcgctgttagtgtccggagactgaataaagctggtcagtccggcagaacgcgcaatcggcatagtctgcgggtcgtcatttttattacgggacagcggctggggtacttccacatagcgctgaccatccggttcaacggcatatttcaccggctcattcacgatctgaacccgtgtacctttcggaatggttttaaacagtgcttcaatatcatgcggacgcagacggatacaaccggagctgacacgcataccgataccaaagtccgcattggtgccgtggatcaggtattcaccgcgaccgtgcgccagacgcagagcaaacagccccattgggttttccggaccggccgggataactgccggtaacgtgatcccctgagccgcataggctttgcggatattcgcggttggtgtccaggtcggatctttgatcagctgggaaactgaggtggtcatgaccggggtatcacgccccagctggccgataccaatcgggtagacccgtacggtattggtgccctgcgggtaatagaacagacgcagttccgccaggttaatcacaataccctgatgcggggtatccggcaggatcagttgtgacgggataatcagttcgctgccgggtttcggcagatacggatccgtccccgggttagcttccagcatcgccagcaggccgataccgtactcggcggcaatcgcttccagtgagcgtccgtcatccggcacaacataggtgacgttttcaccgatgacccggcccttatccgcagggagttgatattcggttgcccgggctgttaacgcagtaaccgctaacaacagcccgcccagcaacgggagaattcgtttcattccagatcctcagctgatggtataaaaaaatgcgtggccgctttccggccacgccaggtaatatattattagcagagtaagtaaaagggaacgatgttttatctcatttgctgcgtgttttgtatgattgttctgaccatggcgttcagtccctgagtacgggacggggtcagatggacagaaagtgccagttccgagaagatttgcgcgatatccagatcacggatttccgccggcgtttttccctgatacagcgcgataaccagcgccaccaggcctttgacaatcgcggcgtcgctgtcaccggcgaaccagacccgcccttcctcatcctgctgcatgatgatccagacctgactctgacaacccgatattttatactgcggctgccgctgtgcttctgtcagcgccggtaatttttctcccagctcaatcagatacagataacgctcctcccagtcatgacaacgggagaaattgcgcagtaattttgcctgatccggcagcgtaattttcatcaggatccttaacccagcagttttgcggtacgtttcagtgcgtccgtcagtatatcaatatcagcttccgtggtgtagagcgccagtgaggcacggcacatggcactgacaccatagtgcgccagcagcggctgtgcgcagtgatgtccggtgcggacagccacgccgtagcgatccagaaatgcgccggtatcaaaagcgtgatgcactccgaggttaaaggcgatcaccccttcccgctgtgcattaccgtacagaataatgccgggcacctctgccagccgcgtcagcgcatactgcatgagcgtgtgctcatacgcagctatctccgccataccgatgttattcaggtaatccagcgccgcccccagaccgataatgccctggatattaggcgttcccgcctcaaaacaccacggtacatccgcataggtaatgccgtccgtcaggctgacctctgcgatcatggcaccgccgccttcgcggggcggcatgttatccagcagggatttgcgtccccacagaataccgatgccggtcggcccgtacaacttatggccggagaacgcatagaaatcacaatccagcgcctgcacatccaccggctgatgcatggcgccctgagcgccgtccaccaacaccgccagttctcccccggcaacacggctcagttcacgcgcctgtgcaataatcgctttcaccggattcacggtgccgagcacattagagagatgggtaaagctcagcagccgggtgcggttatcgatcaactccggcagtttactcagcaccagggtgccgtcatccgccatcggtaacacacggatctcaatccccgcactctccgccagcatataccagggcacaatattggcgtgatgttccatctccgtgataatgatattgtcaccatcattgcagaacgcgcggccaaaactgtccgccaccagattgatggcttcggtggtgcctttgacaaaaataatctcttcggtctgcggcgcattgataaacgccgccgctttctgccgcaccgcttccgtggcagctgtggcctctgcacttaatgtgtgaatgccgcggtgaaccgcggcataatggtgagccgtaaaatcactcaccgcatcaatcacctgctgaggtttctgggcgctggcggcactgtcgaggtagaccagtggtttgccgttcacctccccggccagtaccgggaagtctgcccgccgctgttgtgctgaataactcattactgtttatccccctgatccagcgactgacgaatacgcgtcatcaccacgttattcaggacttcatcgctgatcgcatccgtcagttctgcagcaaacgcgaggatgatcatctgcttcgcggctttttccgcgatcccgcgtgtgcgcagataaaacagctgttcctcatcaatccgcccgaccgtcgcaccgtggctgcatttcacatcatcggcatagatttccagctgcggtttggtatcgatttccgctttccggcccagcaacaggttattgttggtcatctggccgtctgttttcagtgcatgcggtgccactttaatcatgccgttaaataccgcacggctgttatccatcacaatggttttatggcgctggcggctttcacaataccctttgttatgttccaggtacgtgcgggtatccgcgatttcgccgtgtttcggcagcacaaggctgttcatggccagcacaataccttcgccgttaagctgtgtgctggtatgatgccgggtcagtttaccgccgagcaggaaactggtgctctccacacgggcatgggcggcgatcaccaaatcattatgggcgaaatggtacgcctgcgggttttcaaaccccagtttcagatggcggaaatcactattttcccccacggacgcggtcatccgcgccccggtgaaatgggcggattgctcatccgggctgataaagtgctcaatcacagagacagcggcattcgcgccgatatcgaggtgatagcggctgtggcgcatattcagtgcgtcattatgtgccgttgaaatattcacgatatacaggggtttttccgcctgtgcgccggctttcacgcggatcattaacggtgtctgcgccaggctttcagtcaggtgcaggaaaatctcgccgttaaccggtgccgggaattcattgtgacggtcagccactgacaactcaaacacacctgtatcagtatcactccactgcggcgcaaatacaccgtccaccagcactatgcggtatgcattcagtgaggtcagcaccgcctccggtaagacgttcagtgttccggtcttatcctgataatcagcctccagcaatggtgtcagcgacgtataatgccagtcttcctgatgaaaggccgggaagccggttttctgtgcctgctgccagtgctgcgcggcgtgcccggagagcggatgctgcgcgataagctgttctatccgccccattgcggccagattgcgctcactgacttcgcggcgtttcagcgcgcgttcactgttggtcaataagccagccatatccctgctcctccagttttttcgccagtgagaaatcaccggatttgatgattttgccctgatacagcacatgaacaaagtcaggcttcacataatccaggatgcgctgatagtgagtgacaataataaaggcgcgttccgggctgcgcagctgattcacgccgttggccacggttttcagggcatcaatatccagcccggaatccgtttcatcaagaatgcagagtgacggctcaagggcggccatctgcaggatatcattacgttttttctcaccgccggagaacccgacgttcaccgcacgcgtcagaagatcctgcggcatattcagcagctcaattttatcttcgataaaatcagcgaaatcaaagcggtccagcgcctcttcaccacgatattcgcgcactgcattgactgcggtttgcaggaagaactggttacttaccccgggaatttccaccgggtactgaaaggcgaggaaaataccttcaccggcacgatcttccggtgccagctccagcaggtctttacctttaaaagtgacggatccgctgtcaatttcatactcttcccggccggccagtgtggcagacagggtacttttaccggagccgttcggccccataatggcgtggatttcccccggtttcacatccagtgataacccttttaggatttcgttaccttccacgctgacatgtaaatcttttacgcttaacataatgtactactccgtcccgccggttatcccgcaggcgctgattctgatggattaaccgacactgtgttccaggcttatcgccagcagtttctgtgcttccacggcaaattccagcggcagctcagagaacacgtctttacaaaaaccgtttacaatcatagagatggcgtcatcttcgctgatcccgcgctgtaagcagtaaaacagctggtcttcaccgatacgcgaagttgtcgcctcatgctccaactgcgcactgttattcatcacttccacgtacgggaaagtgtgtgcgccgcactctgtaccgatcagcatagagtcacactgagtaaagttacgggcgttttccgcacccggcagcaccttcaccagcccccggtagctgttctggcttttcccggcggaaatccctttcgagataatggtggatttggtattgcggccgatgtggatcatcttggtaccggtatccgcctgctgtgtgccgttggtcagggcaacagagaaaaattcgccgacagagttatcccctttgaggatcacactcgggtatttccaggtgatagccgaaccagtttcagactgtgtccatgacattttggaattttcgccctcacacaatgcccgcttggtgacaaagttgaggatgccgccttcactgtcaccgccggagaaccagttctgaacagtggaatacttcacttccgcatctttatggatgatcacttccacaaccgccgcatgcagctgataagtgtcacgcaccggtgcggagcagccttcaatatagctgacgtaactgccttcatccgcaatcaggatggtgcgttcaaactggccggttttggctgcgttaatgcggaaataggtggatagctccatcgggcagcgtacccctttcgggacataaacaaaggtgccgtcagaggcaaccgccgagttaagcgcggcaaaaaagttatcgtgattggataccacggtaccgaggtatttctgcaccagttccggatagtcgtgaatcgcttccccgaacgagcagaaaatcacgccgtgttttttcagctcatcacggtaagtggttgagacggatacggagtcaaaaatcgcatcgactgctaccgcctgcccttcgcgaaccggcacaccgagtttttcaaaggcttcttccacttcactggtcaggaaactgccagccgggctttgtaccgcccccggctgtgagccgcaggtatcatcacacgagccgcatgacggcgcggagtaataactgtaatcctgataatccagctgcggatacttcgccttcagccagtgcggctcttccatccccagccagtgctgaaaagcttccagccggaaattgagcatccactccggttcatttcgtttggcggaaatggcacggatcacattttcattgatccctttcgccagttcatccgtggcgacgttagtgaagaagccctctttatagcgtccgtcattcagccaggtctggacgtcttcaccaatctctgcattgctctgagacataatatggcttcgctcttaaaccccgaagctttcaccacacccgcaggcatgctgagctttcggattattaaatttaaatatctgattcagcccttcacggacaaaatccacttccgtgccgtcgataaacggcatggctttgcgcgggacatacagccgggcgccgtcgcgctcaaacaacatatcctctgcatccgcctgattaatcatttcaaaaacataaccaaacccggcacaaccggattgtttgacactcaggcaaagcccgatactgtccggggtgtttttcatcagtgtcacaatctgctttgcagcggccgctgtcagtgtgatacctgtccagtcattatcattcagtgaaaaagtttccaccgggttgatgctgtgcgttgtcattattgacctcataaaattcgacgggagctctccgtaaacatcatgttaatgataatatttctcacttcaaccacttgctttgaaaggatattccgattactgcttaaataatagacaaacctgtcaagcgggcgttatcatttttgagcggaaaatgaattaatcttttgtttataaaagagattatttatcaatggtaaatgcttattaccgtactgggcagtacagtatcaatggcacaaaaggatcattataaatgcgacttttgcagagaagtgccggtacacggaaattccgggcggaattcacgcaataccggctgatatgttgctcagatgttagtttttcgacccgcgcaggatcgcggtggtcagacgggaaatacagcataaccgctgctgttcatcaaaaatctcaatagaccagacctgctggttacgccccagatgtatcgccttacaataaccggtaacaacaccactgcgcaccgcacgcacatggttggcgttaatctcaacaccgaccacggtttcatccccttcactgcacagataaccggccactgagccgagactttccgccagtaccaccgatgccccgccgtgcagcaggccgtgcggctgtttggtccggtcatcgaccggcatcgtcgcaatcagctgttccggctccactgccgtaaagacaatgcccaggtggctgagcatattcccttccgagatgcgattcagttctgccggtgttgcaggtcgtttccatatcattaataagctctccgcgtcgtgttttatcccgctgtcaggataccagtgtcagcagcgcctgcaacgggtgcagcatcactttgccttccatccgttttacctggctcctgcaggagtacccggtggtcaggcagcgctctgacggcagtgactggtacggctgcgcccaggaaagctgataaattcctttcgagcgtgcaaggttcggcatctcatgaccgtaggtgcccgccataccgcagcagccggtgctgacagactgcagtgttgcgccaaaccggcggaacagattttgccagattttcacactgtccggcagcgcggtggcctcggtacaatggctgaacagataccaggggggagtatcctcactgatatctttcaccggtaataaatccgcatattctgtcagaaattcatggactaacatcacgcggaactgctgtttctccggtggcagaacagttttgtattcatcgcggtaacagagcaccaccgccggaccaccccccgccatcgggcagccgagccgcgcgacccggttgaggaaatccgctgttttgtttgccgtacgggcaaagcgggcgagaaaacctttaatatgctgcgcttttccgttcgggctgaacggcaacagcaccggctgaaaaccaagcttttccgtcagtgcggcaaaatcggccaccacttttgcgtcaaaatagctggtgaacggatcctgaacgataaagagatagcgcccggcccggcgctgttcctcactcatactttccagcatttccagggtgacggagaccgcgttgctccccgccagctgctgtttcagtgacggtgacgacagcagcggtaaatcggtcatgcccactgttttttcactgagtttctgcacccacggctgtttcaggaaaaagttaaacaccttaggtgctttcgccatcagcggtgcaccggcttccacgtttgccaccagatggtcacgcagtggccgcagatagcggccgtgatagagtgccagaaacctggcgcggaattccggcacatcgattttaatcgggcactgtgtggagcaggctttgcaggccagacaaccggacatcgattccttcacttcatgggagaaatcatattccccgcgtgaggcccgccgcgtattgccgattttttcaatcagaccacgcagagagatccggctctgcggtacggcctgtgataacagcgccgggtccgtgccctgctctgccagcagccgcagccactcacgtaccagtccggcacggcctttcggcgagtgaaagcgcgattgcgtcactttcattgacggacacatcgggcttttgacatcaaaattaaaacacaggccgttgccgttacagttcattgcccctgaaaaggtatttctgacctcaacggggattgttctgtcataggtgccgcgcttgatcgcatccacctgcatcattggtgcgtcactggttaacggcgcacaaattttgccgggattgagccggttttccgggtcaaatgcccctttgatacggcgcagttcgcgatacagcgtgtcaccgaaaaaagcctcactgtactgcgcccggaaccctttaccgtgctcaccccacagcagcccgccgtatttggcagtcagcgcgacaatatcatcggaaatctgcttcatcagcatttcctgttccggcgagcacatatccagcgccggacgcacatgcaacacgccagcatccacatggccgaacatgccgtattccaggtgatgactgtccagcagcgcgcggaattcggtgatgtaatccgccagatgttccggcggcacacaggtatcttcgacaaacgggatcggttttgccgcccctttactgttaccgagcaggcccaccgcttttttgcgcattgcataaatacgctcaataccactcagttcacggcagacctgatagccaatcacacccgcttcattatttgcaattaatgaatccaggcgttcacacagtgacgcaacctgcccgtcaatcagtgcttcatcatcaccgcagaattcgacaatatttaatcccagcaaggtcttatccggcacatccgtgatcaattcactgacggaatgccagacgatatcttcccgcgccagattcagcacttttgaatccacggtttccactgacagcgcctgagcctccaccataaacggggcattgcgcagtgcggaatcaaatgcatcatatttgacattcaccaggcggcgcacttccgggatcggcgtgatattgagttttgcctcagtgatcaccgccagagtgccttccgagccggtcaggatgcgggtcagatcaaaggtctgcatatcatcactgaagacatggcgcagatcataaccggtcagaaagcggttgagcttcggaaagctgtccagaatggtctgccggtgagtttcacagctttccagtgtggtacggtaaagttctcccgctgcactttcctcctgcgcacagcgccgcgcctcactgaccggcagcggcgcagtatccagcagctcaccgttaagcagtaccgagcgcagccccagcacatgatcagaggttttgccgtacaccagtgagccctggccggaagcatcagtattaatcatcccgccgagggtggccctgttggaggtggataactccggtgcgaaaaaatagccgtacggtttcagataggcattgagctgatctttaatcacgcccgcttccgcccgcacccagccctgttccgggttaatttcaaggatgcggttcatatagcgggataaatcgatcaccacaccgttattcagcgactgaccattagtgcccgtaccgccgccgcgcggggtaaaggtaaccgaacggaattcatcctgtgcggcgaggcgcatcaccaggatcacatcagcggtcgaacgcgggaaaacgattgcctgcggcagaagctgataaatactgttgtcggtcgcgagtgtcagccggtcgccataacgggtggtggtatcgccggtaaatccgctttcattgagggcgtgaatataacgttcaaccgccgggcttacctgtggggattgcgttaatcgtgggatcattatctgcggctcttttatcataaatggtcacattgcaaatctgacaatataattatgtggttaactcttcattctgatgcatgattcatgcgagaatattcaccttaacacacaatgtattcattttgcgcctgcaataaaataacgcaatatttgcgctcctttatcgggaacaaccagttaattcatttacaaagggaaacttatccgtggaaaaatcgcaaccgggttatgatttacctaaactaatattcgccgtcggagcgatatcaattctcattgtcattagtttttgggtattaagtccgttccttccgggcttcgtctgggcgggtatgatagtgattgccacctggccggtttataccgcaatccgccgccgtgtccgtaacagccgctggatagccgcatctgtgatggtcatgctgattattctgctgtttgtctttccgctggcgctgcttatcaacagtattgtcgagaacagcgagccgctgatgcgctgggttaaatctcccggccagctgacactgccggagctctactggcttgactcaatcccggttatcgggccgaaactgtttgccagctggacaaccctggtcgccagcggcggcaacgcgatgatggccaaaatccaaccttacctcggacagggcgcggcctggttcctgactcagctgctgagcgccggtaaattcctgttccatctggcgattatgctgctgttcagtgctctgctctatcttcagggtgaagaagcgatgcgcggtttccgtcactttgctctgcgcctcgccggcatgcgcggtgatgcagccgtactgctggcagcgatgtctgtacgcgctgtggcgctgggtgtggtggtcaccgcactgactcaggcaattatcggtggtctggggctggggctggccggtgtgccgtttgccgctatcctgacggtgcttatttttatctgctgtgtggcgcaactcggcccgctgctgattatgatcccgtccatcatttatctgttctggaccggagataccacctgggctgtcgtcatgattgtctgggccggtattgttgccaccatggatggtgtactgcgtccgtacctcatcaaaatgggggcggatttaccgatggtcctgattctgaccggcgttatcggcgggatgttatcgctcggaatgatcggcctctttatcggtcctgtcgtgctggcggtttcttacacactgctgaaagcgtggatgaatgatgtgccgaagccgtcagatgacctgaccgaggttcgcgcttatatggaagaacaactctcagaaaaagaataagtttttaatcagaggtgcagaaatgcacctctgatatatttaattaattattcaattatggttcataaatagcattaataatttgaaatattaatatacattgagagaattgtaccggacttattccggatacggacagaggttctgaatatatttcacttatctaacaatcagtaaatatatatattgagacaattcttaatgcaggcatatcttaattattttaatatatcagccatcaagtaacgaattaaaaggtattgttattcattacaatgataccttccgaatacaaatattgctgtgtgtagtctttgcctgtcagcccatgataggctttttttttgcctgtaattcagggtatctgatttggttttattttgatttgccttaagtgcgcacagacattctaacactgaatacgaaaaaaaagcccgaaataatccgggcttttaatcattttaaatgattgaatcagtgattttctgctaatgaaatccaggttttcactacagtatccggattaagagaaacactgtcgattccctgctccatcagccaggcagcaaaatcctggtggtcggatggcccctgaccacagattcccacatatttgttacgtgctttcgccgctttgatagccatcgacagcagcgctttcaccgcatcgttacgctcgtcaaacagagtggaaaccacaccggaatcgcgatccagacccagtgtcagctgtgtcatgtcgttggagccgatagagaagccatcgaaatactcgaggaactgatctgccagcagtgcgtttgacgggatttcacacatcatgatcagacgcaggccgttttcaccgcgtttcagaccatgaaccgccagttcattcaccacggcttctgcctgtgccacagtacggacaaacgggatcatcacttcgacgttagtcagatccatatcattacgcacacgtttcactgcttcacattccagagcgaaacaatcacggaaatcatcatgcacataacggcctgcaccacggaagcccagcatcgggttctcttcatgcggttcgtagatatctccgccgaccaggttggcatattcgttggatttaaagtcagacagacggacaatcactttcttcggatagaacgccgctgcaatcgtggcaatcccttcaaccagacgaccgatatagaattcaaccggatcatcatagccctgcatcatgctgcggatttcagcctgtaattccggagtctgctgatcaaattccagcagtgcacgcgggtgcacaccaatcatacggttgatgataaattccagacgtgccaggccgacaccttcatgcggcaggcaggcaaagtcaaatgcacggtcagggttaccgacgttcatcatgattttggtgcccacttccggcattttatcgatttcagaagagtggatatcaaaatccagtttgccgccgtagacgtaaccggtatccccttcagaacaggaaacagtcacttcctggccttctttcaggagttcggtggcatcgccgcaaccgaccaccgccgggatccccagctcacgggcaatgattgccgcgtgacaggtacgaccgccgcggttggtgacaatcgccgccgctttcttcatgatcggttcccagtcagggtcagtcatatcagtgactaacacatcacccggctgaatacgatccatctggctcaggtcatggataactttgaccacaccggcaccgatacggtgaccgattgcacggccttcaaccagcacattactctggccgttcagctgataacgttccatcacctgctggttagagcggacggtttccggacgcgcctgaacgatatacagtttgccgttgttaccgtctttcgcccactcgatgtccatcggacgaccgtagtgtttttcaatggtaacagcctgttttgcaagttcttccacttcgctgtcggtcagtgagaaacgtttgcatttttctgcatccacatcctcaatacgcacctgtttgccgtggctggtgtcatccgcataaaccatctggattttcttggaacccatggtgcggcggacaatggccggacggcctttttccagggttggtttgtggacataaaactcatccgggtttaccgcgccctgcaccaccatctcacccagcccgtaagcggatgtgataaagacaacctggtcaaaaccggactcggtatcgatagtaaacatcacgccggaagacgcgaggtcggaacgcaccatgcgctgaacaccggcagacagtgcaacaccacggtggtcatagccctgatgcacgcggtaagaaatcgcgcggtcattaaataatgaggcaaatacgtgcttgattgcgaccatgatcgcatcaataccctgcacgtttaagaaggtttcctgctgtcccgcgaaggaagcgtccggcatatcctcagccgttgcggaagaacgcacagcaaaagatgcacctttctcgccttcggacagctgttcatacgcgtgacggatgtcctgctcaaattccgcggagaacggggtatcaattacccatgcgcggatctgcgcaccggctttcgccagctggttgacatcgtcaacatccgttttatccagcagctcataaatgcgctggttgacgccactttgctcaagaaagtcattgaaggcctgtgccgtggtggcaaaaccattgggaacagacacgcctaatccggaaagattggttatcatttcgcctaaagacgcatttttaccaccgacacggggtacgtcattcatacctaactggttataccaaagtacattacacggggtttgaccattgttggacattgcaagcaatccttttaacattcaaaagaaggtaaaatcggaaatacgggctctgctgagcatcagaaacagattatcacaatgtttgtaagaatatagacaggtgaatcgatcaacccgattacaatatttttttatcctttataatcatgttttaatttatttgtgccgttgctccggattatcgattcagcaaaaaacataggaaaataaataacatgtctatcacaaccggctcatcttctgatacacaaaataaagaaacacggagtgtcttctttatttctgacggaacggcaattacggcggaagtattaggtcatgctgtattgtcacaattccctattgatattatcgcttacaccctgccgttcgtggcaactgtcgagcgcgcgctggaaatcagacaaaaaatcgataccatttttgaaaccaccgggttacgccctctggtgttctactccattatctgtcaggacgtgcgcgaagccattaccggcagtcagggctgctgccaggatatagtgcaaaccctggtcgcgccgattcagaaagagattcagatggatccgcagccgatattcaaccggacccacggtttatccaaacgtaatctgagtcagtatgatgcccgtatcgcagccattgatttcgcactggcacatgatgacggcgtctctctgcgcaatatggatcaggcgcaggtcattctgctcggcgtttcccgttgcggtaaaaccccgaccagcctgtatctggctatgcagttcggtatccaggccgccaactatccgttcaccgcagatgatatggataacctgcagctgcctgctgccctgaaaccgtataataataagctattcggtctgaccattgatcctgaacgtctggccgctatccgcgaagagcgccgtgaaaacagccgctacgcctcaatccgtcagtgccggatggagctggcagaggtggaagcgctgtaccgcaagcacaaaatcagctacctcaataccaccaactattcggtggaagagatatcgacaaaaatcatcgattctctgggattaaaccgtcgtatgttctgacagcggaaacggttaagtggatcacattcccccagtgatccactttctgcaattgtatcttgtaatcatcacgttttcgtttattgtgatcggtatcactgtggtttaacacagcaactgaccgaattcagagacagcactaatctatggaaaaaacggatgaactgcgcacacgggcgatagacaaactgatcaccccgtccgcgctggccggtgagtttccggccacagaagcaattaataagaatgtcaccacatcacgaacccgcattgaacgtattttaaccggcgatgacccgcgtctgctggtgattgtcggcccctgctccgtgcatgacccgattgccgcactggattacgcacagcgtctgagcgaactgctgccgaaatacagctcacgccttgaaattgtgatgcgcacctattttgaaaaaccgcgtaccgtggtcggctggaaaggactgatttcagatccgcgtctggataactcctgccaggtcaatgaaggtatccggctggcacgcaaactgctgatcgacgttaatgcactgaatgtcccgacggccaccgagtttctcgatatggttaccgggcagtatattgcggatcttatcagctggggagccatcggtgcccggaccacggaaagccagatccaccgcgaaatggcctccgcactctcctgcccggtcggcttcaaaaacggtactgacggcaatatcaaaattgcgattgatgccatccgcgccgcacaggccggtcatatgttcctgtcaccggataaagacgggcagatgacgatttatcagaccaaaggcaatccgttcggacacatcattatgcgcggcggcaagacaccgaactatgctgccggtgatattgctcacgcctgtgatcagctgcgccagtttgatctgccggaacatctggtgattgatttcagccacggcaactgtcagaaaatccaccgccgccagctggatgtcgccaaagatgtcgcacagcagattaaagacggctcacgggctattgccggtgttatggccgaaagctttattcaggaaggcacacaaaaactggtaaatcacaaagcaccggtttacgggcagtcaattaccgatccgtgcctgagctgggcagataccgtcaccatgctggatattctggctgatgctgcggatgcccgtttcagctgattaacacccttattataaaacaggatgcacctgcatcctgtttattcatcacccacagttatcattcctcccccatatagttgagataccgctcactttttccgtgtaaattcctcctcccggaaaaaatcacttgaaccggtttcgtcagctgctgataataatttgcgaatgcgaattgatatcaaataaaattatatgactgaaaataatcaaaattctgcgatatccgtacttcccggatataaaaatacaacaacagataaaatcacggttgtcagcagtgaggcactcctgggaccacagcagcggattatcatccgccaccagaatgaggaatatcacctgcgccggaccaaaaacggaaaactcattctgaccaaataacacacaggccagccacctgtttccttaaggcagccagcttactttttaataccggttctccggtctgcgccggtttggtgcagatcacgaaaaagtaaggatctgctatgcacagtgaaacactctcccgttacctcgccctgaaagaacagggacatcttatccacgcccgtgatatcgccgcggagatgggcatatcagaggcagaactggcacactgccgggcctgttatgatgcctgccgcctaaccccggatatccccgccattttccggctgctgggcaccgccggggaactgaaaggcatcacccgcaatgaccacgcggtccatgaacataccggcacctatgataatgctgaattcggggaacacgcctgcctgctgctgaacccgtacgggctggatttacgctttttcctgtctcagtggcagacggtatttgccttcgcggaaaatactccgcgcggcctgcgccacagccttcagttttttgatcgccacggggatgctgtccataaaatttacaccaccgctgataccgatatgggtgtctggcatcacctgacagcacagttcgccgcgtatgataacccgccggttgttccggaaccggctgtcatcccggcctgtgcatcattgacaccggagcagcaggctgaatttacccgtcactggcagcaaatgaccgatgtccatcaattttttgttctgctaaaaagatttaatctcagccgcttgcaggcattccgttgtgtggataacaccctggcacagcgggtggataacagcgcgttgtcacgcctgctcgcacagtgtacggaagaacagaatgacattatgatctttgtcgccaaccggggctgtgtacagatttttaccggtgtcgttgaccgggttgagccttatatcagcccccgcgacggacagcactggatcaatattttcaatccggcattcactctccatctgatcgaatcggctgttgcggaatcctggattacccgcaaacccactaaagacggcattgtcaccagcctggaattatttgataaaaacggtcaggctatcgcccagctgttcggacagcgcaccgagggtgaaccggaacaaacgatctggcgcagtcagattaatgccatgctgacagactgcagcggtgaggcggcggcatgaaaaaatatgtcctcctgctactgctgctctgtttttttccacctgcacgcagtatgcagggcagcattattacccttggcggtgatgtcacggagattgtttttgcactcggtgccggtgacagggtaattgcccgtgataccaccagcgagcatccgccgcaggtcactcagttgccggatgtcggctatctgcggcttctgaatgcggaaggtctgctgtcgcttcagccttcactgatcctcgccagtgaactggcttatccttctgccgttttatcgcagatcagcgcggcgggtatccctgtcgtcactgtcagtgctgcggcagaactaccggctattaccgcgaaagtccgtcagattgcggaggctctggccttacagtcagccgccgctgtactggtcgctgacattaaccggaaactggatgctgtaccgcagacaccactgccggtgaatgtactgtttctgctcagccacgccggtactgctccgatggcagccggtacagatacggcggcagacagccttatccgcagtgcaggcggaagaaacgcagccgcttctttccgccgttatcgcccgctgtcagcagaaggaatgattgccgctcagcccgatttagtggtgatcacccgcagcggtctggcttctctcggcagcaccggcaatctgtggcagttaccggggctggctcagacacctgccggaaaacataagcgggtattggtggctgatgatatggggtttctcggcttcgggttacaaaccccggatacactgcatcagttacgtgaagcgatggaggcagcagccgtgttatgaataatccgcccgcctttcatctgcgccgcctgtgcctctgttttctgttggtgatcatgatattgacggccatgaataccggcggactgccggtttctgtcagcgcattcctgcggggtgaagtaaccccgcaactctggcagatctggttatctgtccgtctgccgcggattgttctggcagttctggtgggcatggcactggccaccgccggagtattattacagggattattccgcaacccgctggcagaccccggtttgctcgggatcagcagcggcgcagccgttgcggtggcactggggattgtctttatcgcgccttatctgaatggtgcggtcacactgtatctgcatattattactgccttcagcggtgcactttgtatcagcggactgatttttctgctcaaccgccgccgtcagcctttgctgcgtctgttactgtgcggtattgccgttaacgcaatcagtatgtcctttgtcggcgtgctcaattatctgagtgatgataaagaattacgtcagttttcactgtggatgatgggcagcaccgggcacatcagctggactctgcttctgcctgctatcgtactggcactccctgtgttttatgccgcattcagactggcacgtccgctggatatgattcagctgggagaagaagaagcgcattatgccggagtgaatgtccgccggacacaacagtgtgtcctgctgatcagtgccctgctcaccgggattgccgtggcactgagcgggattatcggttttatcggcctggttatcccgcacctgatgcgtatgattttcggctggcaccaccggcttctgctggtgacatcagcccttgccggtgcactgctgttactgctctccgatacactcgcccgcacaatggtggtaccggcagaaatcccggtcggattactgaccggattacttggtgcaccctattttctctggctgattttctctgtgaaggaatgatatgccccgtataaccgtcaataatccgccaccggtgctggttgcagagaatgtcagtttttcccgtcacggacagccggtagtcagtgatatctccctgactttgcactgcggaaccatcactgcggttaccggcccgaacggcgcaggtaaatcaacttttcttcgtttactcagcggctattatcgctgtgacagtggtcagatcatgctgcgcggaaaaccaatggcgtcctggtctgccggtgcactggcacaaatcagggcggtcatgacacaacaaagtgttatctctgccccctaccgggtcagagatattattgcattgggggatttgcacagagagtacacacaccaatcaaccacagatgaagtgatacacctgacggcctgtgaaccactgctggagaaacgctggtatcagctttccggtggtgaacaacagcgggttcatctggcgcgcgcactgatgcaactaagctgtccgctgcctctccctcgtctgttattactggatgaaccgactgcagcactggatcttcatcaccagcaacacctgatgcggatgctgaaacagcgtgtaagtgcaacctccctggcggtcttctgcattctgcatgacctgaatctggcctctttatatgctgatcacgtcataatgctgaataacggccgcattgtccgtcagggaacaccggccggggtgctgcaaaaaacggtactggcggaaacttatcaggcagacctgataacgctccgccatccgcttaccggcaatacatctgtgttacttgcaccttaatgttgatcaggttttgccgtaacccgttgtttgcggcaaaacatgattgctgaaagcagacataaggtgtagccgagtaattcacagccttcttcggccaggttttttgccagccggttaaaatcatcacccatcataccgcgccataaaattcccataccgaacaggcgggaaaaaaccagcaccaccagcaaaccggtaaccatcatgccgtatgccggatgagagacaaaacggtacagcccgttaaccgccgtgcgcggatgcagaaaagcatagataatcgcaatcagtgaaaccggaacagcaaaccagaaccatgccccgtgggaaatatagtcaaaaatctgatccaattcccggatcagcatactggcaaaaaatccggctatcagaaaaaagcccgccctgtcctccggctcccgcagccctttgcggaaaaacagcacaatcactgccagcagcatcacctcagcaacaatttctgtcaccgagtcttcacccaaatcattcttaagaaccagaatatcaacaaacaacagacctgtactggcagccataatcagtgccagcataaaaaaacgtcccattgccccaaaaagaaaccgaaattgctgtgacataaccatcctgaattatatttatcgtcggaagattctatcgatattgaaactataattggtgacatatggtgctatatgctggtaataaaacaattggtttcatctattggtctgataatgattctcaatcatgaaaggcacgatttgcctacacaattcttggaaaattcataaaatatggttaataacatatgtgactattaaaatttatagattgtaagcccgattttgggaggtgaacatgtcagaaagtgtagtgaacgatattatcaaatggctggaaacccagttacagcgcaatgaagggatcaagattgatactattgcggataagagcggttattcaaaatggcatctccagcgtattttcaaagatatcaagggatgcacattaggtgagtatgtccgtaagcgccgcctgctggaagcagctaaatctctgcgcgataacgatatgtctattctggatatcgcgttgcagtatggcttcagctcacaggcaacctttacccgcatctttaaaaaacatttcaataccacaccggcaaaattccgtgatcacggtcagttgccggaaccgcgctgttttatggagtgcggttcacactaaacagctgaaaaaatatccccgcctgccgcaaccggccaaacggggatattttttattctgctgctatcacgccgcaggcaatccgagcgccgccaccacctaatggtgccggtgaatctgaatgattgtcaccgcccgcatgaaccataatggcatgccctttgatctctctgagttttttaaggcgtggtgccagcacctgcgtggtcgctttcccgtcatcagtcacatacagtgccggcaaatcgcccaaatggccgtcagcatatggcccggcatgaacttttgtacctgccgggtcaaaatggccgcctgcggccagggcaggtaccggtttaccctctttctctgcagcatcacaggacggattttcatggatgtgaaacccgtgcacgcccggcggtaacccattcagcgccggtgtaaacagcaaaccataatccgtttcctgaatatcaatagtgccgataaccttaccggcacctttttctgtcgcttcatgcagggtaacgcgctcagttgcagccagggaggttgatgcccccatcaggattaacaacggaatgagttttttcatcatatgctccttcagtttattattcctcacctatcctacggcaccgacccggattgtctttcagattaacggcatattttactgaagctctgccaccaaccagtcccgcaactgaattagctcatcgtgcatgtccggataaccggccatcagctcagtgaataccgccgttacagcatcagcgctgtaccgctgaccggtcagcagttgtgccagttgctccagcggggccggatcaagactgtcagtaaaaatctgcgccctgctgataatcccgcgctccacatcaaaatgcagttcaataccgccccatttaaagcgggtatccagcagatggctgaaggccggtgcattgccgaaattccagtcccagttgctctgtctggcaaaggtctctgcaaatcccggcagatcgggaagtgaatccggtgaaatcagttccgcgtccgccttttcgccgtaatagtcgaagaacgcagctttaatcgcttcgcacacctgctcatggtcaatcccgggaataatttccgtcagattggtcacccgcgagcggacagaagtgatccctttggcctgcaatttcttcggatccggattgagataatccgccagacggcttaaatccgcattaattaataccgtgccgtgatggaagccgcgatctttggtttcccggtacgccgagccggaaattttccgctcaccatcttcgcagttaaccaccagatcattacggccggatgccgataccgaaataccgagccgggataaaccattgagaataatattagtggaaaccgttttgtcatattccggttttccggccataaaggtgaaattcgtatttcccttgtcgtggaataccgccccgccgccactgctgcgccgggctaatttaatatggtcggattccattttgcgggtattacattccttccacgggttttgcgcccggccgataaccacagtgtcattgttgcgccataaaaacagcacgcgctggtcagcaggcatctgccggaaaatacactcttcaacggcaaggttaaaccacggatcaaaggaatcagaaataaaaagacgaagtgacgacatgttgtcccccggaaaaaataggctgccgataagatagcatatttatcccggtgattttaaagtctgcgcgcctgccagaagacttttttccagtaaacgttatccaggctggaccgcatcactcctttactggtcgaggcatgaataaaggcacggtcagaatcataaataccgacatgtaacccgttctcaccgccgccggttttaaagaataccaggtcaccgggctgtaaatcctcaacatcgatccgggtgccgtaggttgtctgcgctttggtggttcgcggcagagaaatagcaaagcggtcattaaatgtccggtagacgaaaccggaacaatcaatgccgtttaaatccattccgccgtaatgatatggcgtgccgtaccattgcgataattgttcccgcaattgggcaatcaccataatcgggtccgataattctgtttttatcggcggtgcatgatatttacgcggcgttgatgaacagccgacaacggctaatacgcagataaaaagcagagaacggaatatgattttcattgtattatccccggcacggctgaccttcaacccgcaatactgtattaatatctgcgggtgaaagtcaatatttgccgtattttaccgggcgttaaggcattttccggtaataaagtaatgtcaggttttcaccagtaataaattcatccgccggagaaacatcctcttcatccagcccgtgacggtcacgcaggatcagcgcgacattaccggttttacgggcattcttcagccaggattcaaaatcatcgtgtgcaataaattttgatctggtatccggatagatatcactcagcccgtatttcagctcacccgggcggtcaaacatataaatatcactgcgctgtaattcccaggccgctgaagtgccgacacccacactgttaaccagaatataacgggcatctttcagcagcgcgatattattctgaataaaaatctgcggtaaatttgcccgttccgtccggcccggcagcaatgagctgacagataaactgatcgccacggtacaaaatgccgccaacatccagtaacgacacccttttatcagggtgaacaccgaaaccgcaatccagaacagaaaaattgcaatggcgccgataaattttccgcgctcatccgcagaatataccagggtattttccaggttatttatcaccagcagagcaacaactgcgcaactcccgaaaataatattgatcaccgcgttcagtttaaagattgatacggcttgtttctttatcagagtatggatatacgccgccatcagaatcgtcagtggcgcgataacaggcagaatataggtcagtaattttcctttggcgatactgaaaaataagaatggtaatactgtccagcacagcaggaagaataacggcttattttcacggcgctgctgccagccctgttttaatgccccgaataaaaaaccactccagggtaaaacaccggcaaacagaatcggaataaagaaccagaacggtgagagattttgcgcctctttactcataaaacgctggatatgctcaaccatcacaaaatagcgccagaaatcgggctcggcgtgatatatcgccagtgcccacggcagtgtgataagcccggcggccgcaattcctgcccagcaataacagagcatggttttaaaacgacgatagaaaatatgcaccgggatcagtgcaataaccggtaataccagagccagaaagccttttgtcatcagcgccatgccgcaggccagcccgaaggtgatccagtagcccagcaatgcacggcgtgactgcgcggtggtcaggccataactgaggtaaatcaccagtgtgacccacatggtcagaatcgggtccagcgtgctgtaggtcccgagcgcaagcaccagtaacatactggcatacaggaaggccgctgtacgggcgatgactttctcatcccacattttcattgccagccggtaaaccagcaaggtgctgatcatcgtcgagaacaggacaccaaaacgcactgcaaattgtgtgtgaccaaacagcatctgactgatgttatttacccagtaacccgccaccggtttttcaaaatagcggatatccagcagatgcggcaccacccagttgccgtcagccagcatttcccggcttatttccgcatagcgggtttcatccggctgccataacgcacggaattccaaaggaataaaataggtcactgcaataaataacagaaataacacagcccacattgcggcagacggatacgccacattaaacgcggacttacggctggtaacgtccaatataacctccggacaaggatacaatttcataacaataaggtaactatctctgttacttccattaagaccagagccctgcagaataattcacggaagaacaggatatttttgttatacaagaaagaataaaagggaggattaattcaggcttaacggttaatggcggcttaataaaacagtaaaacgccccgtaactatgcagcaggcttctctttgctgtggatcagacgcacaccaaacagaataaaaataataccgatgctctttatcagtgacaccccttcattaaaccagggcaggaaggcagccagcagatagacaaacacataactcagactgataagcggataggctttattgagcggcaaatcccgcagtgcgagcagccagcacaccattgacaggacataccccgccaatccggcgaaaacgactgcaaacggctgccactgagtcaacagccagcggatatccagccattgtgaactcagtgcaatatcgggtaattgtgtcacacccagtttcagcagcagctgagcggcggtgacaaacagcacactgccgagcacccagagatatcctcgcatcagtgtcccgctcccatcagaatcacgccggtgacaattgctgccacgccacaccagtgtctgcgggtcacccgctcaccgtataaaaactgtgccaccagggtgactaccacaaagttgatgctcagcatcggataagcgatattcagcggcataacctgcaggagtttcagccacagcagcattcccaggccaagcagaaacaccgccagcaccagccagtacaggcctctgcgttttgcattttcctgcgccgcctgccagacatccaccgcctgtttctggcagatctggccgccgcaggtaagaaaactgacaataatcagtaaaacaatttgcccgaacaccatcacaccttatggctgtttatcatagatatagagggtcatccggctgttttcggtccgtttgtccgccggcggcagtttagcatcgtaggtatcatttttatctgttaccagcagtgcgacctgcccttttttgcgggtttccgccagccagtctgcgaaagtcgcatcattcagcagccggtattcactgtccggatatttcaggccgtaagtcagctcaccggaattattcagcaggtaaatatcaccgcgtttcagctcccaggccagcccggcaccgatgccgacactgttactgacaataaacggacttttttccagatcagccatattctggcggataaacgcctgcggcagtttggaatccacggaacgatcaggtaccgcgctgccgaatgtcagactgatcaccagtgagcaggaagccgcccacagccagtgttttgctttcagcagataacagagatacccgatgatgccccagatagtaaaggcgacaatgcccagtaccactttggaccattcatccggctgatagattggttttttcaccagataactggcaacgatcagcccggcaacggccaccgcaccaaaggtcaggttcagaataccgttcgcctgtaatgctttcatccggtgtttacgcacacagtcaacgccgtatttggcgatcatgaccgcgagcggtgccatcagcggcagcatataggtcggcagtttacctttggcaatactgaacagcaggaacggggcaacaaaccagcagaacaggaaaaacatcggcggattattgcgccgctctttccagcctttaaacaatgcgccgggcagtaacgccagccacggcaggcaaccgagcaggatcaccggaatgtaataccagaccggcgaggcgtgctgggcatcttccccggagaaacgctggaaatgctccaccacaatgaaatagcgccagtaatccggttcctgctgatgaaccgctatcgcccacggcaggctgatcagcactgcgcagatcaccgccagcggaccgaatttcagtaactcaaggaaacgccgctggtacagcatcaccggcagcattgccaccaccgggatcgccagcgcaaggaaacctttggtcataaagcccataccgcaggccagaccaagcagacaccaggaggttatcctggttttcacattttcggctttcagtgccctgaagctgaaggccatcgaggcaatcacccacatggcaaacatcgggtcgagcacactgtatgtgccgacactgaacaccagaaacatggaaacaaagaccagcgacgcaacaaatgccgtgtgacggttgcgccacatcaggagggtcatccagtaaaccagcagagtgctgataaggatgctgaagacagagcctgcacggacagcaaaattggtatgaccgaagaccagctggctgacattattcacccagtaaccggccaccggtttttcaaaataacgcagatcgagtaatttagggacaacccagtcgccctgtgtcaccatttcacggctgatttccgcataccgggtttcatccggatgccagagcagacgatcattgatcgggaaaaggtaagttaacacgaaaaaaagagccagcagaaaggctccgattttactcgcccggttattcagcatgcaatgctatccctcttgttggcagcccagccacccttcccggccggggaaatcaccccgtaccactttgcctgtcggtaatgttgataaatcagacggcagcagttcactgagcggacaaaagcggaaatcctcatttttaatccgatccagcaacgcctcaaactgtgcggctttggacatgccttccacttctgtgtggatagtatagaccggtacgccctgatcccgtctgattgcatccagaataaagtcgttgaaatccgcatcagccacctgcggccccaccacttcatcataggtcggcagtgtaacaggaatctgcacggttccggtagtcccgtctgcaagaagcggacgaaacggatgcgttccgcggcaatcactgttgtaggcaaaaccaaacgcctgtttggcttcaatcacccgctcatccgcgcgccagcccgctaccgcagagcactgcaccggctgtccggtagcctgtgataaggcatcggtacccagacgaatctgctctgtgatttgtgccggtgtccagcggccgatttttgcctgccagccctggtgatcccacgcatgcaggccgacttcatgaccggcatccagcgtctgtttcatcaggtaacccaggtcacgggctattttcttacccggccacgctgtaccggccagcagaatatccaggccgtataatgaagccgcattggagcgcagcattttccacagaaacttaggacgcaaaaggcgccacaagtgacgccccatattgtccggcccgacgctgaagaaaaaactggctttaatatcgtgctgcgcaaataccttcagtaactgcggcacaccttccagtgtgccgcggtaagtatccacgtcaacccgcaggccgacatttttcattactcgtcgttcctcagctcttcaaccgcaccgcgcaggaagaagtcgagagtttcttccacagtctggcgggtatcgatagtcggtttccagtccagtaaacgctcagcgtttttgatgcttggtttacggtgttccacatcctggtaacctttaccgtagtaagtgctgctttcgattttacggaagccggcaaacggcgggaagttatcacgcagcggatgtttctcgaagcagtcgagcagcatttctgccagttcacggatactcgcttcgttcaccgggttaccgatgttgatgatctggccgtcacacttgccatcgcggttttcaatgatgcggaacagggcttcgataccgtcatggatatcagtaaagcagcgtttctgttcaccaccgtcaaccagtttaatcggtgaaccttccaccaggttcaggatcagctgagtgatagcacgggagctgccgatacgcgcggagttcaggctgtccagacgcggccccatccagttgaacggacggaacagagtgaatttcaaaccttctttcgcgccgtatgcccagataacccggtcaagcagctgtttggaaacagagtagatccagcgctgtttgttaatcgggccgacaatcaggcgtgaattatcttcgtcaaactctttatcatcacacataccgtacacttcagaggtggacgggaagatgatacgtttgttgtatttcgcgcagtaacggacgattttcaggttttcttcgaagtccagctcgaacacgcgcagcgggttacgggtgtactcgattggtgtggcaatcgccaccagcggcagaatgacatcacattttttgatgtgatactcaatccactcggtgtgaatgctgacatcgccttcaataaagtggaaacgctcgtcaccgatgaaacgatcaatcgcggaagagctgatatccataccatagatatcgtagttgccgtcttccagcagacgctctgtcaggtggttaccgatgaaaccgttcacacccaggatcagcacacgcttgcggcgggcaacctgtgcggtggccttcgggccgacgcggacatcagtcacgatacccatttccgctgccagacgggcaccctgcacatacaggccggattcaccctgaccgctgatcacttccagcgcgccgtttccgcaggcaatcaccagcggttcagcagaaataacggttcccggacgtttgcctttgttatcggccagcacgcggctgcgccagatgatcattttgcgctcacccaggaaggtgaatgcaccaggatacggttctgtcaccgcacggaccaggttgtggatctgtgcagccggctgattccagtcgatcagaccatcttccgcacaacggcggccgaagtatgttgcctgagattcatcctgagcggtggttttataagtaccggactcaatcagcggtaaagttttgttcagcagtgtttctgcggcttcacggactttaccgtgaacaatcagggaagtatcgtcaccaccgatagtgactttttcctgtgcgacgatatcaccggcatcggctttggcaaccattttatgcagggtaacaccggtttcggtttcaccgttcagcacagcccagttgattggtgcacggccgcggtatttcggcagcagagaaccgtgcaggttgaatgcgcctttcggtgccagtgccagaatatcttcgctcagcatatcgcggtagtagaaagagaaaataacatccggtttcagttcacggatgcgatccacccacagcgggtggttaacgttttcaggggcataaaccggcaattccatgtccgcgctgacgcgggccaccgatgagaagaaatggttttcacccgggtcgtccgtatgggtaaagacggcctgaatatcaaagcccgcttttttcagggccttcaatccgacacaaccaatatcatggtaggcaaatacgattgctttcattagtttttttcctgagtttcagtttcactggtctctttcgcctgagcgccgaccactttttgaataaaataccggggacgtgcacgaacatcgttataaatccgcccgatatattccccgagcagacccattgccacgaattgtgcgccgataaacataaataagatggcgaacagggtaaacactccctctgccgcccaaagcgcgccgaaagccacgcgcagaataatcagtaacagcgccagcaggaaaccggaggctgcaatgatactgccgacaatgcttaacaggcgcagcggcgcggtagtcaggcaggtcagcaggtcatacatcagattgatcagtttgaggaaactgtattttgagtccccgaactcacgctctgcgtgtttaacatcaatttcaatcgttttacgggcaaaggtgtttgccagaatcggaataaaggtactgcgctcatggcactgtaacatcgcatcgatgatatgacggcggtacgcacgcagcatacagccgtagtcacccatggcgctgccggttgcggcgataatcattttgttgatcatctttgaggcggttttgcggaaccaggagtcctgacggtttgcgcggcgtgtgccgaccacgtcatagccctcttctgctttctcaaccagacgcgggatctcttccggcggattctgtaaatccgcatccatggtgatcaccagatcaccgtcggcctgtctgaaacctgccataattgcagaatgctggccgtagttacggttcagcaggacagcaaccacatggttttcagggatctctgccgcctgcgtcagcatttccgctgagcggtcacggctgccgtcatccaccagcacaatttcatacgcctgcttcagcgactgacaggctttgattgtacgttccagcaactgagggagactctcttcctcgttgtaaaccggaattaccactgagactttcttaatttcgttaaatgacacttatttctgctccgcaagaatagctctgattgcgtctgtcacacgggtcacatcactgtctttcatatccgggaagaacggcagcgaacataatgtcacggtgttccactccgaatttggcagtgataatgacgggtaccgttcccggtaatatttctgggtatgagctgcacggaaatgcaggcctgtcccgatattgaccgcttttaactgctccataaaggtatcgcgatcgatgccgcagaccgctttatccacacggatcatcagcagatgattggcatgcagatgcgggtaatccggcacggataacaatttaaccggcagcccgtccagggcttcacggtaaagctgtgccaggtgtgcgcggcgtgcgttcagttcgtccatccggctcagctgcaccaccgcaatcgcggcgtggatatctgacaggttatatttgaaccccggttcgaccacttctgcctgcggtttgcggccctgcatctgacggtcaaacgcatccacacccagcccgtggaacttaagacagcggatacgctgtgcaagttcatcgttatctgtagtaattaatccgccttccgcgcaggtgacgtttttaatcgcgtggaaagagaaaatagcggtgcctttttcgccgatccactcatccccgtaacgggtaccgacggcatgcgcggcatcttccagcaggaaaatatcgtgttcctgcgcaatagcacgtaaagcaaccaaatcacagggcgctccggcataatgaaccggaatgatgactttggttttcggggtaatggccgcacggacggcatccggctgaatcatcagtgtgtcgcggtcaacatcaatcatcaccggtaccgcgccgagcagttcgatcatattgatggtggaaacccaggtctgtgaaggtgtgatcacttcatctcccgggccgacacccagtgccatcagcgcaacatgcataccggcggttgctgatgccagagcaatggcgtgtttacagccgaaacgctgacagaaatctgcttccagctgttggttttgcgggccggtggtgatccagccggaacgcagtactttttcaacagccgcgatttctgactccccgatagcaggccgggaaaacggaagaaactcaagcataaatacaacctaataagaatcggaagtgatgattatatcctgaattgattcaattgacgctcaacaccagggccctgtttaaataattcttaatctttgcagtcataaataacagcaattttatgtaacagcataacaaaaatcagcgctgttgttgatgccaatctgttatttgccactgtgtttcttgtgttggtctgatactttttatttcagactgaaaaagttcgctcaaaatatcttcagtcataattatctgagtttcaccggccgcaagtaactgaccggctttaagtaacaccaccgcatcggcatgcagataactgtggtttaaatcatgaccgctggtaataatcgtcccctgctgttcacaaaaccgggctatccatttatccagcatcgcctgctgggtaatatccaggtggttacgcggctcatccagtaataagtatttcccggacaagtcatccgttgtccataattgcaggaatatggctgctatttttacccgctgccattcgccgccggataattgcgtcagcatacgcggcagtaacagctccagctgaaaatcgccgcacagctgataaataagctgtgtattttcctgcaccgccggcatatagagctgcagatactgaaacaccgtcatcaccgggacacaatcggtggtttgggtcagatacgcacggaactgcgcctgctgccgtttggggatcgattttaaatccgtaccgcggtagcggatctgcccctcatagcgcacagcatccgccagtgccgccagaagtgtactcttgccggagccgttcggtcccagcagatggatttgctgtccggcaaaaaattgcagggcatcacaggagagacggcggccgatgcggatcccgctgacatcaagtaacagattttccatcagcggcgccctccgtgatgccgggtcagcagataaataaaggctggcgcaccgatggttgcggtcaccacgccgatcggaatttcggcattggataaaatcagccgtgagcataaatccgccagcaacagactgacagcgccgaataatgcacacgcgggtaataatgtccggtgatcggtaatccccatcagccgcagcatatgcgggataatcagcccgataaagctgatagcgccggccaccgccacactcaggccgatcagcaacccgacggcaataataaacacattgcgccagcggtgtgccgataccccgagctgctgggcattaacctcgcccagcgcaagatagttaagcaccggtgcctgccacagcagccacacggccactaccgctatcgccgccagcagcggactgagccgccagtccgctccggaaaaactccccatcatccagtacatcagctgacgcagatccagactggtgctgaaatacaccatccaggtcataaatgcgccgcagataaccccgagtgccacgccgaccagaagcaactggctgttactcagccgccggaaatgagcaaaccagagtaaaatcagtgtcagcagtgtcgccccgatcaccgccccgcctcccagcacccacagcggcggcatgcctttgaaaaacaggacgataaaaaccacaaacaccccggcaccgttactcacgccgagtaaccccggttccgccagcgggttttcaaaaatggcctgcatcaccgcaccagccattgccagcccggcccccacggcaatcaccgccagcacacgcgggaaacgcagatcccagacaaacaactgcgcggtttcagataaccactggtccggtaaaatccacatctcaccggcgcacagtgcaacggcgatcattatcagcaaggtaacagaaagaagaattatgcgctgtacatcccgctttttccgcgtctgtaccaacttcgtgatggggttgtgaatatgcatgagatccctgtcattaatcaagacgggagatagtatacctgagtcagaaggaggttaatgtctgacaaaccacagaaaagaaaacgacctcataagaggtcgtttcaggtcttactctttcggtgtcgatttttcgaccttggctttcagtttctgccccggacggaaagtgacaacacgacgggctgtgataggaatatcttcacccgttttcgggttacggcccggacgctgattcttgtcccgcagatcaaagtttccgaaaccggataatttcacctgctcaccattctcaagagaacggcgtacctcttcaaaaaacagttctaccaggtccttcgcatcgcgtttgctcaggtccagtttttccgacagattttctgacatttcagctttagtaagcgccataggtttagtccctcaaggatgctttaaatcgctgttgcaacgcggcaacgcatttgtttacggttgctgcaatttcatcttcttcaagtgtacgctctgtatcctgtaaggtcagactgatcgccagactcttataaccctcagcaacacccttaccacagtacacgtcaaataagtttatgccaactaactgatttacgccaacttttttacattcgttcagaatgtcttgtgcagcgacgttttccggcacaacgatggcgatatcccggcggttcgcagggaagcgtgaaattgcttcagcctcaggaataatacggtttgtcagtgcgtcccagcggatttcaaagacaaccgtacggccgttgagatccagttttttctccagttccggatgaaccacaccgatataaccaatatgctcatcttccagataaatctcagcaccttgtcccggatggagggccggatttgtcgttgctttaaacgatacacgatctaatttgccagtcaattccaaaatggcttccagatcaccttttaaatcataaaaatcaacgacctgtttttccgatgaccagtgttcttcattacggttaccggcgataacgcctgccagcatggtttcctgacggatcccgaggtctgcggccgcatccggcacaaagcgcagaccggattcaaacaggcggacacggctctgttgacggttctggttgtacacaacagtgcttaacaggccggtcagcaatgacagacgcatggctgacatatccgcagaaatcgggttcggcagaataatcgcgtcctggcccgggtgcagcagggtctgaattttcgggtcgacgaaactgtaggtaatcgcttcctggaagccacggtcaaccagcagtgttttcacacgcttaagcggcagatgtgcttcgtgacgggaggtcataatcaggtcagcgcgcagcggaacatccgggatattgttgtagccgtaaatacgggctacttcttccaccagatcttcctcaatttccatgtcgaaacgccatgacggcgcagtcaccagccactgatcctgagaaattttcacatcgcagcccagacgggtcaggatatccgttacctgcgcatcatccacataatggccgatcagacggtcaagcttgttacgggtcagtgtaatcgttgtcgctttcggtaaatccgcttcagaaaccacttcaatgatttcacccggctcaccgccgcagatatccagaatcagacgggtggtacgctcagccgcaatacgctgtaactgcgggtccacgccgcgctcaaaacggtgtgacgcatcggtatgcagaccatactgacgtgcacggccggtgatagccagcgggttaaagaatgcggtttccagcaggatatttttggtggtgtcagacacaccggagtgctcgccgccgaaaataccggccatacccagcgcaccacggcgatctgcaatcaccagaatgttatctgtcagtgtgacttcgttgccgtccagcagcgtcagtttctcaccctgctctgccatgcggacaatcagctcaccctcaagggtatccagatcataagcatgctgcggctgacccagctccagcagaacgtagttggtgatatccacgaccggatcgatagagcggataccgccgcggcgcagtttttccaccatccacagcggcgtttttgctgtcacatcgacgtttttaatcacacgtccggtaaaacgcggacacgcctgcggcgcatcaacacggatagggaacgtgtcctgatggacagcggcgaccggggacatatccggagcctgataatccatcttattgagacccgccacatcacgggccacaccacggatgctcaggcagtccgcacggtttggcgtgatgctgatttcaattgcggtatcatccagcttcatatagtcgcgcagatcggtaccgattggcgcatctgccggtaattcaataataccgctgtgatcagcgctgatacccagctcagagaatgagcagagcataccttctgacggctcgccgcgcagtttggcagctttgattttaaaatcgcccggtaagaccgcaccgactgtcgcaacagccacacgcagcccctgacggcagtttggcgcaccgcagacgatatcgagcagacggtcaccgccggtattcacttttgtcacacgcagtttatcggcgttcgggtgctgtccgcactcaaccacttccccgataaccacaccgttaaactgaccggcaacggcttctgtgccgtccacttccaggccggccatcgtaatctgatcagataacgcgtcgctgctgacagccggatttacccattcgcgtaaccagagttcactgaatttcatgagagtatcccgccttatttgaattgcttgaggaaacgaaggtcattttcgaagaatgcacgtaaatcgctcacgccgtagcgcagcatagtcaggcgctccatccccataccaaaggcgaaaccggagtaaatgtccgggtcaataccgacattgcgcagcacattcggatgtaccatcccgcagcccagcacttccagccatttgccgtttttacccatcacatccacttccgctgacggttcagtgaacgggaagtaggacggacggaaacgcacctgcacttcttcctcaaagaaatgattcaggaaatcatgcagtgtgcctttaagattggtaaaactgatatcagtatccacaatcagaccttctgtctgatggaacatcggggtgtgagtctggtcgtagtcattacggtaaacacggcccggcgcaataatgcggattggcggctgtttatctttcatggtacggatctgcacgccggaggtctgcgtacgcaacagacgtttggcatcaaaccagaaggtatcgtggtcagcacgcgccggatggtgtgccggaatattcagtgcatcaaagttatgatagtcgtcttcgatttcagggccggattcaacagaaaagcccagttcgccgaaaaaggtttcgatacgctcaatagtacgggtgaccggatgcagaccgccattttccatgcggcgtcccggcagagagacatcaatccgctcttcagccagacgggcattcagcgccgcagattccagagaatctttacgggcattcagtgcggtctgaacttcttgtttggcttcgttaatcactgcacccgcagcaggacgatcttccggcggcagatcccgcagcgattgcatctgtaaggttaaatgccctttcttacccaggtattcaacacgtaccgattccagcgctgcaacatcctttgcctcttcgacggctgcttttgcctgagcaaccagttcagcgagatgtggcatgttttcctattcctctgaccctgtggtcttcaattatgacgacggtgctgccggacgtgattatctcacccgttccggcaaacccctgaaacaaaaaagcctccaaactggaggcttacggcgttacttttcgtttcttttttacgcgcaaagccccctgagttcaggcgctaaagtaaaaaaagaagcggaaagaaacgatattattcattttctcaactatttatcagttaacagaatgtattttgtcatattacgcgaaaaacatgcggatatacaatgacaaattattcattccgcagattttttctgccggatagcaaaagagggagcaagctccctcttctgtctgaacaattacgccagagcgccttttgctttttcgaccagcgcagtaaatgcggctttatcgaatacagcgatatcggctaagatcttacgatcgatttcgatggatgcctttttcagaccgttgatgaaacggctgtaagacagaccattctgacgagctgctgcgttgatacgtgcaatccacagctgacggaactgacgcttacgctgacgacggtcacggtaagcatactggccagctttgattactgcctggaaggcaacacgataaacgcgcgaacgggcaccgtagtaacctttcgcttgtttcagaatttttttgtgacgtgcgcgagcaatgacaccacgttttacacgagccatactaatctcctaaagtcgtaaactttgctaaaaaacttgcttatgcgtatggcaggcaagcgacaactaaacccagatcccctttggagaccatacctttcggacgtaaatgacgtttacgcttagttgattttttagtcaggatatgacggaggttagcatgcttacgtttgaaaccacctttagcggtttttttgaaacgcttagctgcaccacgtacagttttaatctttggcatttttatttccacttcgcattgttaaacaacgaattaatccggcgaataaaagccggggttgcccccggcatttattacttggattgccggactatttcttcttaggagcgagcaccatgatcatctggcgaccttcgatcttcgacgggaaggattcgacggaagctaattcactcagatcgtctttgatgcggttaagcacttcaataccaatctgctggtgcgccatttcacgaccacggaaccgcagtgtgattttggctttatcgccatcttcaagaaaacgaaccaggttgcgtagtttgacctgatagtcgccttcatctgtgccaggacggaatttgatttccttaacctgaataactttttgtttcttcttctgctctttagccgatttgcttttctcgtagaggaatttgccgtaatccatgatacggcaaacgggcggttcggcattagggctgatttcaactaaatcaaccccggcttcctcggctttctcaagagcttctctcaggctgacaacaccaagttgctcgccttcaagaccagttaaacgaacttcattgacacggatttccgtattgatacggttcggacgtgctgtttgaattctttttccgcctttaataccttattcctccggttgttcttcaagtctgcgactgcgaatttcttcaagcagtgcgtctttaaattcgctcacgtttatgctgccaagatcgttgccgcggcgggtacgaacagacacttcgcctgtttccatctctttatcaccgcagaccagcatatacggaacacgacgtagcgtgtgttcgcgaattttaaagccaatcttctcatttctcaagtctgcttttgcacgaattccggcatcctgcagttctttgacgactttctggacataatcggcctgagaatcagtgatgttcatcaccactacctggttaggcgctaaccatgtcgggaagaaaccggcagtttcttcagtcaggataccaatgaaacgctccatcgagcctaagatcgcgcggtgaatcatcaccggggtcacgcgttcattgttttcggcaacataagttgcccccagacgagccggcagagagaaatcgagctgcactgtaccacattgccatgcacgatccaaacaatcatacaaagtaaattcaattttcggcccgtagaaggcaccttcgcccggcagatattcgaattcgatgttgttttctttcagtgcacttgccaggtcagcttcggctttgtcccactggacatcagaaccgatgcgtttttccgggcgggtggacagtttaaccacaatctttttaaagccgaaagtggagtacatgtcatagaccatgcggatacaggaactgacttcgtccattacctgctcttctgtacagaagatgtgcgcatcatcctgagtaaagccgcggacacgcatcagaccgtgcagtgcaccggaagattcattacggtggcagctgccgaactccgccatacgcagcggcagatcacggtaagaacgcagaccctggttgaagatctgaatatgacccggacagttcatcggcttaatgcagtattcacggttctcagaagaagttgtgaacatgtgctctttgtagttttcccagtgtcctgttttttcccacagaacgcggtccatcataaacggacctttcacttcctggtaatcatactctttcagtttcacacggacgaacacttccagctcacggaaaattgtccagccgtcgttatgccagaacgccatacccggcgcttcttcctgcatatgatacaggtcaagctgcttaccgattttacggtggtcacgttttgcggcttcttccaggcgctgcagataagcggctaactgcttcttatcgccccacgctgtgccgtaaatacgctgcagcattttgttttcgctgtcgccgcgccagtaggcaccggccactttctgcaatttgaagttatggcagaagcgcatattcggtacgtgcggaccacggcacatatcgacatattcttcatggaaatacagtgcaggatgctcatcctgaccgatattttcgtccagaatttcaaccttgtaatcttcgccgcgggaaacaaacgtctcgcgggcctcgccccatgtgacgcgttttttcacgacgtcataatcttttttggcgagttccatcatccgctgttcgagtttctcgaggtcttcctgggtcagtgactcatcaagatcaacgtcataatagaaaccgttatcgattaccggaccaatcgccatgcgggtgttcggccataattgtttgatggcatgacctaacaggtgagcacaggagtgacggataatttccagtccttcctcgtctttggcggtgataatggctaaatttgcatcgtgttcaatcatgtcgcaggcatcgaccagcgtaccgttgacacgacccgcgatacaggctttcgccagaccggcaccgatatcattcgcaacatcaaggacagaaacagggtggttaaactggcgctgactgccgtcaggaagagtaattacaggcatttttaaatccttatctacagtggtgacccatacgtaagatcacatatagaaatctcatttatttgattttcagtacgttaccggcaatttcttgcgtacattgcaagccgggtcacacctgcggatcataatctgccgggcgcccttgccggaactcaaaatccatactagcacagcaaataaggattaatagatttatgtgaccaggtatctgaaaaagtgtgccgtgtcacaaagaatgcaggaattatgaacatttcctttttaaaacagtgcctgcggcggattttaaatcatttttttgtcctgtcagaatccgccgcaggccgttttcagggaagaaccagattatcttcaggtaatgaatcaaatgatttcagttcatttttaaaatccaccacactcttttgcccggtacattcggtatcccgcagccagtcacaatcattatccagcttagcctctttaatgcccatccactgactcagcagcggcagcatcgataatccgctgcggaaatgtgttatacggttttgtgactgtgcatcaaacgcagtaataaagaacggtacctgaaaattttgtttcatgctgtcgccgtgtgtcagattggtattctccgtgcctttatccgtaaacagcagaccgtggtcagagaagtaagccattgtccagcgctgatgctcctgccctgccatcacggcaatatcggacagtaatttatcggtattctcaatacttttgatatagcaggaaatattacgggaaccgataaatttttcgaaattttcagtcagtcttccgcagggttgcggatgagagccgattaaatgcaccacaatcagttttttaccgttcttctctgccagcgcatcgcggacaaacggcagcagcatttcatccggcccgcctttatccgaacggttcggggcgaggaaatgataaaaaccggcttttttccccataatccccaccggagaatcataaatgcctttcatatgctgatttgaaatccagtacgtatgaaaaccggctttattcgccagtgcgacaagattatcactcaggtttgtcacattcccttcacggacagcaagtgcatttgtcagagagagtgtggtggagccggatgctgaaatgtagttatcgaaaaacagaccgttacggctgctcatccacggtgtattcggatgtaattcaaaaccgaatgcatgcataaaatctttgcggacactttcaccgatgacaagaatataggtgtcataaccggtctctgtgacttgcgggttccagtgatcactggtttcaataaccttggcataacgcagattatctttgcggatttgcacataactttcataactgtcacggaaaaaacggatttccggcaaaccggacttaaataccgagacaaatccttcagattttccctgaatataatcttttgaggatgaccagaatgcggtaataaaaaagacggtaaacaatacaattcgctgatgacgttttttcagcggcttcatcagcagcgcacaacctgcagataccagcagtccggcaagatacagataggttttgaacggcagtccggcaatatattccagggattccccgttatcggtatacatcagtgaaccaaccgcattcacatcaggataaccgtaattaatccccactgctccgtaaataagacccaaaagtaaatatatcgtcagcagcagaacatacaggactctgctgaatgacaggcagaaggtaaacagtgctgccgcactgagaacataaatgaacttatattcataaccaaaacttaaatgcagaaccgacagaaacagaaaaagtccggctgtcgcaataaaaatccgtaacatacgtgttgtcatcatacccggcaattttaattatcagtacagagaaagtcccgcattataacgggactttcctccggggacgaccgctttgtaacaatcacagccctcaattattcacaccacagaacttccaggtaaaacattgatacaatttatcattgttaattcaccaattgtaaaatgttgtccgttatactccgtccgtagtagagataagtgaacttttggtatttctcttgccctgatcctgaatcagggctttttttttcattttttccgcacaacacgcaattcctcacactcccccattcttttcttcattattaatgatgcaggtcgtatgctttttatacacaggaaacgggcgtgccatgtaaaaaggtcagatagattttttgcagcggaaaattcagcgggacaagttccgctgcagattcacactgcggcgcagtatctgcagcggagaaagagttcaggaagggaaagtcagaggatcagtcagccatcgccagtgcgcggtacgcgtttttcactttccacagataacggggagcctgtgacgcagggtgtttgctctgcacatgctcataaaattcatcggctgacagcgcgttaattttttcaatcgccagtgcccggttgttatcaaacgtacgcagcaatgcaccggcgccgttaacataagagacaatcgttgcgtaattgagggtttgcgggtcagtaatgccggccagatgctggtcacggataatccggatgtaggtggtaccgatgtcgatattggtctgcggatccagcagttcacgggtactcggttcaccgttgcggcctttcacacggtaggcatcgcgcccggcggtagaggctttaatctgcatcaggcccacagcgttggatttgctgatcacatccggccggtaagacgattccacctcaataatggcgcggatcagtgtttcatcgacttcataacggttggatgcctggcggataaactgatcaaacggagtggccggatagacaccactgccctttgccggataggcggaataatcactgatgccggacgatggcggcgttatccagccaccggaaccggtacgggactgtttgctgcttcctgagcagcccgccaacaataatgctaaagcaatcacactaacggtttttttcactctgttaccctttatccggcattctgacgaagctaagaatactgaaaacacacataaaccaaaaggagtttacttaacttttacattttatgtgattcatagcatagtgtgaatcgatcgtactgaatgttataaagatattacggaagtgcttgacaacaccaaatgatattgataatcattatcaataacaatatcctcagtgattgtcacactttaaccaggcaggctgataaaatgaacaaaaaacaaaatgcgttttcccttccgtccctgacacagatattccgccatgctgtactgctgcttaccctgtgcgcggtcggcgggtatgccgctgcggcggagaaaaaatttaaggtcgtaaccaccttcaccattattcaggatatggcgcagaatgtggccggtgatgccgctgttgtggaatccatcaccaaacccggtgccgaaatccatgactaccagccaaccccgaaagacattatgagggcgcaggatgcggatctcatcctgtggaacggcctgaacctggaacgctggtttgagcgcttctttgaaaatttacaggatgtcccggcggttgtcattaccgaaggtattacccctaattccatccgcggcggcgcctataacggtaacccgaacccgcatgcctggatgtccccgaccaatgccctgatgtacatcgaaaatatccgggctgcgctggtaaaacatgacccggcgaatgcggaaacctacaataaaaatgcggctgagtatgccgcgaaaataaaagcacttgatgccccgctccgtgcccgtctggccaatatcccggaaaatcagcgctggctggcgaccagtgaaggcgcattcagttatctggccaatgactacggttttcaggaagtgtatctgtggccgattaacgcagaagagcaaggcaccccgcaacaggtccgccacatgattgataccgtccgtgaatataaaattccggtcgtcttcagcgaaagcaccatttccgacaaaccggctaaacaggtcgccaaagaaaccggtgcagagtacggcggtgtactgtatgtggattccctgtctgccgctgacggccctgttccgacctatattgatctgctcaataccactgtagatactatcgccaaaggatttcatcaatgagtgatcaattcagcaaaccacagctggttgtcgataacgccactgtcacttataacaacggccataccgcaatttttgatgccagtttcagcatagagggtggctctatctgcgccctcgtcggtattaacggcagcggtaaatccaccctgtttaaaaccattatggggctggtcacaccgacacagggccgggtgacactgaatgatgaaccggtgcgtgccgcgctgaaaaagaatgtgattgcctatgttccgcagacagaagaagtggactggaactttccggttctggtctctgatgtggtgatgatgggccgctacggaaaaatgggttttctgcgcattcccggtaaagaggacaaaaaagctgtcgccgatgcactggaacgtgtcggtcttacagggctgggtcaccgccagataggcgagctttccggcggacagaaaaagcgtgtgtttctggcccgtgcgctggcacaaaacggcaaagtattgctgctggatgagccttttaccggcgtggatgtcaaaacagagaatgccattatcgatttactgcgttcactgcgcgaagaaggtcacctggtgctggtctccacccacaacctcggcagtgtaccggagttttgtgaccatgtgattctgataaaccgtactgtgctcgacagcggtccgaccgccaccacgtttacccagaaaaacctggaaaaaaccttcggcggtgtgctgcgtcatatcaatctgtccgggccggatctgcatgacgacgatgacccgcgttcactgaccgttattacagatgatgaacgcgccgctgtcttctacggccatcaggataatctgacggttaagaccggcagtaaggaagagcagccatgacagagctgttacttcagccgtttgaatacaactatatggtgaaagccatctgggtgagcggcatcgtcggtgccgtgtgtgcctttctgtccgcttacctgatgctcaaaggctggtcactgatgggggatgccctctcccactctgtggttcccggcgtggcgggggcttacgctctcggtttcccctactctgtcggtgcgttcttcaccgggatgctggctgccctttccatgacctttgtccgtcatctgacacggttacgggaagatgcggtgatcgggtttatattttccaccttctttgccgccggtctgctgatcgtttccctgaaccccacctcggtaaatgtgcagaccattattatggggaatatcctcgggattgccgatgaagacatgctgcaggtggaaattattattgcggtttctttcctcgtactgatgtttatctggaaagatctgctggtggttttctttgatgaaacccatgcccgctcaatcggcctgaacccgctggcactgaaaattattttctttaccctgctcagtgcctgtaccgtcgcggcactccagacagtcggggcaattctggtaattgcgatggtgattaccccgggagccaccgcctatctgctgaccgatcagtttaaaaagctgctggttatcgcggttgtattaggggctgtcaccagcagtgccggtgcctatatcagttatttcctgaacggcgcgaccggcggcatgattgtgaccttacagactattgttttcctgattgccttcttcttcgcaccaaaacacggcatgctctctgcccgccgccgtgcccgccgtgaatcagcaaaactgcgtcaggaggcaaactcatgagtgattttctgacctctctgttcattgacccgtttgcctttccgttcatgcagcgggccatgtttgccgctattctgaccggtgcggtctgtgccgtcctctcctgctttctggtgctcaagggctggtcgctgatgggggatgcgatttcccatgcggtactgccgggtattgtgctggccttcgtgatgggcattccgctgattatcggtgcgtttgtatcagggcttttctgtgcttttgccaccggttacctgaaagaacacagccggatcaaagaagataccgtgatggggattgtgttctccggtatgtttgccctcggtctggtactgtttacccgcattgataccgaacaacacctgacccacattctgtttggtaacatccttgggatcactcaggcagaactgcgtcagaccctgatcatagcggggctgaccatggtggtactgatggtgaaatacaaagatttcatgctgtactgctttgatcccaatcaggcacgggttatcgggctgccggtccggatgctgcactacgggctgttatcactgctggcactgaccatcgtcgcctctctccaggcggtcgggatcattctggtaatcgctatgcttatttctccgggtatcatagccttcctgctgtgccgcagcttcggcaaaatgatcatggtggcgattctggtctctgtcagctccagctatatcggtactgtcgtcagcttccatatcgacggcgccaccggtgcctgtattgtcctggtgcaggcactctattttgtgctggcactgatttataaccagctgcggttatccgccctcaaacgccgcagacaggttgcctgaccttctgcatcacaggggatattctgtcaccgggatatccccccgcttccggactcttccgaaacagccatccgtttttgtccttttctgtatttccctgctcttactgtgtaatttgtgtgagatgtccgcttttttcttttattttccggcggtaagatagactgactgatagacggcttagtgaggtggctcatgtggcaggcagcaggacgtatactcagtgaacatttcggcgaacactcgttctctgacaagaaacaactcgatggcggtgaaatccaccgttcccggagtgcccgttacggcgatcatccggtttttatcaaatataaccggcgtgacatgttgcaggtattcaaaaccgaggcggagcagcttgatgctctcagccgcagccgtacactgacaacccccgccgtttatggtgtcgggtcgacaaaagagttcagcttcctgattatggaatatctgccgctgaagccttttgattcccattccgcctatatgttcgggcagcagctggcgcgtctgcaccagtggcatgagcaaccccgttacggtttcgatgaagataacctgctgggcaccaatccccagccgaatgcctgggataaaaaatgggcttctttctttgctgaaaaacggatcggctggcagctacagctgggggaagaaaaagggatcatcttcggcgatattgacagcattatccggcgtgtacagcaaaagctgtctgaccaccagccgcagccatccctgctccacggtgatctgtggccgtcaaactgtgcggcggtggctgacggcggaaccgtcgcgtttgacccggcgtgttactggggtgatcgcgagtgtgatctggcgatgctctcttttttccctgagctgccgatgcaaatcctcgacggctatcagcaggtctggccgctggaaagtggtttcttagagcgccagccgctctatcagctctattatcagcttcaccgcagtcatttgtttggcgatcgttattatcagagtgcgcagacgattattgacgatattctcgccggttaatccctgttttacagataaaaaaataccccgtcagagactctgcggggtattttttattcaggctgttctgcttaccagttaaggaacttaattaagaaccacgcaattgcgccgataaataccggcagcacatacagcacaaaaatttgccggaaaatagtgtgattcggaatacgtattttggcgattaaatccgccggtgtttttccgctctctctggcattttcaataatggcctgatcttcaatattctcgcggataaattttacctgccgggacatacggataccggatgcactcagcgccagccccacaaacatcaggatataaatcagtaaaaaactcagattatgaccttcaaaaccgagtaatttatccggtacaggggagttattccagaatgtgttcaggaacggtgtattcacacggatcatttccgtcaccacattgataaaatccccgataacggcattaattttatcactgccggtactctgctgatgagccagtttcagtaacgaaacaatggttgagatcagggccggaataaaaaccacccagcctgccacccgtttaaatacagcaacccagcgtgcctgttgcagcgtcatgcgctttcctcatttgattttttccctgtaatcatagcgcagaaatcaggagaagatcattatcattattccggacttttttaccccgtaaattattaagtcacttaatgaactctctgccccggcttgttacaatcagagaatgttttaattcattgcaggatctcaggagcatacactatgtcccacaccttaccggtacaggccgctgtttttgatatggatggtttactgattgactccgagccgttctggcttcagagcgaaaatcaggttttcagcagcatcggcctggatatgtcactgcgggataagctgcccgatttgctggggctgcgtatcgaccaggtcgtggagctgtggtatcaggtttcgccgtggcagactccctctaaagaagaggtcattcagcggattattgattccacgattgccatggtggaaaaagagcgtccgcttctgcccggtgtggaacatgcgctgtccctgtgtcagtcactgggactgaaaatcgccctggcctccgcttcgccgctctatatgctggaatctgtgctggagatgtttaacatccgccattattttgatgcagtggtgtctgccggtgatctgccttacagcaagccgcatccgcaggtttatctgaatgccgctgaagcgctgggagttccgccggtgcagtgtgtggcgctggaagattccgttaacggtatgattgcctgtaaagccgcccgcatgcgctccattgtggttccgtccgctgaaatggccgccgacccgcgctggtctctggcggattaccgtttgtcatcgctcagcgaactgactgcggcgatggtccgctgattatttttgtggcgggaaatatcccgccctgctccgttagtgaaatattccggagttattcattaataaataagcctttttctttcttaccctctggccgggcgtcataaaagactttatactgtaacactgtataaataaacacctgagtatttacccggtatcatgacagctgagggtcacctgcttttctctgtcgcttctgtagtgatggttcatcagcttcagatttcgcctgatatcagtcagggggactggctgcaccttatccccggcgccctcgccggtgcactgctgccggatattgaccatccgaaatccatgctggggcagtgggtccgctttatttccgtgccaatctcccgcctgtgcggccaccggggtttcacccacagtctgctggctattctgaccggcgttattctgttccgcacacaactgccggtcagttggtctgttccggcggatttttatcaggccgtgattgtcgggtatctcagccacctggccggggatatgctgacgaccgccgggatcccgctgttatggccggtacgctggcgtttctgcattccgctgctgggcagcaaagccaataaacgggcggaacgcagcgtggcattgattgtcctggtggcctcgttttatctgcctgcgcactgggaggtctggtgggatcatctgcgggaactggttctggctcagatatcagccaggctataaacaatccgttttatataaccatcagctatagaaaaacatccgtttaatgacgattcaggctaaatcaaccgctgtgatctacaatatagctataaataatgcagattaattataagtactgcagaaaactcctgttaatctataacgcatcctttacagttttagcatctgcataactgtatgcgatttagtcaacacactataacaacataccaacaggtatcggagaccgggatgaactttccattaatcagcaatctcgccatattcgttattctgctgctggtgctgatgaagctcagcagtaataaggactggagtctgtccaaaaaggtactcaccggtctggtgatcggtgttctgttcggcctcgggctgaatgcattctacggcacggagcatgacgcagtaaaacaggcgctgccgtggtttgatatcgtcggtaacggctatgtgaagctgttacagatggtgattatgccactggtcttcgcgtctattctcagtgcggttgcccgcctgcatcaggcatcatcactgggtaaaatcagcgtgctgacgatcggcaccctgctgatcaccacagcaattgccgccttaatcggtattctgatcactctcgctttcggcttaaccgcagatggtctgattcagggcgtgaaagaaaccgcacgtctgacccagctggaatcccagtatgcaggcaaagtgtctgacctgaccgtaccgcagctgatcctgtcctttattccgaaaaacccgtttgctgacctgaccggtgctaacccgacctctatcatcagcgtggtgatttttgccgcctttatgggtgtggctgcacttcagctgattaaagacaacgaagagcgcggtgccaaagtgctcagcgcgattgatatcctgcaggcgtgggtgatgaaactggtgcgtctggtgatgcgctttaccccgtacggcgtatttgctctgatgaccaaagtggttgccggttcaaacattcaggacatcattaaattagggactttcgtcgttgcctcttatattgcgatcctgctgatgtttgtcgttcacggcctgattgttggtgctgccggtatcaatccgctgcgtttcttccgtaaaatcgcgccggtactgactttcgcctttaccagccgttcaagtgcggccagtattccgctgagtgtggaagcacaaacccgccgtatcggtattcctgattctatcgccgggttcgcggcttccttcggtaccaccatcggtcagaacggctgtgcggggatttacccggccatgctggcggtgatggttgccccgaccatgggtatcaacccgtttgacccgctgtggattgccacactcgtcggtatcgtcaccgtcagttctgccggtgttgccggtgtcggcggcggtgccactttcgcggcactgattgttctgcctgcaatgggtctgccggtcaccctggtcgcgctgctgatctctgtcgagccgctgattgatatgggccgtaccgccctgaacgtcagtggttctatgactgccgggacagtcaccagccagatcctgggccagacagacaaaaccctgtttaataatgataacgacgaagatttacagcagggataatatcccgccgctgattatcatcagataacagaaagcccgtattcaggatatgaatacgggctttttattgatatcaccatggctcctgcagacttcccccgcgtcacaccgccgggttaatcatcggatccgcctgtcacgttatgttttcggatgctgccttctgcattattgctgntccgcagacaggcataaaaaaggccgtaacgccaggcgttacggcctttttatcagtatgtagtgattaattcagaaactcaccgctgcgcagtgcttcaatacgcttatccagcggcgggtgcgataaaaacagctcgctgaatgatttattgcggccgttgatgcaaaacgccatcatgctgccctcttcctgcggttcgtagctggttttcaggcgttgcagtgcggcgatcatcttctcgcggcccaccagttttgcagagcccgcatccgcatagaattcacggcggcgtgagaaccacatggtgataatgctggccagaatgccgaacacaatttccagtaccatcgataccgcgaaataaatcatcgggttgccctggctgcctgagttttcgtcattgttgtttgacataaaacctgccgccagttgtgccagaatacgggaaataaagataacaaaggtgtttaccacgccctgtaacagcgtcatggtcaccatgtcaccattcgcgatatggctgatttcatgggcgataaccgcctccgcctcatcgcggctcatgttttccagtaacccggagctgaccgccaccagtgacgcatcacggcgtgcgccggttgcaaaggcattaatgtccggcgcgtggtagatcgccacttccggcatgccgataccggcctgctgtgcctgacggcgtaccgtctccaccagccagcgctccgtctgagtggacggattggtgatcacctgcccgccgacagagcgcagtgccatccattttgacatcagcagagacacaaatgcgccgccgaaaccaaatacccctgccataatcatcagtccggtcacactttgactctgaacgccggtcagcgacagaataatgccgaagacgaccattacggccaggtttgtgagtaaaaataatgcaattcgcatcatatcagtatgatcctttaaatagtgtgcccatcatatgcctcagaaaataggggcattttgccatatttcaaggctttttaaccgaataactttaattattaaacaactttacacttaattttaataaagtgaccttttgctgttttgtgcgatcgggtttgctgtgcagataatcagcgttttttattaaaaaaacactttactttttaaatgggaaaaattatcattctcgttgtcggtacctgagtaaattactaaggtattggcaaacgacattgctcacattgcttccagtatttcgaagtttctcagccagccatcgcgctggctttttttttatccgtcagcgggcataaaactccaccggcagattatccgggtcaaaacagaagaaaaatgatttgccggtaaattcatccgtgcgaatgctgtcgcaacggacaccgcattgtttcaggtgtgtttcccatgcgatcagatcctgcactgcaaatgccagatgacgcagaccacaagcttccggctgtgatacccgcgccgggcttgccggaaaggtaaaaagctccagcagatactctccgttcagtgccagatccactttgtaagaatcccgttccgcacggtagtgctcactgagcacggttaatcccaatacatcgcaataaaacgccagactggccgtgaggtcagaagcaatcacggcgatatgatccactttttcaatcttcagcatatctttcctgtaaaacgccccgttgccggggcgtttgattaacgcactttatttacagaggctgagtctgcgcttccaccgccgccagcgccaccatattgacgatacgccgcacggaggagatagaggtcagaatatgcaccggtttgttaatccccatcagcacaggaccgaccgtcaccccttccgaggtggtcacacgcagcaggttataactgatacgggcagcttccccgttcggcataatcagcaggtttgccgcgcctttcagcgggctgtccggcatcagatcacggcggatagcttccaccagcgctgcgtcaccgtgcatttccccgtcaatttccagtgacggttcccgttcgcggatcagcgccagggtatcacgcattttctctgcggacggcgacggacaggagccgaagctggagcgggacaacagtgccactttcggctcgataccgaaccggcgcaccgcagcggcggccatcagggtgatctccgccagttgttcggctgtcggctcatcatgcacataggtatcggcgataaaagtgttaccggtcggcagactgagcgcattcattgctcctgccgtgtgcacaccttcatggaaaccaaacacattttccacaatccggtagtgatcgtgataatccccgaccaccccgcagatcataccgtccgcctcaccacggtgtaccataatggcaccgatactggtcgggttggtgataatggcacggcgggcctgctcctgagttacgcccttgcgtttcatcagctgataatattcctgccagtattcagcaaaacgcgggtcactttcattgttaacgatttcaaaatcctgatccggcacaatctgcagtcccagttttttgattcgcatttcaatcacatccgggcggccaatcaggaccggatacgccagccccatgctgaccagttcctgtgtcgcatgcagcatgcgcggctcttccccttcggccagcacgatacgtttgcgatctttgcgtgccatggagaaaatcggcttcataaacagggtggttttgtagacaaactcattgaggtgttccagatagacactgaaatcctcaatcggacgtgtcgccacgccggtttccatcgctgcttttgccacagccggggcgattttcaggataagacgcggatcaaacggtttcgggataatatattcacggccgaaagataattcctgaccaccgtaagcggaggcaacctgctcgctctgctctgccagcgccagatcggcaatcgctttcacacaagccagcttcatctcttcattaatcgccgttgcgccgacatccagcgcaccacggaaaataaacgggaagcagagcacgttattgacctggttcgggtaatccgagcgcccggtacagatgatggcatccggacggacggccagtgccagcggcggaaggatttccggttccgggttagccagtgccagaatcagcgggtcacgcgccatgcctttgaccatctccggtgtcagcacacccgggccggaacagccgaggaaaatatccgcgcccggcatcgcatccgcgagtgtccgcatgccgttatcatcaatagcatacgccgctttggtttccgccatattggcttcacggcccttgtagataacccctttcgagtcgcagacaataatattgtcgcgtttcaggcccagcagcaccatcaggttcatacaggcgacagaggcagctcccgcgccggagaccaccagacggacatcgccgatcgctttattgacgatacgcagtccgttgagtacggctgcagtactgataatcgcggtaccgtgctggtcatcatggaagaccgggattttcatgcgttcgcgcagtttcttttcaatatagaaacattccggtgctttgatatcttccaggttgatgccgccgaatgtcggctccagagaggcaataatatccaccagtttgtccgggtcggtctcattgacttcaatatcaaagacatccacaccggagaattttttaaataaaaccccttttccttccatcaccggcttaccggccagcgccccgatattaccgaggccgagcaccgccgtaccgttggagattaccgcgaccaggttgcctttggcggtatatttataagctgccagcgggtcatccgcgatttcgaggcagggagccgcaacccccggcgaataggccagagccagatcacgctgggtggtcagcggtttggtcggggtgacggtaattttaccgggagagggaaactgatgaaactcaagggcactttgttttaattgttcgtccatttcaggatcctttacaggcgttaataacagggtcagggcggaccggcggtgtaagctctgccgccggtcacgttattcagcgctacataatcagtatactgataaatagcggaatagtgaaaaaagtgtaatattcatgtagttaatgtgctgaacctgttgaaaaaaacaacatatctcttattggttatctgataatagcggccttctccggctataccgccaattatatcttcctgtcttaaaccctgaacctcatccctataatatgcttcatgttattagggacattattatttttaaatactttgttatttgcacatataacacttttgcgtaaaaattaattgtcctggcgattatggtatattttgtatttcaataattaatatatcaattaaatcgttttaattaatattatctcataccgtacacccggcaagggagaactctatgcctcatcacactattatggttattgatgaccatccgttgttacgctatggttttaaaatgcttttacaaccggattatgcgttaaccatcatgccggaatttactgacaacaatggtctgttcagccatatccaccagcataccccccgaatgattatattggatatcaatgtccgtgctttttccggcattgattttattaaaaaattacgccataaaaaaatatccagttatatcctggtgttttcacaatcacgggaacggaatgatatatatgctgctattgatgccggagctgatggttatttattaaaaaattgcgatgttgattatttattaagtcagattaaaaatgcgtttaaaggaaaaaagattttcagtgaggcgatttataaaattttgcaggaacgtgaacactatcacgatccggtcagttatctgacacagcgggaagccgacgttctcaaagaactggcctgcgggatgaaaaataaggaaattgcacgggcgctgtttatttcggaagagacagtgaaagttcatatccgcaatatactgaaaaagctgaatgtctccacacggctcgccgccagcctgctctatctgaaataccggctgccccgctgagagggatccccgggatggctgtccgggggttactcgctttcttcgtcgatactcgccggtgtcgggtaattgagcagctccagggtaccgtccggattttcgcggacatccacctgaatcacctctttattcattccccggaggatcgtatccacttcactgtaggcgtaacggatgtttttatcacgcgcccagtccggcataccggtcacaccgtagtaaaagtatacggtgctgatgccgttgccctgtggctctatcgccttgattttactgatacgcagtgcgccgtaacaaaaatcctcgtgcgcctgccaggcgtcttttcctttgtccgtcagctgatattccaccccggacgattcaatagtcgcactgataaaaccgacggaagccagtgcattcagccgtgaaatcatccatggctctgactgacttgagctgaactgcggccatttgtgttcatccaggcacagttcgctgttttccgtaaatttgagctgaagttcattcagatacacgtccgtttgtcccgcgagggtaaagctggcaaataacagcgtgcttccggctaagtactctttcatcgatcctgtctcaacatcttccggatgtttttgtcatggttatggcgtaatgctaccccacttttttgcatttatcgaatactctctgcacgtaagattctggataactgcatcaaattcccgcattatgctatttttcgtgttcacgacaaaggataaaagatgaaaaatacaacctccgtctgccggattttcgggattaaaaactgcgacacgatgaaaaaagcccgggcatggctggatgctcatcagatagcgtatgagtttcatgattaccggcaggatggcgcggatacagaactgctcagtgaatttgcccgtcatattgactggacactgctgctcaacaaacgcggcaccacctggcgtcagctggataaaacagagcaggatgcagtgacagatgcgcagtccgccatccgtctgatgtcggaaaaaccggcgctgatcaaacgcccggtgctgatctctgcggacggccgttatcaccttggttttaaagctgatgattatcagcagttcttcagtcttcctgcctgatacaaaggaaacaccatgcattgtcctgtaacagaactggcaaaacagcttatcagccgggaatcggtcagcccggatgataaaggctgccagacactgatggctgaacgcctgattgccgccgggtttaccgtcgagcacatgcctttcggcgacacacagaatttctgggcataccggggcggcagcggcacaacactggcctttgccggtcacaccgatgtggtccccccgggtgacctcagccactggcgcaccccgccgtttgaaccggcactgattggcggcatgctgtacgggcgcggtgctgccgatatgaaaggttcgctggcggccatgattgttgctgccgagcgtttcactgaacgttatccggactatccgggacgccttgcctttcttatcacctcagatgaagaagcgtcagccgtcaacggcacagtgaaagtggtggaaacgctgatggcgcgccatgaaaaggtggaatattgcctggtcggtgaaccgtcaagccagtcccgattaggggatatgattaaaaacggccgccggggttccgttaccgcaaacctgacgattcacggcacccagggtcatgtcgcctatccgcatctggctgataacccggttcaccgcgccgcgccgtttatacaggagctggtggctgaacactgggacaacggcaatcagtttttcccgccgaccagcatgcagatagccaatatccgtgccggtaccggcagtaacaacatcattcccggtgatctgtttattcagttcaatttccgcttcagcaccgaatccacggctgaatcactgaaagcgcggattgccgcgctgctggaaaaacatcagctgaaacacaccattcactggtcactgtccggacatccgttcctgaccccggaaggcccgctgaccggtgcggtctgccgtgctatcggtcagtactgtaatctgacaccggagctctccaccagcggcggaacctctgacggacgctttattgcgcggatgggcacacaggttgtggagctgggtccggtcaacgacaccattcataaagtgaatgaatgcgtcagcgccgctgatttgcagcaactcagccgtatctatcaacggattatggagcagatcctgctatgatgacttttgaaatgctgaccgggcagacccgtgatcatgtcattaattttgccggtaatcatcacctgcaatttaatgccaccaaagcgtttctcgccatgcagaaagcggcggcaaccgccggatttaaactgatgcctgccagctccttccgcgatttttcccgtcagcagattatctggaatgaaaaatttgccgggatccgcactgtgaatgatgcagaaaaccgcccgttggatgtctcagggctgtcagaggcggagcgctgtcaggcgattctgcgctggtctgccattccgggtgccagccgtcaccactggggaacagaggtcgattattacgatccgttccgtttgcctgctgatgcttcccttcagctcgagccgtgggaatatgaggaaggcggctattttgccgccctttccgcctggctggcggataatatggctcaatttgatttttatctgccgttcacacagcgtcagactggtggtgtggcttatgaaccgtggcatatcagctactggccgctctcatatgaagcggagcagctttacaccccggaaacgcttgaaagagtactgaaaacacaggatatcgccggtaaaacatggttactggctaatcttgacgcaatttatcagcaatatgtcacattaccggaaagcgattaatccggtgatttctcctctgacgccggggtattctccggcgtcatttcatctgtttccggcaggcgcagcataaagatcagcagccagaccagaatacacagcagcaacagccggatataaatcagtttcaccagccagagcgacaccgcaaacgtcagcaggatcacgattaccgcacgccgttttgctttgcgcggcagacctttgtgtgtctgccagtggcggatatacccgccgaaccagggacggtacagcagccagtgatggaaccggggggatgaacgggagaaacaccacgctgccagcagcaggaacggcgtcgtcggcaataccggcagcacaaccccgagggttgccagtatgacggcaatccagcctgataacagcagcagtatgcgggtgaacggcttcacgtcctgagtctccggtaatgagaatgcaactcaatgttatcgttgtgtaacatcttattcaaccggcttgtgatcacaaatgataatccgctgacaaaacggctctctgttccgcacagagagccgctcaggttgctgtcagtattattaccggcagaaaatcaaatgattgatactgatatcacatcagtggcggtactgacggccggatcggcacaacgagcactgtcggccccttgcgctgtaatgccgctttgcaggccgcaattacctcagcctctgtttctgcccggactgcggtgcagccgtaaccggtggcaagagccgcaatatccagccccggaatatccagacccggcacgcccggcgtatcttccagcaccgcgaaagatttcagaatgccgtactgcctgttttccggaatgacaaacaggatcggcaactgatgctgtgcggcagtccatagtccctgcacagagtactgcatggagccgtcaccgataatcgccgccaccggccggttacgcccgctgtcccgttcaccgagggcaatcccggcgctggccggtaatgtccagccgagtgaaccgctggcaaaggtgtaaaatgagtccggtttatccaccggccaggcagcatgcagctccccgaggttagaaggggattcctcggtcagaatcgtttcttccggcatcgcgcttctgaccgcgcggaacagctgtgaagcactcagtaacccgtctgatgccgcttccggcgcggcaggatgcggtgccataccgtgcggctgtttactgacggcggctgtccgcgccggtcgtgcactcaccagctcagttaactgctcaaccgccagtaccgcatcacataacaggctgtctccgaccggtgcccgtcccgcttcctgcggatcatccgtgatatgcagcaaccgcagtcccggcgggatatagtcaccggccacatacgggtaatagcggaagaccggcgcaccgatgatcagcgccacatcatgcccggcgagtttatccgagagcggtttcatggcaaacggcagaccgcctgcatacagaggatgtgattcagggaacggcgggcgttcggaagcgggcgctgagtacaccgggatattcagtttttccgccagccggatcccggcctcccagccctccccccgtgcaagggatgcgccgtagatcagcaccggatttttcgcctctgttacactctgcgcaaactcccgcatccgcaccgggtcggcactgatacggtgagacacggtgcggacaaccgctgcatctgcttccgccggtttatcccagtcatccagcggaatcgataaaaataccggacctgccggcggttgcagcgccatcgcatatgcccgcataaaagccgccggaacatcttccgccctcacaggctgataactccatttcacccacggttccggcagtgtttccggtttgatattagtcagccacggctccatcagcagcatgtcgcgggtctggttaccggcggtaataatcagcggcgtgcggttcatatacgcggtaagaatattactcatcgcgttactcagtccggctgaggtatgcacattgaccagtgcaacatgacgggtggattgcgcataaccatccgcagcggcaactgcagacgattcatgcagtgtctggatataacggaaatctgccggaaagtttttcaggaaagtttcttctgtcgagccgggattaccaaaaacagtcgtgatattcagttgccggagtaattcaaatgtcacctgacgaattgtttttcccatcgtaatgctcctgtgaaatcattattctgctgataccggatataccggcgaatggaaaaggcatgctgaacgctttatctgcatggcggtgttttttacttaaataacaataacaaacagcgacgatataaattaacagaacagtgaaagattccgatattccggactctattacagcagaaaataaagatcaaaccgcggctttacagccctgttcctgattatcagaccggcagaatcgttatttctgatataaagcagaaagatagaggtaagaccagataaccacatcataaaaggtcagagtaatacccctgccggggccggttgagagtaaacaacacgataacatgctggcagtttgttagtccgttacagttccgtttaactcagagctgttattgtctgccgcgtggtaccaattggttattttgctttttttcagctctccgcggatgcagagagctttttttttatttccggtatactatccgcactattcagactgtttatgtgcagaggtcatatgctgaaaatattctgctttattgccgttattcttctttcgggctgtgccggggttggcgtcggtgcatccggaggttctgaaggggcttctgtgggaatcggtacgggtatcggcttttaacccagtcagtcatcagcgcattaccggcttcttttgttcatagaggctctggtatacctgtgatatactttgctgaattaatataaacaactgattaactatgtcaattaaatacagatcagatatcgatgggctgagagcaatggctgttctctttgttgttatattccacagctatgacaatctgatcccatccggatttattggtgttgatatattttttgtcatctcggggtttttaatctcatcaataataaaacaacaacttattgacaagaacttttcatttccggatttctacaggcgtcgtctctggcggctgcagcctgctctgttattggtaatgttattcgtcctggtgataacatcaatattttatttaccggatgactatattgatgtcatgaatagtgagaaatatacctcattgtttttatcaaatcagtatttttcacgggtaacgacaagttatgccgctcaggattccgtctaccttccgctcttacatacctggtcactggcaattgaatggcaatggtatcttcttatgccgcctgcgctgtttttattgcatacattatgccgccgctatcattttagtatagtgcaggcgatttccttactgacgatactgaccgtcattctatcactatttttgtcaaatcattatccggataaaagttattatttattttcatcccgtatttttgagtttatggtcggtgtgattattgcgtatattcctgaaaaaacaaacaataaaaaaacagtatataatatattgtcaattatcacttttgtcgcattaatattaatagccaactgtaacacggtattaccgggttatcctaatttttatactgttgctgtttgtgcctgtgccgcagttatcatttatacagggaaacacaaaacaattatcagtagaatactgtcaatcaatattgttgtatttattggtgctatatcatactcgctttatttatggcattggcctgtttttgctgtcgcacgttacatcggttatttcgataccaatacagagaagctggcagctatgtttattacgctgattttttcttatttatcttatgtctgcattgaaaaaaggttcagaaaatctcagctgcgctttgcatatacctttctgattttatttattattcctgttgtcatcacactggcaataagtaaaattactgtaaaatatgacggattcagtttcaggctcggagatgcgtatctgaaaatggaaaacgtgatgaaagaccatcattatgagaatcgtccgttatgcctcagcaatgataatgaggtagccgatggtgtctgccatataggaaaaaaaggtgcggataaaaaagcctttttatttggtgattctcattctaaccatttttggggctttatggatatcatcggaaaagatgccggtatggatatcagagcacaagcgacatcatcctgcctgacactgccgggcgtctatctttatgactggtggaattataaaaataccgtgtaccaacgctgctatgatgatacccggcagtattacaatgatatcagaacaggacattatgattatgtcattattggtgaggtctggagtaactatgccggtgatcatgtcatcaatcagacaagtgatacccgctcaacagaggaatccagatcacgcacagaaaaagcattacgtgaagcgctggatattattgtaacctccggtgccaaaccagttattatcaaatccattaacccgatgccgcataattttatgacctgtttttatcaaaatgtaaaattacgccgtgattacagcaataatcactgtggcgccggaaaatttagtggtgatgaacaggaatggttcagccggttatttgtaaaactaaagaatgaatacccgtctctgacgatcattgatcccaaagatgttcaatgcaataacgggcgttgcctggccgacattgacggcattccggtttatcgtgatgtcggacatttaaccgactacgcatccgttattttcggcaccgggtatttaaataaatacccgaacccgtttaaataacagaaaacagcaatggcggtatcaccgggaagaggtcatcaggaaatgttattcagcgcatggcaggtgtgataatctgctgagacagctttgatctaattttgaatgatagtgacctatacattctgatttattgataaataaagacaaaaaaaggtaacaacaatgcattggttagcagactactggtgggtcatcctggtgctgtttgtcggcgtgatcctgaacgccattaaagatctcaaacgcgtggatcacaaaaaatatctgcagaaccgaaaggagctgccgcctcaccgtgataataacgcacagtgggatgatgaggatgactggccggataataaatctaaaaagccctgatctcttctgctgtctgctgcgcccactgcgggcgcagtgtctgtaatatcactgccgtttcctgcctcagtgcactaagtaatgcctttttcccgctgatatggcgagttttcagtatctccggtttaccggacagtaactgtgacagttccgctgtctgtgccgggtattccctttgcagaagtaccagtgcaggctctgccaccgcctgcggtttggcggcatacgcaaacccggccagcatccgccattcccgttcattgagtgattccgcctgctccggcggtaccggtgaaaatccccatatctgagaaaaaatcgcacagtcgcgggcaaactgatgtttcgcggcatctgccagtgcctgtccggccggagtcagcggcagcagcagcattgcggtgtaacatccgctgcccgcttccgggtgtgtccccatgcgggcaaaaccaaagccgcaggatgtccagaacgcagccagttcctgggtataaccgaagctgacggacagataatccataccgctgttttttgccgcgtcagccgcccgctgcagtaattcacgtcccagcgcattgcgccggtagcctgcatgtacggcaatacggctgatacggcgtgaacgcagttgtgccgcctgcggaaagtaactgtgtgctgccagcgattgtgccagcagatttccgcgcggccgccgcgtgcctgcccagacggattgcgtcagtgccgccggtaacccaccctcgtcggtcagccagagggctgcggtgacctgctgccggtggcggaacagtgcgaaatgctgtccgggtgcatcggccagccgccgcagatccagcggggatgtccggtaatgcgctgccgtcagcaggccgtaaaacccggacagtaaatccggatcatcacataacgcctgctgtgttacggactgatattcacactcacccgccgatgtgattttttctgccggttcggtgagcagcagtgcctcatccagccaggcttccgccgggtcatgctctgcccagcgcaccggttgcgtcagcgtcagtgcggtaaactgcggtaatgagtggcaaaatttcagtaaaaatccccgtccggtgccttcataaccctggacagtggtcagcagcagcacacggggaaataccgccgtaaaacgggcgagcagcggcagcgggatcatcgccgcttcgtcgatcaccagccagccgtatgtgctgacatccgccgtttccgccagtgtcagtaaattatccggggcgataaattccgtttgttgtgaatcatgaagataacgctgtatcaccgttaccgtggcttttgccggggcacataataaatgacggcccggcgcttctgccaggaacagaccggccacagcagatttcccccgtcctctggccgcagtcagacagaaaatgccgctttccgcacggcggagctgtgccagtatctgctgctgcgcaggggtcgctgtgccgtccggcggctgccacacgctttgcggcggcaacagggtcatatcaaatggccgcttttcataccggcagagatgggcaggatggataagtgtacgggcgaagtggcgcataaaatgcggcgcggggatcatctgtccgccgtcattccagcgcagactgtcctcatccggccgggtctgccattgtgattccggcggcagcagcaggatcagccagctgcccgcctgtaatgtgccggccagcatagccagtgcttcactgtgcagcccgcgccgggcatcaaacacgccgtggcggaactcctgtcccagcaacagacgggctttttccgccgcgatgccgccgggcagctgagcggaaatgaccggccagtcaccgggcgccgcgtctctgatttcctgtaaccgggattcacaccagtcgtcactgccgctcagtacccacagacggcggataccctgtatacggagctgttcggtgcaggtgtgaaacagtgcgggtaacatagagagccgctacatcttaccgacaagcagagacaggacccccgccgcaatcagcggtccgaccggaacccctctgaacagtgcgacaccgataatagtacccaccaacaagccggcaaccgtggacggctggttactcatcagtgtgacgccccggctgcccagccaggacaccagaatgccgatcgctatcgccagcagggatttccagttcagaaaggagcttaaaacatcattggcactgattttaccgctggcaatcggtgccatcacaccgacggtcagaatgaggatccccagcttcaggccatatttttccacaaacgggaaatagccgttgagcggcgtgatgcgcacagccagcagaaaaagaatagccagggttaccgtcatgttattactgataagcccgagcccggctaagaccaggaggataatcagggtcgggtcaatattactcatagcagatcctgcgtgtcggggggaatggaagccgccaatagtatgccgttatacgatgataatcaaactctgccggttttgcaggaaaaaccggcagaacgacttatttcagtgcggaaaatgtgtcacattgcgcaatattgccgctgtcaaaaccgcgtttgaaccactcataacgctgtgcggatgttccgtgtgtgaagctgtccgggataacccgtccctgactctgtttttgcaggcggtcatcgccgatggcctgtgctgcattcagagcattttccagatcaccgttctcgaggatcccagctttttccatctcatggccccagatcccggcaaaacagtcagcctgtaattccattttcactgacaggcggtttgcctctttctgactgctgcgctgctggcgttcacgtacctgacgatcgataccgagcaggtgctgaacatggtgtcccacttcatgagcgaccacatagccctgcgcgaaatccccgcccgcccctaatttggtgcgcatatcgtcatagaaagagaggtcgatatagactttctggtctgccggacaataaaacggccccatcaccgcctgccccgcgccgcaaccggtcggtgttgcgccccggtacagcaccagtttcggctcgcggtactgccggttcatctgtgcgaatttttgtccccagaccgcttcggtttccgccagcatcacgccggtaaattccgcctgtttctgctcctgtgcactgttctgtgccggacgctgctgtgaggtggtctgcccgatattgaccgggtcaccggtaaccaggccggtcaggtcaatgccgtaaaaaccggccacgaccacgataacgaccacaaccagtccggctttgccgcgcggcagcggaatacgcggcccgcctgcggatccgcccggaattctgctccccgcactgcggcggtcttcaatattgtcgctctggcgacgcccttgccaacgcatgatgattctctgcttatcggataatagtcggataactacatagtacagagaaaatgaagtgaggaaaaatgcttctttctttcaggggagtgataaatcagcttaatgccggtgatacgcgggttctgttatcaccggccatgaattcaggagatgaatgattaatccagtttcacacccagacggcgtgccacttcctcataagcttcaatcaggccgccgaggctctgacggaagcggtctttatccattttatccagagtttctttatcccacagacggctgccgtccggtgagaattcatcaccgagcacgacctgacctttatacagaccgaattccagcttgaaatccaccagaatcagaccggcgtcatcaaacagacgggataacacgtcattggcaatgtagctcaggcgcttcatttccgcgagattttcccggctgacccagccgaaggtttcgcagtaggattcattgatcatcgggtcatgtttggcgtcatttttcaggaacagatcgaagattggcggattcagcaccatcccctcttccacgcccagacgtttcaccagtgaaccggcagcgcggttgcggatgacgcactcgaccggcaccatatccagttttttcaccagaatttcggtatcggataacaggcgttccatctgagtcgggataccggcagcttccagtttacccatgatgaagtggttgaatttattattgaccatgcccttgcggtcaaactgctcgatgcgctcaccatccagtgctgatgtatcattacgaaattccagaatcagcagatcgggattatccgtggtgtagaccgttttggctttcccacgatacagttcagcatgtttttgcatcttgcactctccagacaggattaataataggcgtatcgcctgacgggcaatattctccctcagaacgatgcaataagcaatcgtttgcgtaagaaaagatacagacccggaaaacgaccggtgtgcggtacatccccgcacaccttatcaatactcaggtgcagtcccagttatagaccacacgggagaaatctgcttttttcagatcctccggacggataaagaagttgccgataccacagtccccccacaggatatccacgtcaccactgccggaatcaagctgcagtaacaggacatacggtttcagctcgtcgcggtattcacgcggatcgctctgggtaaatgccggataaccgccgacatggtgcccttcccccgggaaatgctcatcatacggctcaacccattcctcatagaaatcttcgccctcgtactcatcctcaaaatcatataattcatcacggttgaaaatggtgcggccgaatgcggtgtccccggtgctgatatactgcaccgacggtgtaaaactgatgcggtactgtccggttaccggcgagaagtaattttcatcttcgcgggccgcctgcacagcactgaaatcctgatgcaattgtgccgggtcttccgtgatctccgggaaataaagaacccggaaatcattctgttcctgcggattatcaaaatcagcaccatacaaatcatcacccgcgtgataaatctgcagaataccgctgcgcggataatccggcagcggcggcatctgtgcaaagttaatctggataagcagactgagcggaacaccttcactgtccagcggatagctttctgtcagcggcagatagggatttccgccaacgtggctttcccacagcgacaaatcatcagccggtgtcagcgtcatttctgccaccggtttttctgtggcacggatggcatcagcataaggcgccagtgccgggggtaaacggttaaaatcagtcatgggaatacttcactccgttattattcagcgcgtttacaccataatgagggataaaccccgggctgtcagcaggtcacgggcagattgcggaaccttctgagtgagcaccacgtgatccagttcctcacatgccgccacgcggtaaggtgcaatgcgaccgagtttgtcaccggtcacaccggccacggtcagactgctttgtcttatcagggcccgtttgaaagcggcttcctcaaatccggtgaccgtcagaccactgtccacatccagtgcgcatccgccgggaaaacagaggtcaatattcagataagacagctgttccagtgcctgcgctccgatgcaggtgccggatgcgcggtgcagctttccgcccagcacaatcagctcaaaatgcgggtagtcactcagtgcggctgcaataagcgggctgtgtgttatcacggtcagagaaaaatctttcggcatgtgttgtgccagcaacaggttctgactgccgccgtccagaaaaactgtgctgtgattgcggatcaatcctgcacaaccgagcgcaattttttctttttctgcactgttctgcccgatccgctgctgaaaatccgccacatcgcccagtacactgaccgcaccgccgtacacccgtttacagagcccttcatccgccagaacctgcaaatcacggcggatggtgtgctctgatacaccaagctgttcaaccagtgtgctgcactgtacccggccgtcactgtgcaagaactgccggatcagggcttgccgttgttccggaaaagctgcataatcgagcatatatttctcctgtaaattgcataaagcatcataaacgggcactccctgcgggtcaatcaaaaccctgtcactgctgaggtcattctgtgaacacacatcatccggatatcgcattttttcatcagttagccaaccgcgcagcacaagagacgttaccgcgttttttacccgggcatacactgtccgtcgataccaaaatcaaagaaggtgtcagttttgatccggtaacggatgcagaccggcaggctgaaatcgcgctgcgggaaatgatcagcgcagcatatccgcagcacagtattttgggtgaggagttcggtctgaccggcgaaggggattatcagtggatccttgatccggtggacggcacccgcccttttatgctcggtttaccggtctggggaacactggtcggactaacctgtcgcggaacgcctgttatgggaatgatgagccagccgtacaccggcgagcgtttctgggcagacggtgaacgcagctggcacagcagcccgcacgggacatatgtgatgaaaacccgcaaaaacatcaccctggccaatgccattctgcacaccaattcaccggagccgatgccccgtttcccggaaatccggctggccgatctgatggaaaaggtcttaatgacccgtttcggcggtgaatgctatgccatggcgatggtagcggcaggcaaaatcgacctgtgctttgattacgctcttcagccatatgatatcgctgcatttatcccgatcattgagcaggccggtggttgtgtgacaacccttgacggcggaccggccatacagggcggtgctgttctcgccagtggttgtccgcgtctccatcagcaggtgctgactattctgaacaaaaatatttaataatcgtataatgattatgattataaattcgtattacaaaggttgttgtgaatgagtgatgcaattgcagtaacaccaccggccgtaccggcggggcggggacagatggccacccgcgcgctcttttttgtcgccggttttgcctccgcggcctgggcagcactggtgccgtttgccaaactgaacaccggcgtgaatgacggggttctcgggttattactgctctgtctcggcggcggtgcactggtcgccatgccgctgaccggtgtgctgaccacccgtttcggctgccgcagggtgatgaccgtttccgttctcctgcttagtgcagccctgccgctgctggcggtcattaaccacaccgggttactggctctgacactgattattttcggtatgggtatcgggatcaccgactgtgccatgaatattcaggccattattgttgaaaaagcggcaccaaaaccgatgatgtccggctttcacgggttctacagtgttggcggcattgccggtgcaggagccatgagtggttttatgctggccgggatgggtgcattacaggcggccggtgctgtgacggcgatttgccttctgctgctggctctcagttataaaggcatgctggattacgcctggccgtcagaaggccctgcatttgctgtaccgcgcggtgcggtattgctgatagggattatctgcttcgccacctttctggccgaaggcagtgtgctggactggagtgcggttttcctgacagagtatcgtcatgtgccggaaagcatgggcgggctgggttttgcctgcttcgcggtgctgatgtccctcgggcggctgaccggcgacaaaattgttgcggtactcggacggccgcaggtggtgctgtggggcgccctgctggctgccggtggtcttctgctgagtgtgctgagtgacaactggcttctggcactcaccggttacgggctgatcggcctgggatgtgccaatgtggtaccggtgatgttttccgctatcggccgccagaccagtatgccgcaggccgttgccgtcccggcggtaaccacgctgggttatctcggtattctggcaggaccggcgtctgtcggactgattgcttaccgcttcaccctgcccgccgcgctgctggccgtagtcgcgctgctgttgctggtcgcactgctgtcgcgcaaagtccggatgtaaaaacaccggccatcaggccggtgttgctgtattctccgccgcgtctttcagaatcgctttcaggcgcggataacggcgtgccagccgccagcgcagccgcaaatctttggcgttatcccagatgagtgaccagatcccgcgatcaaacaattcacgcacaatctcctgtttcacctccggcgattctatctcactgatggtatgcaggatccccagcccttctttggaaatctgccagtgacaagcagggatctgctttgcgacatccgcattacgctgattgatatcgttcagcatttccaggattttcatgtaattatggactgtccgcacccggattttatcatcaggcggcgtatgcgataccgattcggaatggatcagataatcgtaataacgttcatcaatatattccacccgcgctgcggtcatcagcagttcggttgtccacggaatgtcctggtggtgcagccccggctcaaaataataaccctgctcacgcagaaaatcagtgcggtacagattcagccaggttacatgcaggaacttacgggagttgagtgcccgtttcagccagtccggtccggaaagaacaccggtggaacgcagacgatccggcgggaaaatcggccgcggttcacgcccgtcttcataaacataggtaccgttgcaggttgccacatccagttttccggcaagcgcaatttccagcaggcggccgtacatttgcgggtgaatcacatcatcaatgtccggaaacgtgatgtattgcccttttgccactgcaaaaccggtattccgcgccacagagacgccctgatttgcctgttccagaatagtgacagacgggaatttgtcctgccattcacgcagcacagcatccgtattatctttggaaccgtcattaacgaggatcagctcccaggcaggaagtgtttgtttcagcaggcagtcaaaaaactgaggaagaaatttttccccgttatagacggcaacaacaatgctcagtaaaggtcgtgaagagtccgaagataaatccatgtcagccctgtcaattccgggtagcctgatattcagcagacaatgcggctgaatatagcgacaaaataattataagtttttaaatataaccggagagtctggcataaacgtggctaataatgcggtatgacagacagagaaataagaatttatcttaaaaattattaggttgtgtatcaatttattacaaaataataacgacataaaaaaaataccggccattaacaatgaccggtaccgataattatatttacgcatttatatgttgcgtgaatatattattttacagatgatttgctgaatgccgcttccagcgctttcaccatttcatcattttctttctgtgtcagcggtttccctttggcactgataaactggaggctgctgcggttatccagatcaccgacctgtaaggtgtaatcaccttcggctactgacggatcatccatacccaggctgctccactctgcagaactcagccctttgtatgtcacttcaatattcccggtcgaacgggtgcggtcacccactttcatgccgacactttccagcacaaccggcagacgggaccagaccacatcaaacggcgcgcggacaataatctgcggcagaccggttttatcactgccgctctgaacgtccggagccgcatactgtgacgcattggtttcctgacgcgcggcattacgcatacggtcaaggccgtccaccagctcgttgagtgtcaggttgttataacgggtaatttccgttttatctgtcaccgggttttcaccctgtttcagaccttcactggtcacaacaaccgctacctgtgaaccggccggttcaattttgatgcgctggcgggactgtaacggcaggtcttcatccgcacgctgccagacaatccagtcagtgacaatcacaccaccggcttcatcacgctggctgaccggcactgagcgatcggccagaacgcggttgatctgagcccacagcgttctgttttccgctgaattctccagcagaagacggcttgcgtctcctgctgtttcagtacgggaacctgctaacaggctgacagtctgtaccggcggacggatgtccagcgccagaccggtcgcaccatcctgcttaacctgaggaatatcatactggccgctctgtaacggcagggtcatcccctgaggaacattcagcgcctgtaactgcggcgcatccaggtacgaagtatcgccgctgacctggcgcttatagttctgatcgccggagcaggctgccagtaataaaaccacggaaagaccagcgagcttcgtaacctttgatttttgcagtagtgttgccattcagattccctaaaatattatcgtatgcccgccgtcttcatggcacggccgaccgtattctgccccgcttccgtgagcggtaacagcggcagacgcagtgtctgctctgcgatcagacccagctgatgacaggcccattttaccggtgacgggcttggctcacagaataatgtgtgatgcaggtccatcagttgattattaatcacacgcgcacggtcaaaatccccgcgcagggcaagatcaaacatctgtgccatctctgccgcagccacgttggctgtcacagaaatcacacctttgccgcccaggagggtgaaatccagtgctgacgcgtcatcaccgctgagcagaatgaagttttcatcattcaccagggttttgatttcattcacacggcttaagttcccggtcgcttctttaattgccacaatattgtccagttttgccagccgggcaacagttgcaggtaacatatcacagccggtgcgcgttggcacattatacagaatttgcggtaatgcggtattctctgaaatcactttaaagtgctgatacagaccttcctgtgacggacggttgtaatacggggtaacggtcagacatgccgccacgccgctgttttcaaattgctcagtaaaccagaccgcttcgttggtcgcgttagcgccggtaccggcaataacaggaatacggccttccgcgaactccagtgtcgccagtaccacatccacatgttcctgatgtgacagtgtggcggactccccggtggttccgacagccacaatggcggacgtacctgccgcgacatggtaatccactaatttccggagccccgctttgtcaacacgaccctgtgtgtccagtggtgtaaccatcgcaacaatactgccttttaaaacgtcatttatgtgtgacatgtacgaaaccctcataatcggataaatataggacaacattttaatggtacttgttcagagcgcagaaaaaaacaccctaactgtacgtttttaatgaattttgttaatacccggcggcacaccttaaaaagaagtaataatgtccgcttttttcaccggtaaaacggcggaacacatgataacgtgtctgtaaccggcaggtttgatatgccgcaatcatttgattattaccgcagagcacacaacaggttattgctatcggccttatctttctttatgtttaacacattcacggtgtcatgaagaggaatgagggtttgccgcaacgcgatcagcaatatctggttatcactgcactgggacgggatcgcgcagggattgtgaatgcgattacccgtcatgccggagagtgtgactgtaatatcgaagacagccgtctggcgattttcggtgaggagttcacgtttattatgatgctgtcaggcagctggaatgccattgccatgctggaggccaccctgccggtactggcggcggagcttgacctgctgacggtcatgaaacgaacacaacgcgggcatcagcctgcggcgaccaccggtgtcagtgcgcaggtcaccgtacctgatgccgccgggctggtggaacgctttaccaatctgtttatgagactggattacaccctggctgaactggtgtcaaaaacccggccggaggatgatacagacgcagtactgctggagattcagatcaccgcgcatcacccgacaggggaaaacaacgcggtgctgcagcagcagttttaccgtctttgtgctgagttacaggccgaaggcactattaccctgatgaatcattaatgtttgtgtttattattacgtttacggagagtgtgtaatgagcccattgaacgccggtgataaggcgcccctgttcagccttcccgaccaggatggtgaatcaatcagcctggccgattatgccggtcagcgtgtgctggtgtatttttatcccaaagccatgacgccgggctgtactgtccaggcatgcggtctgcgcgacaatatggatgaactgaaacagttcaatgttgaagtgctggggatcagtacagacaaacccgaaaaactgtcccgtttcgcggaaaaagagttactgaattttaccctgctgtcagatgaagaccatgcggttgctgaagcatttggcgtctggggtgaaaaacagtttatggggaaaacctatgacggtattcaccgcatcagtttcttaatcggcgctgacggtaaaatcgagcatgtttttgataaattcaaaaccagcgaccacgaccaggttgtgcttgagtacctcaaagctcacagctgattaatcagtctgccctgatataaacaccatcttacccatggtgtttttttatggctgttatctgacataaaaaaacaccggcatcattacaccggtgtcttttttatcgtgtctgattacgcctgccctgacattttcttatccggtattttgtcatccggcatcgtctcctccggccaggagtggatcacggctttaatcagggttgccagcgggatcgcgaaaaatatcccccagaatccccacagtccgccgaaaataataatcgacaaaataatcaccagcgggtgcaggttcaccgcctcagaatagagaatcggcaccaggatattgctgtccagcccctgcaccaccagataggcgataaacatgctccagaaatccgaatccagtccccactggaacagcccgaccagaaccaccggcacggtcacaatcactgcccccacatacgggataaggactgacaaccccaccagcacacccaacagtaacgcataattcaggccgaccaccgcgaagacgatataagtacaaacaccaacaataatcatctcggtaactttgccgcggatatagttggaaatctgctgattcatctccacccacactttcccggccagtgagcggttacgcggcagaatacgctgaaaaccccgcagcagctgttctttatctttcagtaaaaagaacaccatcagcggtactaaaatcagataaatcgtcagcgccagtaatcccaccagtgacgccagcgacattttcaccactgaatccccgaccgagagcagcttgctgcgggcattatcgaggatcatatccatcagcccgacatccatcagcgccgggaaacggttcggcagttcgcgggcgaactcattgaagcggctgaacatattcggcatatccagcagcaggttacgcccctgtccccagaccgtcggcgcgagaataaagatcaccagcacgctgaccccgataaacagcgtcaggatcagcataatcgccagcttgcgcgagcagccgcgtttttccatctgatgaatcggccattccagcaggtacgccagtacaattgccaccagcagcggcgctaagataccgctgaaaaaataaataattccgaaacccgccagtaaaataacggtcaaagcaactgcctgcggatcggcaaaacgtcgtcggtaccactgaatgatcaaatctaacattattctgctcccgggattagcggcaaaaatatgacaaatcctgcccaccgggcagactgtgtgaggattttacttgagtgtttgctatgatacacgaattattaccagtgataatcaacggggaaagcgtcatcctatgaatacgtttctgaaaaaaccgttagccgtcttactgagccttgccctgaccttcccggtgctgcctgccgcacaggctgcggttgaggatgcgttacctgaaatcggcaccaccgccggtggtacactcagtatcggacaggaaaacctgatgggggacttttatctgcggatgatccgcagcagctccccgatggtctatgatcctgttttactgcaatatattaataatctcggccagcgcctggtctcaaacgctgactcggtcaaaaccccgtttaattttttcctgatagccaacccgaacattaacgcctttgccttcttcggcggcaatgtggtgctgcacacctctctgttccgctacagcctgactgaaagtgaactcgcctctgtgatggcgcacgaaatcgctcacgttacccagcgccacctggcgcggatgatggaagatcagcagaacaaagcaccgctggcctgggcggccactctgggctctatcctgcttctgatgaccggtaccccggtcggtgccgccgccatgacttcgaccatggccgggatccagcagaatatgatcagctttacacaatccaacgagcaggaagcggaccgcatcggcatgggcacactgagccgtgccgggtttgatccgcagggtatgccggactttatgaccatcatggtggatatgtcccgttacagctccaaaccgccggaaatgctgctgacccaccccctgccggacagccgcctggcggatgcgcgcagccgcgccggtcagatgccgcgtaaaaacccgccgcagtcctttgatttccttctggcgcgcgcccgggcgatggcaatgtacggcggccagccgctgcgcaatgcgactgaccagatgattgataactacagcaaaggtaacagtaaagaacaaatggcggcggattatgcgcgtgccattctgctctaccgtgacaacaaatatgaacccgcctcacaaattctgacgaaattactggccgccgatccggataatgtctggtttatcgatgtcatgacagatgtggatatcggtctgaacagaacctctcaggcggtgatccggctggaaaatgccctgaaacgggaaccggggaattcggtgtatcagataaacctcggtaacgcctatattcagaataaacaatatgataaggcgactaagattctgcgcaattatacctttgatcacccggctgacccgagcggctgggatctgctggcagaagcaggcggaaaagccggccgccgcacggatgagctggccgcccgggcggaatatcagaacttaatgggtaactttgacggtgctatccgcagcctgaccgaagccgcccgtcaggcgaaacccggcagttatgatcaggcccgttatgatgcgcggattgaccagatccgccagttacagctgcaattcaagcaatttaaataatgaggaaaaccatgactgatactgtcaccatctggcacaacccgcgctgctccaagagtcgtgaaactctggcactgctggaagaaaacggcgtgtctccggcagtaatgctctatctggacaccccgccgtcaatagcggaaatcaaaaccgtgctccgcgaactgaaatttgatgacgcccgcaaactgatgcgcaccaaagaagcactttacggtgagctggggctcgcgacagtgaccgatcaggaagcactgattcaggccatgcatgacaacccgaaactgattgagcgcccggtggtgattaaaggcaaacaagcccgcctcggccgtccgccggagcaggtgctggaaattctctgagtccgatcttccgtccccggcgattgccggggagattattcccccgtatataaatccgccatgttctttttatgaaatcgtcatttatttcaagtggtaaagttcgtttggttatttacacttaatataatgattaaaggaataaatcatgaaaaagacattagcggcgttatcattcatttccgttgcattattctccgctgctgttaccgccgggccgggcaacactgaatatacttaccgtaacggcgataaaatccgcgtggccagcccggaagcggaaacatcgctgtttaaagataaatcagggaaaccggttttggtgattacatcaccggataaccgcgggatctcgcataatatttttactgactataatgtcggcaagaaaggcctcgtcattcataataaagaaaatgccaacaccattattaatgaagtgatcggcgacaataaaacccgcctgcgcggtaatacctttgtcgccggcggcaaggccagtctggtgattgttaacccgaatggtgtgatctgtcaggattgcagctcaaccaatacctcactctattctcaccgcgaaacactgccggtggttatcaatgctgcaaaaaataatgaggtgattttcgatgcccgcaaaccgctgcatacatcagaacgtctgacccatatcagtcataatatttctgtaaattcaccacgctgatccctgttataccgccgttttcacggcggtatttcttttatcaaaaacttcccctgccgcagactgtcatacctgtaacaacacagccctgtgatcacaccgtattaacttaagaaaactcttattgcggcgatcacagaataacgtattgataatacagataactgactgtgtatcatcagggaaaaaaatgaccatttatgatctaaaaccgaagtttcagaacttgctgcgtcccgtggtaatccgcctggccgatgccggagtcacggccaaccaggtcacgctggcggcgatgttcctttccctgcttaccggtttcatcctgatcctgtttcccgatccgcgcctgtttctgcttctgccgccggtgctgtttatccggatggcgctcaatgccattgacggcatgctggcccgcgaacatcaccagaaaagccgcttcggcgcgatcctcaatgaactgggtgatgtggtatccgatacgattctttatttcccgtttatcctgctgtttccgggagccgccatctggatactgctgatcctgtttctctctgtactgactgaatttattggtgtactggcacaaactatcggggcatcacgccgctatgacggccctgccggaaaaagtgaccgcgcctttctgttcggcgcactgggtctgtgggcggcggtttttcccgcatcccttgactccgcactgtttccggtgctgtttgcggtctttgccgccctgctgtttcttacctgttatcaccgtatccggcgtgcgttgcaggaatctgcgcaacaaagcgcatctcaaaaggactgattatgagtgtatcttctgattatccgactcagcgtgaatccattgaatctcactttaccaccagtgaccagcagcggttattcttccgttactggccttccgcgaccgcagaaaagaaagccattgtgctgtttcaccggggtcatgagcactccggacgtgtggcacatcttgcggatgagttggcgttacctgatttcgcggtatttgcctgggatgcccggggtcacggccgcaacgacgggccgagaggctacagcccgtcgatggggacatccatcagtgatatcaatgaattcattaacttcatttcatctgagtatgaaattccggtcgaaaacatggtcgtgctcggacaaagtgtcggcgctgtcaccctgaccggctgggtgcatgatttctcaccgaagatccgggggctggttctggcctctccggcctttaaagtcaaactctatgtgccgtttgcccgcagcgggctggcactgatgcagaaaatacgcgggctgttttatgtaaactcctacgttaaagccaaatttctgacccacgacccggtacgtatcgcttcatttgagcgggatccgctgatcacccggccgattgccgtcaatatcctgctcgaactctacaaaaccgctgaccggctggtggcggatgctgccgcgataacagtgccgactcagctgtttatctccggcagtgaccatgtggtacaccgcaagccgcagaatcagttctatgcgcggcttaacaccccgtataaagaaaaacatattctgccggggttctatcacgacaccctgggcgaaaaagatcgtcatatcccgctggcggaaatccgccgctttgtcactaccttgtttgagcagccgcgctatcagcacgactaccggtttgaggatgtgtgcagcgccggtgccgatgcttatcgtgaattacaggttccgctgccggattactgcccgaaaaatctcggttataaactgctcagcaaagcgatgtccaccctcggcaaagcttcggaaggcgtcagcatcggctacgataaaggctttgattccggatccacactcgattatgtctaccgcaatcaggcgcagggcaaaggcattttcggccgcattgttgaccgtcagtatctcaacagtatcggctggcaggggatccgacagcgcaaagtgaatattgagaaaattctgcgccgcaccatccgggcattgcaggaagagggtcagccggtgcggatcatggatatcgctgccggtcagggccgctatctctttgatgcaattaatgattacagccggatagaatctgttctgatgcgcgattacagcaccatcaatgtggaacagggccgtttgcagatcaaagagcgcttcctggaagacaaaatccgttttgaagagggcaatgcctttgatacagccgatctggcggcggtcaccccgaaaccgactctcggtgtggtgagcgggttatatgaactgttcccggaaaaccatttgctgcgcgattcccttgccgggctggcgcaggcgattgaaagcggtggttatcttgtctacacctgtcagccatggcacccgcaggtagaaatgatagcccgcgttctgccgagccatcagggcggcaaagcctgggtgatgcgctgccgcagccagggagaaatggatgcgctggtggatgaggccgggtttgaaaagctggaccagctcatcgataactggggtattttcagtgtctcagtcgccagacgccgctgattgttatcatactgatgaagatgcgcctttttgcgcatcttctgttttacagggaatgaaaaattatgtctgatgccgcactgccgctgcccgcttcccgccgtaaacggtggggatttgccctgctctggctgctgtttctggcacctttcttttttctgacttacggacaggtcaatacctataccgcttcgctgccgtcagtcccttcttttgcgttcagctgggaaacacatattccgtttctgccgtggacaattattccgtactggagcatcgatctcttctacggattatccctgtttatctgcacctctctgcgtgaacagtgtattcacgggcttcggctggcagttgcgtcactggcagcctgtgccgggttcctgctctttccgctgaaattcagttttccccggccgcagacagacggtaccgcaggctggatgtttgaccagctggagatgtttgatctgccgtttaaccaggccccttctctgcatatcattctgctgtggttgctgtggctgcgcttccgggcgcacacaccgcagaaatggcactggtttctgcacctgtggtcaattctgatcttaatttctgtactgacaacctggcagcaccattttattgatgtgatcaccggtgccgccaccggtgtggtgataagctatctgctgccggtaagtacacgctggcggtgggccccgcaccgtatccgccgcggctatcagctggccggacggtacgccgttatttcgctggtgctgataacagcggctgtcgtgatgggtggtcagggctggtggctgctgtggccggggctggcatttttatgcatcacggcgggttatctcggcgccggcgcatccgtgtttcagaaggacagcgccgggcgcatttcaccctctgccgcactcctgctgctgccataccggattgcggcgcaaatcagctattactggtatgcaaagcggtgccgtcacaccagtgtggtcaatgagcatatcgcgctgggtggttatcctgccgcaccactgacggctgccgccgtactggatatgacaggggaatttccccgcagccgctataccgcagggctggcttatcactgccagccgcagctggatctgtttccgctgacagaaatgcagattgaaacggcggtgaataatctcagccgcctggcgcagtccggtcaggtttatgtacactgtaaactgggttatacccgcagtacgaccgtcgtggtcgcctggctgatacgtgccgggctggcagacaatgtggagcaggcgctggcggccgccagacaggcccggccgcagattgttctgcgggaacagacaattgccgccctgacccgctgggcagcccgttacggaaaaaacgatgaataacagacctcatgacgaacagataattgtgatttttacggcgggctggcgttttctggctgccttgtcagtgatggcctttctgacacagtttctgctttatatttcaggattttccggtgagtatccgatggcggcggggatcctgttctttctgtgtgccatgtactttatcttccggttgtggctggatcaccatctgttccgccgcctggcacaatcgtccgataccgatatttttgatgaatccctgacgacgctgtttcccggcagagcacaacacacccatttctcacagcgctggcgcggcacaaaacggctgtttcagcagggcgcactctgtatggtgctccagtggggggtaacggtgattgccctgcttaactgacggtcacaaccgcaggatatctttgacaaacggaatggtcagtttacgctgggcaacaatcgatgcgtgatcaagcctgtcgagcatatcaaacagtgtgcgcatctgacggtcgaggcgttttaagataaagcgcccgacatcttccggcagctcaaacccgcgcagctttgcccgcagttgcagtgcctgaattttttcgtcatcactgagcggatgaagtttgtaaatctgcccccagtcaagacgggaagcgagatccggtaactgcagcgggatctgacgcggcggtctgtccccggtgatcagcagacaggtcttgccggtctccagaatgcggttatagagattaaacagcgccatttcccactcttcatcccccgcaatacactgcacattatcaatacagaccagcgacagatgctccatgccttccagcacatccggcacaaaccaggcgcgcttatccagcggcacatagccgaccgcccggtctttggaagagacttcggcacaggccgcatgcagcagatgacttttaccgccgccgtcacgggaccagaaatagagataactgccgtgcggctgattgatagccgcctgaatagcggataacagggatgcgttttcccctgcgtagaaactgttgaaagtctcatcatcagggagagagagcggtaatgacagctgagatggcgtgttcagagttacctcggccaacgggtgaacaaacaccgttagtttaacataaattcaccggctaaatgaaccttaacaacatacttcccgtactcagtgacggaaaaagccacagaaccaacatgcccggctttacgggacccgtcagtcactgcggctttttttgttatctgaatcagtctttcttcacttcatccagattgacatccaccacccgctcttccgggcggatgatattcaccagacggaacaccagtgccagaccaatgccgacaaccgttgccagcgccatccctttcagttcagccgcaccgatatgaatggtcgcaccactgacaccgataatcaggataaccgccgtcagaatcaggttctgcggcttgttgtaatccactttggaatcaatcagcacgcggataccggatgcaccgataaccccgtacagcagcagtgataccccgcccatcaccggcaccggcacagcagcaatcgcggcagccagtttaccgacacaggagagcaaaatcgccagtaccgctgccccgccgataacccaggagctgtacactttggtgatggccataacgccgatgttttcaccgtaggtggtgttcggtgtggagccgaagaaaccggacagtaccgtcgaaaaaccgttggcaaacatcgaacggtgcagacccgggtctttcatcaggtcacgtttgacaatattcgccgtgaccaccaggtggccgacgtgttcggcaatcactaccagcgcggccggtaagatggtcagaatagcgaaccactcaaaacgcggtgtgtagaacgtcggcagtgcaaaccacggtgcttcacttaccggggtcaaatctactgcgcccataaagaaggccagcgcataaccggtcagtaccccgataaggatcgggataatcgccaggaagccgcggaacaccacagagccgagaatcgtcaccccgagagtggtcagggagataatcagcgtggtgctgtccggagacgcaccatccgcgattttcagcccggccataccggcagcagttcctgccagttcaagaccgatgaccgccacaatcgcacccatggccgcaggcgggaacaacacattgatccagccgcgtccggcgattttgacaatccccgccaccagcataaataacagcccgcagatgataaacccgccgagagcaagttcatacccgagcggcagtaaaatcagcaccggtgaaataaaggcaaagctggagcccagatacgccgggatttttcctttacagataaacagatacagcagcgtcccgataccgttaaataacaggatcgtggccgggtttacctgaaacaggatcggcaccagaacagtagcaccgaacatcgcaaacaggtgctgtaaacttaacggaatggtgaccagcagtggtgggcgttcatcgacttcaataacgcggcgcgtcatcttaaacctcttaaatgattactcagggatatgccaaaaaaaagccgactatcaagtcggctcattaacttatttcgtaccaaatatcttatcgcccgcatcacccaggcccggcacaatgtaaccgtgttcgttaaggtgatcgtcgatggatgcggtatacagctcaacatccggatgggctttttccagcgctttcagaccttccggcgcggcaaccagcacaaggattttaatcgcggtacagcctgctttcttcagcagatcgatggtagcgatcattgaaccaccggttgccagcatcgggtcaaccaccagcgccatacgctcttcaatattagaggctaatttctggaagtacggtaccggctccagtgtttcttcatcacggtaaacaccgacaacactgatacgggcactcgggatgctttccagcacaccgttcatcataccgatacccgcacgcaggattggcacaacggtaatctttttacccttgatttgttcaatttcgaccggaccacaccagccgtcaattgtcactttctcagtttctaagtctgaagttgcttcataggtcagcaggctaccgacttctgaggccagttcacgaaagcgttttgtgcttatatcatgatctcgcatcaggccaagtttgtgtttaacgagcgggtgttttacctcgacgactttcatgggttctcctactgtgtaagccctggcggacaaaaaaatcgcgagattataccgcttttctttctcagcgccaccccggatttgttgattatagtcaattatcacgcgtttcatgtttgttacatgaataagtgtgatctgacgcattttgacaaaaaccggcgtaaatcctctcgcaaacgtttgcgtggcctgttagaatagccgcgttttcgatacacccacttacttgcaatcgccgttgggggccgcagtgactgacaaaacttccctgagttacaaagatgccggtgttgatattgatgccggtaatgccttagtttcccgtattaagcatgttgtcaaagagacacgccgtcctgaagttatgggcgggctgggtggtttcggtgcgctgtgtgcggtaccgcagaaatataaagaaccggtgctggtttccggcactgacggcgtcggcaccaagctgcgcctggcgatggatctggcgcgtcatgacactatcggtattgacctcgtcgccatgtgtgtgaacgatctcgtcgtcgccggtgctgagcccctcttcttcctcgactattacgcgaccggcaaactggatgtcgatactgccgcccgtgtggtcaccggtattgccgaaggctgcaaacaggcaggctgtgcactggtcggcggtgaaaccgctgagatgccgggtatgtatcacggcgatgactatgacgtggccgggttctgtgtcggcgtggcggaaaaatcagaaatcattgacggcagcaaagtccgcgccggtgatgtgctgatagcgctggcctccagcggcccgcactccaacggctattctctgatccgcaaaatccttgaggttagcaaaactgacccggcagccacagcgcttgacggcaaatccctggcggatcatctgctggcaccgacaaaaatctatgttaaatctgtgctgaaactgatcgaaaacaccgatgttcacgcaatcgcccacctgaccggcggcggtttctgggaaaatatcccgcgtgtattaccggcctgcacccaggcacggattgatgcctcatcctggcagtggccgtctgtctttaactggctgcaaaaagccgggaatgtggaagactacgaaatgtaccgcaccttcaactgcggtgtcggtatggtgattgcgctgccggcagcgtctgtgccggccgccctcgccctgctgacagaagccggtgaaaatgcatggctgattggtgatatcgcggtctgccgtgaagatgaaccgcaggtcatcatccgctgatgaaaaaacgccttgttgtcctgatttccggcagcggcagtaatctgcaggcgttgattgacgcctgcgattcaaaagccctcaatgcggaaattgtcgcggtattcagtaataaagcggacgcttacgggctactccgcgcacaacaggccggtattcccgcactatcgctcagtccggcggaattctcttcacgggatgcttttgatgccgctttgcaggtacagattgatgagtatcagccggacctaatcatcctcgccggctatatgcggattctgacaccggcttttgtccgccattaccacggcagaatgctcaatatccccccgtctctcctgccgaaatatccgggtctgcacacacaccgcaaagcactggaaaacggtgatgccgaacacggtacttccgtacattttgtcacggaagaactggacggcggcccggttatcttacaggcacgcattgccgttctgccggatgatactgaggacaccctcaccgcacggatacaacaggaagaacaccgcatctatccacaggtggttaactggtttgtgcaggggcgtctggtgttacaaaacgggctggcatatctggataaccagttactgccaccggatggttttcattcataaaataaatgactcactgatatgtgagtcatttatctatatttattttcttttattcccgttatttctttttttgctggaataacgctcacaattttatctcccgtccacgataatctgactgcataatgctatgttgttgtcaccaacaggtaacaatactctcgtttgacaaaatttaattcagactgcaataattgctgttatctgaatgacataaccctgaaggtatgaccatgaaaattacccgagtccgtctgaaaaactggaagaatttccggaatatcgatatcaaaatgaatgaccgggtatatatcatcggccctaacgccgtgggtaaatctaacttcctggatgttttccgttttatgagtgacctgtgcaaggatggtggcggcttacagaaagcggttaatgatcgcgggggtatcactaagctacgttgccttcaggcgcgtaacgatactgaagtgactattattctggatttatctgacgatgataatgaatgggtgtatgaattaaaattcaaagcatccggtaaagggaagcaattaattcatattaccagtgaaaatgtcacccgtaacaatgagaccatattgtcccggccgaatgctaatgatcaaaccgatgaaattcaactgacacaaacacacctggaacaaattttagcaaatcagccatttcgtgctgtggctcagttttttgcctctatcacgtatctgcatattgttcctcagttacttaagtttgctaaagaaattggtgtcactaaaattgaagatgatccctttggacagggatttctggaccggctggcgaatactaatgctaaaacccgtgatgcgtggctgaaaaaaattcaggcgggtttatctattgcagtaccgcaatttaaagaactccgttttgagcgcgacagttccggtcagccacacctggaagcccgttatgaccactggcgccctaatgcaggatggcagaaagaagaccagttttcagatggcacattaagactgattggcctgatgtggtcacttcttgaaaaaagacaattgctcctgctggaggaaccggaactttccctgaataatgaaattgtccggtatatccctgaagtgattgaaaatacgctgaaaggagcacgaaaccaaaaacagatccttatcagcacacacagtgtttcgctgttaagcaacaacatagacggtaatgacattattctgcttctgccctctgaaaacggtacaacggcacgttcaccgaatgacgatgaactggccgcaatgcgggctggtctgaccgcagcagaaattatgttaccactgacagcaccagccaatatcagaaaaatgccagagatataatgaatgaaaatttcgatcgcgacagaagatattttaacagaagaagttatggtcaaaatactatcttctgtcagcgatgttgatatcccgtttaaattagggaagaagggctgtggttatctgaaaaagaacattcataaattcaatgaattatcttatcgtcataatgtccttgttgttttcgattcagacttacaaactaatattaacgaattccgttcatcaatagaaaaagaaataaaaaacaaaagccggagcctggatatcattattccggtacgggaaatcgaaagctggattttagctgatcgcgaaggattgagtgcatttttgaatatttccggcgataaactctgccggtcaccggatgatttacttgacccgaaagagaaaatcataagtctggcgaaactgtctaaaaatgcggatatacgcaaaggaattccgcctaaaaaaggtgctgcctcaaaagtcgggctgtcttacaacacgctgctgacccgttttgttcaggaaagctgggatattgacagagcaaaagtgcattcacccagtctgcgtactgcactgatgacgattaaccgtattgtcagtcaggttgactcataactaccgcagtttcgccatctcattaagatacgctttgcgctgtccggtataattccaccacggttgtgccggttgtccggcgagaaaatcagtgactgaccagaacacatcaataacacagggatcctgacggacaccggttaccgcgcagagcatttcatacataatcaccgggtctgaaccggtaatatcctgcggcgtctcataccccagcagacgcagatcttccgccatcgcctcgccgatattcggcaggtcggtaagcgtattaagacgggtgcggcacacttttgtcgggttcatggaaatatccggtatttattaatgatatgcgtactaccacatactttatcatctgtctgctgtgaccggtactcaaataacacgtaattgtcataattttacacggctgtgccagtcatgacgcggaaaagcggatccccggataattccgtttctgttatgtgttacactgactgataaaatacaaccaatactgaggtgatttatgtccggtggtactgctgtcccgcctgtaaaactgcgcccgcttgagcgtgaagatttagcttttgttcatcagatggataataacgccagcattatgcgttattggtttgaggaaccgtatgaagcttttattgaattaagtgatttatacgacaagcatattcacgatcagtcagaacgccgtttcatcgtggaaagtgacggtaccaaagtcgggctggtggagctggtggaaatcaatcatgtacaccgccgtgctgaattccagattattatcgccccgtcacatcagggccacggatttgcgtcccgcgctgcccgtctggctatggattatgcgttttctgtcctcaatctgtataaactgtatctgattgtggatgtcgaaaacgaaaaagcgatccacatctataaaaagctcggttttcataccgaaggccagttaattgatgagtttttcgtcaacggagaataccgcactgccatccgtatgtgtatttttcagccggaatatctggtcatgaaaaataaatctgcggatgcggaaagctacgttgaaaaaaatgcccgcgtaaagcagaacctgtaacgattttttagtaaactgtacgctgtgttcaaccctgattcagagtaacccgttccggagtaacaatgtcccaagataggctctatatggaaaaagaactcagttggctgtcgttcaacgagcgggttcttcaggaggccgccgacaaacgcaacccgctgattgagcgcatgcgttttctgggcatttactcaaataacctggatgagttttataaagtccgctatgcggatgtgaaacgccgcatcctgattaatgaggaacagcgtggttccggcgccagcgggcgccatctgctgcgtaaaattgaaaacaaagtcgcaaaacaggatcaggcatttgataccctgtataacgacctgctgctggaaatggcgcgtaaccagattttcctgattaacgaacgccagatttcgccgaaacagcaaatctggctgcgtcagtatttccgtcagcatctgcgccagcacatcacgccgattatgatccagaccagcaccgatctggtcgaattcctcaaagacgattacacctatctggtggtggagattgtcaaatccggccgtgagacccgctatgcactgctggaaattccgtctgataaagtgccgcgttttgttaatctgccgaccgaaaacggccgccgccgccagtcgatgatccttatcgacaatattctgcgctactgcctggatgaaatcttcaagggcttcttcgatttcgatgccctcaatgcctattccatgaaaatgacgcgcgatgcggaatatgacctcgccaccgagatggaatccgggatgctggagctgatgtcctccaccctgaaacagcggctgaccgccgaaccggtgcgctttgtctatcagcgcgatatgccggatgaaatggtgacactgctgcgtgaaaaactcggcctgaccaatgatgactccgtcattgccggcggtcgctatcataatttcaaggacttcatccgcttcccgaatgaaggcaataagaatttgttaaacaaaccgctgccgcgtctgcgtcatgtctggtttgatcatcaccgcaacgggtttgatgctatccgcgagcgggatgtgctgctctattacccgtatcacacctttgaacatgtgctggaactgctgcgccaggcctcctttgacccgagcgtgatttccatcaagatgaatatctaccgtgtcgccaaggactcccgcattatcgattccatgatccatgcggcacacaacggtaaaaaagtcaccgtagtggtggaattacaggcacgttttgatgaagaagccaatattcactgggcgagacacctgaccgctgccggggtgcatgttattttctccgcgccggggctgaaaatccacgccaaactgtttattatctcgcggctggaagacggggatgtgatccgccgttatgcccatatcggcaccggtaacttcaacgaaaaaaccgcgcgtatctacacggattactcgctgctgaccgccaatgaagagatcaccaatgaagtccggcgcgtgttcaactttattgagaacccgtaccgccctgtctcttttgataacctgatggtgtcgccgcagaattcacgggcaatgctgaatcagctgattgatgatgaaatagccaatgcactggccggttatgaagccggaattacactgaaaatcaacaacctggtggataaacagctgagtgagcgtctctatgatgcctcagaagccggggtgaaaatccgtctgctggtgcgcggcatgtgcgcactggtgccgggacaggttccgtacagtgagaatatccaggtgaccagtatcgttgaccggttcctggagcatgaccgggtgtatgtgttcaccaacaaaggggacgaaaaagtctatctctcctctgcggactggatgacccgcaatatcgattaccggattgaagtggcggttcgtctgctggatccggtgctgcgccgccgggtgctcgatattctggatattcagttcagtgataatgagaaggcgcgttatctcgataaagagatgtccaaccattatgtgccgcgcggcaacaagcggaaagtccgctcgcagatggcggtttatgactatattcgttccctggaacaaccggataattaaaaggcccgtgcatgccattatcactgatcactgaaaaagatcgtccgctggaaattgcagccatcgacctcgggtcgaacagctttcatatggttattgcccgtattgtcaacggcgcactccaggttctcagccgcctgaaacagcgggtgtatctggctgaaggcttaaatgatcagaatgagctgagcgaagaagccatggagcgcgggctggcctgcctggcgctgtttgccgagcgccttcagggttttcccgccgcacaggtcacgattgtcgggacacacagtctgcgtgaagcggtcaatgcgcacgagtttctcgaacgcgccgcatccgttatcccctatccgattgaaattatttccggtcacgaggaagcccgcctgatttttatgggtgttgaacacacgcaaccggaaaaaggccgcaaactggtgatcgatatcggcggcggctcgacagagctggtgatcggcgaacgttttgagccgattttaattgaaagccgccgtatgggctgtgtcagtttcagccgtcagttttttccggacggcaaaatcaccgaggccaactttaaccgcgcccggctgatggccgtttccaaactggaaaacctggcaattgccttccgggtgcagggctgggatgtgtgtctcggtgcatccggcaccatcaaagcggcctgtgagatcctgcgtgaactgggggagcgggacggcattatcacccctgtccgcctggaaatgctggtcaaacaggtgctgcgttataaacggtttgatgccctgaatttaccggggttgtctgacgaccgcaaaaaagtgtttgtgccgggtctggcaattctgtgcggtctgtttgacgcgctggaaatcactgaactgcgcctgtctgccggtgccctgcgcgaaggggtgctgtatgagatggaaggccgtttccgtcatcaggacatccgccagcgcaccgcgcaaagtctggtggaacactataacgtggataacgcccaggtactgcgtgtcctcaccaccatgaaaaacctgtaccgccaatgggcggagcagaacccgtccctggttgatccgcagttggaagccattctggtctgggcggtctggctgcatgaagtcgggctgagcatcaacctctccggcctgcaccgtcattcggcctatattctgcagaacaccaatttaccgggattcacccaggagcagcaactgctgctcgccacactggtgcgttaccaccgcaaagcggtaaaaagtgacgatatcccgaaattcacactgtttaaacgtaaacaggtcatccctctgatacagatcctgcgcctcgcggtcttactgaataatcagcgccagtccaccaccaaacgctcctcactgcgtctggaaaccaatgagggacactggacactgttttttccgcgccgctatctgactatcaacacattaatgcagcttgatctggaaaaagagcaggcttactgggatgatgtgcccggctggcacctcggtataaaagaagaagacgtctgacagagaatccccggccagtcttatttgtttaaaagttttatgtgtaaaggaaaatcatgtctgaacacagtttctccattgataactcatcaccggtcaatccgcactcccagcggctggcccacattcgtcagcaggttttgcctctgttcctcaacgactcacagtttgtggaaaccattctgggcaccgccgatgaacatgccaggctcagtgatgatgaactgcattcaaaatcgaagttagtcaaaaatctgctgactgacctccacgccgctgaccttgcggatatgctggaagccctgccctatgatgagcgtctcgcgctctggcatctgattgataaccaccagcgcggggaagtgctggtggaagcctctgtgtccgtgtgggacagtctgattaaagatatgtcagacaaagagctgctgcgcgccgttgccaccctgcatgtggatgagcaggcgtatatcgccgagcacctgccgcgcgataccatgcgccgcctgctgacctatctggaaccgagcctgcgtaaccgcatccgcacggttcttcagtacccggcggacagtatcggccagatgatggactttgagtttgtcaccgtacgcggcaatgtcccgctgaaaacggttcagcgttttctgcgctaccgcagcaatatcccggaagccaccgataaaatctttgttatcgacagcaataatattttgcagggcgaactgccgctgaccaccattctcacccagtcaccggacaaactggtctctgatgtgatgaaaaccgagccggtcaccttcctgccggatgaaaaaggcgaagatgcctccggtgcgttcgaacgttatgacttaatctccgccgcagttgtcgataataacgggcggttgctcggacgactgaccgttgaggatatcgttgataacctgaatgaagagagtgaagaaaacatccgccgtatggggggcttaagcccggaagaggatgtgtttgccccggtcggccaggcggtgaaaaaccgctgggcgtggctggcgattaacctctgtaccgcgtttgtcgcttcccgcgtgattggtgtgtttgagcataccatttcccagctggttgcactcgccaccctgatgccgattgttgccggtatcggcggtaacaccggtaaccagaccatcaccatgattgtccgcgctctggcgcttcatcagatccagaaaggcagtttttccttcctgctgctgcgtgagctgggcgttgcctttatcaacggcgtggtctggggcgggattatgggggtcgttacgtacctgctctacggcgatatcgccatgggtgcggtaatgacgctggccatggtgcttaacctgctgatggcggccatcatgggtgtgcttatcccgctgacgatgatgaaactcggacgcgatccggcactcggctccagtgtgatgatcaccgccatcaccgataccggcggatttttcatctttttaggtctcgccaccctgttcctggtctgatttttgctcagatagtcctctgcggccacggaaagagaagttttacttctgctctccgtggccgtttttgtctcttcctgctgagttccagcccttttgttattatcccgccgcagaggattatgatgccggactgacaatatccggtgaatatgatcacttctgcactaccactctgaaataatcatcatgcccctcacacttatttatatttatttaccgctgttcattcgtgagtatattgataagccttattcatataatggtattaatcgtattttataaaccagtattccgggtaaataataataagggctgaatctttaattattccgttaattatcggttccggttttcataatatgctgtcattccggattccttaacgttatcatccgtgacgcaaatcatatttagcccaataatctgacttataacatataacaagaatattcatcttgttttagccggtgctgtttacaatatacggaacttcttgctataacaaagcataccctccggtaacagacaattcccgttttttatttccggttatccctgtgataaccgggataatgttgccgccacctctcttttgggaaacacaaatgagaaaaaaaatgacacgacccccgtcattgaataaatgagtaaataaaaggacataattatgacaaccgatacatcgccattaagtcagcctcaggcaaggccattaaataaaaacgattataaaacactgggattatcttccctcggcggcacgcttgaattctatgattttgtcatatttgtcttttttaccggaacactaacccacctgtttttcccgggtgataacgagtttatcgcccagatgaaaacgctggggattttcgccgccggttacctggcgcgcccgctcggcgggatcattatggcgcacttcggcgatattatcggccgcaagcgcatgtttaccctgagcatcttcctgatggcggtgccgacactggtcatcggtatgctgccgacctatgaaagcatcggtgtggcggcacctgtcctgttactgctgatgcggattttacagggtgcggctatcggcggtgaaatgccgggcgcatgggtatttatcgcggagcacacaccggaacagcgctacgggctgggtgtcggtacgctgacctccgggatcaccggcggtattctgctcggctcgctggtcgctatcgccgttcaggcctcgtatactgcggcggaagtgaccgcatgggcatggcgtattccgtttatcctcggtggtgtgttcggactgatttcggtgtatctgcgccgctttttgcaggaaaccccgatctttaaagagatggccgccaaacgggcattatccgaagagatgccggtgaaaacggttctgaaaaaccacaaaatggcctgctttgtcaccgccgggctgacctggtcgttatccaccgctatcgtggtgatcattctgatgaccccgtcggttgtggtggaaaagatgtacggcattgatcgcacattgtcattacaggcaaactgcgtggctacactgaccttaaccctcggttgtattttctggggctggctggaagataagatcggcagccgtgtgacactggcattgtcctggggcggattagcgatcaccgcattccacttctacagtgcactgtcaccggatatcgcagcggcttcactggtaattaactatgcggtgatgggcttttttgtcggcgcgattgccactacaccaatcatcagtacgcgggcatttccgccggcaatccgtttctccggcttatcctttgcctacaacatggcttacgcggtattcggcggcttaacgccgatgctgacaggagcctggttacagaaaagtgcaatggcaccggcgtattatgtggcaggcgtgtcggtactggcgattatcatcggtttcttaccgctggcacacaaaggctggacagcgcgtaaaacacagaatgtgaaaactgtcgcagcacaacagtcttaataaaacaggtaaaacagcaagggcggatgattatccgccctttttcttttccgtcttctgaatcagcgccaggccgggtttttcattaccgaatatttacccgggccgataaaggccagtgcaataccgctgataaagaaatacatcaggctttcaattgcccacgcccctgtcggatccagcataaaggtcttattcacgccgatcatcagccaggcaacaatcatggtaaaggacaccagcaatgcggacggccgggtcagaataccgaggataatcaggatcggcgcgacaatttccccgaaataggtgccgtaagcaataaattccggtaacccgaaagaggccagcagcccttttatccccgccgcaccggtgagtaatttaccgataccgtgaaacaacattaatccgccgaccgccagccgcagtaataattttccggcatcgtcgtgtgataacagcctgttgattacacctgtcataatatacccctgttgaatgagaatcttactcattgtgagtatacgcagtgatacgcaaagcggtagcggcaacattcattggcagtgaaaaccacaaaatttcattcattttaattgttaaaaatatgctgacaaaaacaaaacctaactctttatattttcttataatatctgggtgttatctttttcaataatagcattcgggtcttatttatcagttcgttaacaaaatccatgcagtttttgtcaaattatctgaaaatcatcatcaaaaatacttacctgccttccgtctgtttcgtcacacttttttgaaagagttaacatcaatttgcatctcgccgccctacactgacagacaggtttctgagtaatactgttgtatctgataaggagatgtcatgaagaagaatattatcgccggttgtctgttctcactgttttccctttccgcactggccgcaatcccggcgggcaacgatgccaccaccaagccggatttatattatctgaaaaatgaacaggctatcgacagcctgaaactgttaccgccaccgccggaagtcggcagtattcagtttttaaatgatcaggcaatgtatgagaaaggtcgtatgctgcgcaataccgagcgcggaaaacaggcacaggcggatgctgacctggccgcagggggggtggcaaccgcattttcaggggcattcggctatccgataaccgaaaaagactctccggagctgtataaactgctgaccaatatgattgaggatgccggtgatcttgccacccgctccgccaaagaacattacatgcgcatccggccgtttgcgttttacggcacagaaacctgtaataccaaagatcagaaaaaactctccaccaacggatcttacccgtctggtcatacgtctatcggctgggcaacggcattagtgctggcggaagtgaacccggcaaatcaggatgcgattctggaacggggttatcagctcggccagagccgtgtcatctgcggctatcactggcagagtgatgtggatgccgcgcggattgtcggttcagccgctgtcgcgacattacattccgacccggcatttcaggcgcagttagcgaaagccaaacaggaatttgcacaaaaatcacagaaataagcagtgatatctggtcagggcagtgcaacagctgccctgatattcctgtttattcccacatccagcggtcttcccgatcccagccttttgttttcatgcagctgtagaaatagcggttgcggctgtcttcattcacatccatcacataactttctgttaccggtgtctgctctttgtaggttttgctgttaccgcagtcatcgtcctttttgcagcgtttctccacatcgcgcatcacactgcgctgggcaacttcatttttgaccggataaagcttatgtgattccggttcacagaaggcatttgcctctgcccgtgtgtattctgagccgcccgggacttccacccagacagaagaacagccggacagcaacagtgcagagacaagaataagtctgtttttcatcattatagtgtgtattatcagcttgttaagaatgcgtaatattactgcacatcataaactgagtaaaccacaccggtaatatttccttaagggatgataaagtggctgacataaaggcagactccgctgaaaccacgtatatttacctgtatcaacgttattttcacaattcttccatttttacgttcagatttaccggtacactatccccatcatatttcaggctgttttgtgcccttacgcgtaccccggcagtaccgggtaaaaaggaatgatgagtaatcccataatgaataatgtacaaaagagaaagaaacgcacaggcattacgattgccgttctccttctgggcgcagccggttacggcacctatcattactttaactctgcggcaccggccaccccgcctgctgccggaaaaccgggggcttccgcaggcaaaaacagcaaccgtccgggccgcccgccgctggcaccggtacaggtggctaaagctgtttctgaaactattccccgcaccttgtcagcgctcggtaccgtgcaggcggccaattctgtgacggtgaccagccgcgtggaagggcaactgatgcaaatccattttgaggaaggtcagaaagtgaatgccggtgatttgctgttcaccatcgacccgcgtccgtttgagatccagctggcccaggctcagggacagcttgccaaagatcaggccacgctcgccaatgcccggcgtgacctgagccgctatcagaaactcgcggccactaatgtgatttcgcaacaggagctggatacccagcaggcaaccgtcaaatcggcggaagccggtattaaggtggatcaggcggctatcgacagcgcgaaactgcaactgacctacagccgtatcaccgcgcctatcagcggaaaaatgggtctgcgtcaggtggataccggcaactttatcaccgccggaaccgccatgccgctggtggtgatcaaccagaccgcccctgccgatgtgctgtttaccgttccggaaaatgatattccgctgatccgcatggcgcagcgcactatgccggaactcacggtcaccgcgctgagcaaagataacagcatccgcctggctcagggcaaactgctgaccctggataaccagatagatgccgccaccggcaccgtaaaagccaaagcacggtttaccaatgatgatgatctgctgttcccgaaccagtttgtcaatgtgctgctgcaggtcggccagttggaaaatgcggtggtgatcccgaatgccgcactgcagatgggcaccgaaggcaattatgtctggctgctggaagcagagaataaagtccgcaaacaaattgtggatgtggaattacagaccccggaacgcgtggtgatcaaaagcggcgtcagcgccggtgataccctggtgactgacggaatcgaccgtctgactgacggcgcgcaggtggaagtggtgtccggtgagaaaaaagccgcagccggagataaggcctgatgtccggaaataatccagaaacccgtgccggcggcccgtcccgcctgtttattctgcgtccggttgccaccagcctgtttatgctggcgatcctgctggcgggaattgtcggctaccgcatgctgccggtttcatcgctgccggaagtggattacccgactatccgcgtggtgacactctatcccggcgccagtccggatgtgatgacctctgccgttaccgcaccgctggagcgtcagttcgggcagatgtccggactgaaacagatgtcgtcgcaaagctcgggcggcgcctccgtcattaccctgatgttccagctctccctgccgcttgatgtggcggtgcaggaagtgcaggcgtccatcaacgcagcaactaatctgctgccgaatgacctgccttatccgccgatttacagcaaagtgaacccggcggatccgccggtactgacccttgccgtcacctccgatgccatgccgatgacgcggttacaggatatggtggagaaccgcatagcccagaaaatttcccaggtggaaggcgtcggtctggtgacactcgcgggcggccagcgccctgccgtgcgggtacagttaaatgccaatgcggttgccgcttacgggctggacagcgaaactatccgcaccgcaattaacaacgctaacgtcaactccgccaaagggagccttgacggcccggcgcgttcggtgacgctgtctgccaacgaccagatgaaatcggcggaagattatcagaacctgattgtcagctacaaaaacaatgccccgatccgtttgcgggatgtggcaaccgtacaggaaggaccggaaaacactcagctgggtgcctgggttaatgataaacaggccattgtcattaatgtacagcgccagcccggcgcaaacgtgatttccaccaccgataccatccgtgctctgatcccggagctggtggaaaacctgccggaatccgtcaccgtaacggttctgactgaccggacagatgctatccgcgcctcggtcaaagatgtgcagtttgaactgttcctggcgattgcgctggtgatcatggtgatgtatctgttcctgcgcaatatggccgcgaccctgatccccggcgtggcagtaccgctctcgctggtcggtacgttcgcggtgatgtatttctgtggtttctccgtcaataacctgacgctgatggcgctgacgatcgccaccgggtttgtggtggatgatgcaattgtggtggtggaaaacatcgcccgctatctggaaaaaggcgataaaccactgaccgctgccctgaaaggtgccggtgaaattggctttaccattatctcactgaccttctcgctgattgccgtgttaatccctctgttatttatgggagatattgtcggccgcctgttccgtgagtttgccatcacccttgcggtggcgatcctgatttccggtgtggtgtcactgacactgacaccgatgatgtgcgcccggttcctgaaaccggaatccgctcatcgtcataaccgctttaaccgcgccactgaacgcttttttgagcgggtgattgccggttacggccgctggctgacatgggtgctgcgccatcagtggctgacactcggggttgcgttcagtaccatggcgatcaccgtcatgctctatctgtttattccgaaaggctttttcccgatccaggataacggactgattcaaggcacgctggaagcgccgcagtccgtgtcgtttcaggccatgagtgagaaacaacaggcggtcagccgtctgctggcggatgacccggcggttgccaatatcgccgcctttgccggtatcgacggcagcaatgccacactgaataccggccgtctgcaaatcaccctgaaaccgctgtctgaacgggctgaccgcgcggaagctatcatcacgcggttacaggagaaagctgattccctgcccggcgtgaaactgtacctccagccttctcaggatctgacaattgatacccagacctcccgcacgcagtatcagtttaccttacaggccaattccctggaggagctggatctgtgggtaccgcgtctgatgacggaactggagagcagtgatgccctgactgacaccggcaatgactggcagaataaggggctggttgcctatatcgatattgatcgcgacaccgcgtcacggctggggctgaccatgaccaatattgataacgcgctgtacaatgcgttcggtcagcggctgatctccacgatttatacccaggccagtcagtaccgcgtggtactggaaaataacaccgcgctgacaccgggtgcggatgccctcagcagcatccgtctgaccaataaagacggcaactcggtgccgttgtcagcttttgccaccgtttcgcagcgcttcggaccgctggcaatcaatcatctggcgcagttcccgtccgcgaccttctcatttaatatcccggcaggcggttcactggaagcggctgttaatgcggtgaaatcagcagagcagcgtatcggcctgccgaaagatattaccactcaattccagggggcgaccctcgcctttgaaaatgccctgtccaacaccctgtggctgatccttgccgctgtcgtggcaatgtatattgtgctcggcattctgtatgagagttttattcacccgattactatcctctccaccctgcccaccgccggggtcggtgccctgctggcgctgattatggcgggtaatgagctggatgtgatcgcgattatcggtattattctgctgatcgggattgtgaagaaaaacgccattatgatgattgacttcgcccttgcggcagagcgcgaacaggggctgtcgccgtatgatgcgatttatcaggcgtgtcttctgcgtttccgcccgatcctgatgaccaccatggccgcgctgtttggtgcggtgccgctgatgctcagtaccggggtcggtgccgagctgcgtcagccgctgggggtctgtatggtcggcgggctgattatgagccagatcctgacactctttaccaccccggtgatttacctgctgtttgaccgcctgtctcactggcgcgataacgcccggtttaccccggaaagtgacaacacgggagcctcatcatgaggctgttcgccctgtttatcgcccgtccggtagccacgacgctgataagcctcgccatcactctgtgcggggcgatcagcttcctgttcctgccggtggcaccgttgccgcaggtggattatccggtgattaatatcacggcatcactgccgggtgcttcaccggaaaccatggcatcgtctgtcgccacgccgctggagcgctcgctcgggcagatagccggggtgtcggaaatgacatcctccagctccctcggcagtaccagtattaccctggaatttgagcttaaccgcgacatcaacggtgctgcccgtgatgtgcaggcggcactcaatgccgcgcaaaacctgctgccgtccgggatgccgtcgcggccgcgttactataaatccaacccgtccgatgcgccgattatgatcctgacgctgacatcggataccctcgataccggcaaactctatgatatcgcctccacccggctggcacagcgcctgtcacagattgaaggcgtgagtgaggtttcggtcggcggcggctcgctgcctgccgtgcgggtggagcttaacccgtcacagctgtttaaccagggggtttccctcgacagtgtgcgcaaagctattgctgatgccaacgtgctgcgtccgcagggctcggtgtctgacaatgaacgccgctggcagattgacagcaacagtgaactgaaaacggctgaggattatcgtccgctgattgtgcattacaatgacggcgcggcggtacggctggccgatgtcgccacggtgaaagattcagtacaaaacgtccgtgccgccgggatgagcaacggcaagccagcgattctgctggtgatccgccgtgaagccggtgccaatattatcgccacggtggcccgtatccgtgagcagttgccggtattgcaggataccattcccgccagggtggatttgcaggttgcccaggatcgcacgcccaccatccgcgcctcactgaccgaagtggaacgcgcactgaccattgcggtggggctggtgatcctggtggtgttcctgtttctgcgttccggacgtgccaccattatcccggcgcttgccgtaccggtttcccttatcggcaccttcagtgctatgtatctgtgcgggttcagcctcaataacctgtcactgatggccctgaccgtcgccaccggctttgtggtggatgatgcgattgtggtgctggagaatatcgcccgtcatattgaaaacggcctgaaaccgaaagaagcagcgctcaagggggtcagcgaagtcgggtttaccgtgctttccatgagtatctcgctggtggcggtgtttattccgctgctgctgatggatggcctcgtcgggcggctgttccgcgaatttgccatcaccctgaccaccgccattgctatctcactggtgatctcgctgacactcaccccgatgctttgtgctcatctgctgaaaaaccgcgcggcaccggccagggaacgcaaacgtggtgcgggccggatcctgttccgcatccagcaatggtacgggcgcagcctgaccgtggtgctggcacacagccgctgggtgctgctgattttcaccggcaccattgctctcgcggtctggctttatatttctgtgccgaaaacctttttcccggatcaggataccgggcggctgctgggctttgtccgcgctgaccagagcatttcgttccagtcgatggagcagaaaatgcgcaccttcatgcagcgtattcacaatgataaagatgtcgccagtgtcaccggctttaccggtggcggacgggtgaacagcgggtttatgtttatctccctcaatccgctggatgagcggacagacagcgcccaggatgtcattaaccggctgcgtgtcaccctcgcggatgaaccgggcgccaatctgtttctgatcccggtgcaggatgtgcgcgcgggcggccgtcagtccaactccagttatcagtattccctgctggcggacgatttatccctgctgcgcgaatgggagccgaaaatccgcaaagcactcggcgaactgccgcaactgaccgatgtaaactcggataaagaagataaaggcgcggagatggcgctgacttatgaccgcgatgtgatggcgcagctcgggatcagtgtcaatgatgccaataacctgctgaataacgccttcggtcagcggcagatctccactatttatgagccgctgaaccagtataaagtggtgatggaagtcgcgccgcagtatacgcaggatgtcagcgcgctggataaaatgtttgtcatcaataaagagggacaaccggttccgctggcgtatttcgcacagtggcgtccggcaaatgcgccgctgagtgttaaccatcagggattgtcagcggcctcaacggtcggctttaacgtggcggaaggctattccctgtccgatgcggtggcggcagtcgaacgcaccatggtggagctgggtgtgccgtccggggtgcgcggtacttttgccggaaccgcacagctgttccaggagacattacagtctcaggtgctgctgattatcgccgccattatcacggtgtatctggtgctcggcatgctgtatgagagctttattcatccgctgaccatcttatccaccctgccctcagcgggggtcggcgcactgctggcgctgcgcttctttgatacgccgttcagcctgatcgccctgatagggattatgctgctgatagggatcgtgaagaagaacgccattattatggtggacttcgccattgccgcccagcgcggcgggcagagtgcgcgggatgcgattttccaggcctgccttctgcgcttccgtccgatcctgatgaccacgctggccgccctgttcggtgcgctgccgctggcgctcggcagcggagacggtgcagagctgcgccagccgctcgggataaccgtggtcggcgggttgctggtcagtcagatcctgacactctataccacgccggtgatttacctgttctttgaccggctgcgccgcaaaaaaaccggagaatccgccgggcaatccgttatcagtacggagggaaatgcatgaaaaccggaataggtcacaaactgtttctcgccatttttgccacctgtatgctggtggtgctgaccatgcatctggctatccgtttcagttttgagcagggctttctcggctatcttcagcgctccgccgaagaccggacggagatgatcgccgatgttgtcgctgaacaatatgccgattacggcagctggtattttttgcgcaataatcagcgcggttttatgcaggcactgcgggcactggataccgaccgccatatggagcatatggagcgcggctggaaaatgcgtttctggctgctggatgaagatgaccgccgcctgttcgggcacggcccggtaccgcccggcgagctctaccgcaaaccggtgaaatacaatgataatatcgtcggctgggttgtgatgccggcggatgacaatatcaaccgcgccgctgaccagagcttttcacatcagcaggcacgcaccagctggatagtctcggcgctggtgctgctggtgacgctggtagtcacctggctgctgacgcgtggcttcctgcgtccggtcaaacggctggcggaaggcacacatcagctggcagcgggtaatttcagcagccgcgtgccggttcacggcaaagatgaaatcgcgcagctggccaatgactttaatcagctcgcttccgcgctggagaaaaatgagctgatgcgccgcgactatatggcggatgtctcgcacgagctgcgtactccgctggctgtgttacagggtgaactggaagctcttcaggacgggatccgccagccgacaccggaaaccctggcgtctctgctggcggaagtgcagacgctgacaaaactggtcagcgacctgcatcagctgtcattatccgatcgcggctcactctcttaccgcaaagagttatgcaatctgaccgatgtgatcagccggtctatcggcgtattccgccaccggttgcaggaaaaaggtctatctgtcacaacggagctgccggataccctgatgattttcggggatgacgcgcggctcggccagctgttccataatctgctggaaaacagcctgcgttacaccgacagcggcggacagattgtggtacgcggtcagcaggatgaaacacagatccgtatcgactggtcagacagtgcaccggggctgactgaagaacaattttcacagatttttgagcgtttctaccgcagcgaatcctcccgcaaccgggccagcggcggatccggactcggccttgcgatttgtgataaaatcgcggaagcgcatcacgggcagataagtgcatccgcgtccccgctcggcggtgtgaccatcactctgatcctgccccgccctgactgacaggagttgactgcatggaacaaaatgctgaactgattcttattgtggaagatgagccgaaactggctcagttactgacagattacctgcacgccgcccattaccgcacgcactggctggcacgcggcggcgaagtgacggcctgggtgcaggaaaataaaccggagctgattttgctggatctgatgctgccggaaaaagacggcctgacactctgccgtgaaatccgtcagttcagtgacgtgccggtgatgatggtcacggcaaaaaccgaagagattgaccgcctgctggggctggaaatcggtgcggatgattatgtctgcaaaccttacagtccgcgtgaggtggtggcgcggatcaaaaccattctgcgccgctgtcagcgcagtaacgatacctcagaggataagtgtgacaccctgactattgatgaggtgaattatcaggtgcgtttcgggacacaaagcctggatctcactcaggttgaattccgcctgctgcgcaccatggtgtcacagccgggcaccgtgctgtcacgcaatcagttgctggataatctgtatgatgattaccgcgtggtcactgaccgcacgattgacagccatatcaaaaatctgcgccgcaagctcggacaattagacggtgaccgcgattttattcattccgtttacgggctgggttaccgctgggaaggcggcccggcagagattattgccgccaccgttatctgataaaaaacggcggaatatccgccgtttgttgtttctctgattactgaataacggacggacgcttcagccgtgccaggattttatcaagcgtattttgttcatcctgtaataaatccgcttttgcaatacggaatgtccggtccagctctgctgttctgatatgcagtttcagcgcagcgcggttgtctgttatcacagtgaaagcactcagcggtgcttcatagcagaccgcgtactgtcccggggtaaacaacaggttatcaccggcaatcgccagcatcggataatactggatacgccgcgcgttaatcaccagcacaatcgccaccgcgaccataatgccgccgatatccatcccgaacaccagcagtgccacgccgagtattccgtacagcaccgccatgctgatctggcgctgtttattaaatttcagcaggacctcaaacggcagttgtgccagtttcggtacggttttcagtgaacggtagaccacgcggttgtagtcgtagaggtaaccgacgataaagacaaagcccagcggaataaaaataataccgccgatcatggcgagaaccaggcccagtttcggctggttacgcaagaatgccagactggccagctgagcggccatcccgccggtcatcagaattttcacgtacggtaagacttcaatcatctgctgcatctgataatccagttgatcccggtacggctcaagtgccgacggaatataggagataatccccaggaaaatcaggttaagaaccaaaccgatccagactgcaatatgacgtttttccatgtatccacgctgtaacaggctatagtaaatgatagcgcggcaggaattatccgccgcaccactgaatttaacgaaactatatcaaatcgttatccgatattcatgccattttcagtaattcatttgataccgggcggatgacgcgctagaatccaacgccttgattacgcctccccctccggggaaggttctgacttgaactcagatcggaatacattatgtttacacccgaattactctctccggcgggctcgctgaagaatatgcgctatgcgttcgcctatggtgcggatgcggtctatgccggacagccacgttacagcctgcgtgtccgtaacaacgaatttaaccacgaaaacctcgccaaaggcattcaggaagcccacgaactgggcaagaaattctatgtcgtggtcaatatcgccccgcataacgccaaactgaaaacctttatccgtgacctggagccggtgattgccatgggtccggacgcactgattatgtctgaccccggtctgatcatgatggtgcgcgagcatttcccgcagatggatattcatttatccgttcaggccaatgccgtaaactgggcaaccgttaaattctggcatcagatggggctgacccgtgtgatcctctcccgtgaactgtcactcgaagaaatcgccgatatccgcaaaaatgtgccggaaattgagctggaagtgtttgttcacggcgcactgtgcatggcctactccggccgctgcctgctctccggttatatcaacaaacgtgacccgaaccagggtacctgcaccaatgcctgccgctgggaatataaagtcgaggaaggcaaagaggatgtcgtcggtaatatcgtccacaagcaggagccgattccggtgaaaaatattgagccgaccctcggtgccggtgccccgacagacaaagtgttcctgattgaggaagcacagcgtccgggcgaatatatgaccgcgttcgaagatgaacacggcacctatattatgaactccaaagatctgcgggctatcgagcatgtcgaaaagctgacgcagatgggtgttcactccctgaaaatcgaaggccgtaccaaatccttctattactgcgctcgtaccgcacaggtttaccgccgtgctattgatgatgctgttgccggaaaaccgtttgacccgtcgctgctgaccacgctggaaggcctggcacaccgcggttataccgaagggttcctgcgccgccatacccatgactcttatcagacgtatgagtacggttattccgtttccgattcccagcagtttgtcggtgagtttaccggcaaccgcgtgaacggcctggccgaagtggatgtgaaaaacaaattctccgtcggtgacagcctggaactgatgacgcctaacggcaacatcagctttaccctcgatgccatgaataaccgcaaaggggaagccaccgaagtcgcgccgggtaacggtcatattgtttatctgccggtaccggatgatgtaaacctggaatttgcattgctgatccgtaacttaccgggcaccagcacccgaaatccgcatatgccggaatttaccgacgctgcggccaccaacgggtaaaattctgaattttcgaatccgatcacaacaatcacgttagttatttcgtagtatcggacaggaaaatgaagaactaaaacgcaacatgtaataccaggaaccacctccttggttggctcaatctcccttgagccaaccttttctttttgtgcccttctcttttttctccgcccatttttcccggcataaactgtccgtgtttgttatctttaaaagacgtaatctgaacacggagtctgatatggcggaaacgcatatagtggttcttaacggaaaacgtgccggtgatgacggtattcgtcaggctgtccggcacctgcgggaaagcggtgaggacattcagatgcgggtgacgtgggagccggaggatattccccgttttgtccgcgaagcccgtcagctgaaagcggcaaccgtgattgcagccggaggcgacggcacgattaatgccgtatgcagtgccctgatgacttatccggctgaaaaacgcccggttctcggcattctgccgctcggcaccgccaatgattttgccaccgcagccggaataccggcggataaaaccaaagccctgcttctggccgccaaaggcagtccggtcgccattgatatcggctgtatcaataaatctcattattttatcaatatggctacgggcggattcggcccgaaaatcaccacagataccccggaagccctgaaaagcaccttcggcggtgccgcctattttctccacggcctgacacgcagcgatttgctgaaagcggatcactgtactatcagctgtgatgatttccactggcaggatgacgcgctggtgattggtgtcggcaacggctgccaggcgggcggcggacataaactgtgcccggatgcgcggatcaatgacggtctgctcaacctgagtattctgccggaacgcaactggccgcgctcactctggaacagcctctttaatgagggtgaggcggaaggcgtcatcatgaagcgcagcacacggatcaccatcagcgcggcacatgagatggtgtttaatctcgacggcgaaccgctgactggtcagcaattcaccttttccgtgctgcctgaagcgatccagtgccggttaccgccacactgcgggttgttatcttaaacacaatccacgacaatccgtgacaattttataacacgctacaggaatcggagtttacataccatgactgatatcgttaagttgttaggcaatgatgcatcatctcttcttgaacacacctgcaccaccattcccaaagacaatctttatctgccgggcgatgactttgtcacccgcgtgatgattgataataaccggccaaataccgtgctgcgctccatgcagtcactgtttaatcacggccgtctggcgggaaccggttatctttccattctgccggtggatcagggtgttgagcactctgcggcggcctcttttgccgctaacccgctctattttgatccgaagaatattgtcgagctggctatcgaggcaggctgtaactgtgtggcttccacttacggcgtactggcttctgttgcccgccgctatgcacaccgcatcccgttcctcgtcaaaatcaaccacaatgaaaccctgagcctgcctgcgcagtatgatcagacactgtatgccagtgttgaacaggctttcgaaatgggcgctgtggctgtcggcgcgacgatttatttcggctcaccggagtcccgccgtcagatagaggaaatctctgcggcctttgaacgcgcccatgaactgggcatggtgaccgtcctgtgggcttacctgcgcaacccggccttcaaaaaagacggagtggattatcacgccagcgcggacttaaccggccaggcaaaccaccttgcggccactatcggtgcggatatcgtcaaacagaaaatggcggaaaataacggcggctttaaagccatcggcttcagccatactgatgagcgcgtttacagcacactgaccacggataacccgattgacctggtccgttatcagctggcgaactgctatatgggccgtgcggggctgattaactccggcggtgcatccggtaataatgacctggcggatgcagtccgtactgcggtgatcaacaaacgtgccggtggtatggggctgatcctcggccgtaaagcctttaagaaatcgatgaaagacggggtagcactgattaatgcagtgcaggatgtgtatctcgataagaaagtgacgattgcttaaatgcagaacaggccggataaccggcctgatttttttgtgcttcctgtttgttccgggagctgctgataacgggcaaaacgaaaagccgctgtaaatacatccctgtaagctcaggcgcgtcatccatgacgcgcatgcttttcgtccacctgcccgttatctgcttattacctgtaccgcagattacttttcagcagacagataattatcgtttcttcttcttccgccctgcctgggcaaagcgctggcggttgctatcgctgctgctctctttcttcttctgctgctgtttgtctgaacccggataaaccggcggagcaactttaattttgttatcgcgcttctgtggttttgcagccggctttttgacttttttatcttcagaggaggatttttcaatcgcatcaaagagttcgaccagctcgtcatccgttaaatcacgccattcccccaccgggatcccggtcaggctgatattcatgatgcggacacgctcgagtttcgtcacttcataaccgaaatgctcacacatgcggcggatctgacggttcagcccctgaatcagtgtgatgcggaaaacaaacggcgcttcctgcttcactttacattttttggtaacggtaccgaggatcggcacacccgcgcccataccacggataaaatcatcggtgatcggtttatttaccgtcaccacatactctttctggtgatcgttaccggcacgaagaattttgtttaccaggtcgccgtggttagtcaggaaaatcaatccctgtgaatctttatccaggcggccgatagggaagatacgggtactgtgattgacgaaatcaacaatattatctttctcgccttcatcggtggtgctgacgatacccaccggtttattgagggcaatcagcaccagatcatcctgctcccgcgcctcaatcagttgtccgttgactttaaccacatcacccggcatcacctgtgagccgatagccgcacgtttgccgttgatcaggaccaatccctgctcaatataacggtccgcatcccggcgggagcagatgccgctttcgctgatgtatttattaagacgcacagatgaacccgtttccatatcttcccccctgaaaagcgcgcaatatacaccaattatcgtgcgatatcaccaccactgataaaaatggtgaaccggaccatgtccgtgacccacttcgaggctgtctgccgccgccagcgccccgtgcagatactgttttgccgcctccgtggtttccgcccagtccgcacactgaggccgcagtgccgccattgccgcagacaatgtacagccggtaccgtggctgtttttggtcggaatacgggttgaggtaaagcggtgacggccttccggcagaaacagccagtcagggctttcggcgttatccagatgcccgcctttcagcaatacggcgtttgccccggcggccatcagcgcctcgccctgctgctgcatcattttttcatctgtggcgacggccgttttcagtaatgccgccgcttcgggaagattgggggtaataatcgaaacgtgaggtaataattcagagatcagtaaatcaaccgcttcggctttcagcagcggatcgccgcttttcgccagcatgactgtatccagcaccacatacggcacaggatactgacgcagtttctcagccacagtgcggatcacgccgccgtcagacaacataccaatcttggcactgtcaattctgacatccgtcaataccgcatccagttgtgctgcgacaaattccggcgggacagaatgaacagaatttacgccacaggtattttgtgccaccagcgctgtcattaccgtggtgccgtaaacgcccagtgcggaaaaggtttttaaatccgcctgaatacccgcgccgccgctcggatccgttcctgcaatggttaatgcgttgattctcacctgatatctcctgttttgctgtaccactctgtatagtgaattatacgcatccggtgacaggaaaccaccgcagaacaggcaataaaaaaccccatgcccgtaagggcacagggtctgaatttgcgtcagtgatatacactcgttattgaaacggctatcaggctgtcgcgttgaccacgctggtaaaaccaactatcaggggcagtattgctgccggagataattatgctttagtgacgttggcagcagcagggcctttaggaccatcctgcacttcaaattcaacttgttggccttcagcaagtgttttgaaaccatcggtcatgattgcagagaagtgtacgaacacgtctttgctgccatcagctggagtgatgaaaccaaaaccttttgattcgttaaaccacttaacagtgcctttaagtttagccattgataaaattcctatcctacaaatttgccgataaccggcgatatacaaactagtcgttactgcttaaaaaacagaagcgtacctcgtttacccatttgagttatcacataggacaggtcggaaatcaagcgattttttcagcgggaagatctggtgcacatatttagaaatattaataacatgttccggtaaatttatacaaaaaattgataaccgcttgtgtttaaacatataaaaaaattacaactttgttcctttcctgcaagaacgataagctgctttacttcattattaccacactaagaatctgcctggttccggtgtccgttgatattttgtttagatttaagccggattagcagtataaaaataatatgaaatctatgttactataattgttatctattaattagcatcatttgttatgagcaaaataatcgttttaggataaatgattattgtcacaccaggagtcattcatgaagctttctttgagcacaatcagcgccctgacgctcacctctctgctggtggccgcacagcccgcagcagcacaggaacaggacacattaaaaagtgacagcgtcacaaatgatactgcagcttcagaaggactgtggggaacgtttaaacgcaacgttaccaacgtctggcaatcagaccagtatgatttatatgtcccgttctggacgtggcataaccgcctgacctacgacaaagaaaaaaccgataaatacaatgaaaagccgtggggggccgggttcggcaaatcctactatgatgaggataatgactggcacagcctgtacgccatggcatttaaggattcacacaataaatgggagccgattgtcggttacgggttccagaagatgtggatgccgcagggacaggacggtttcaaagccggtgtcggctttaccattggtgtgacggcgcgggatgactatcactatatcccgatcccggtaccgctgccgctggcatcggtggaatataaccgcctcgcgattcaggccacttatattcccggcacttacaataacggtaacgtcctgtttatgtgggcccgctggcagttttaagtattttgaacataaaaaaccggggatttccccggttttttattgcctgtcattatgctttcgctgcacggcggcgttcataataacggtatgccagccacaggaagccaatccagaacggcagcaggatcactgaaatccgcaagccatccagcagggcaatcagcaccaggataaaggccaggaacacgagacagatatagttgccccacggataccacagtgccttaaagaatggctccacgccctctttcatcttcgcctgacggaatttcaggttggagatacagatcataatccagttaatcaccagggtggtaaccaccagcgacatcagcagcgagaatgcctctttcggcagcaggtagttgatcaggatccccaccgaggtgaccagaccggacagaataatcgagttcaccggcacaccacgcggactgatgcgtttcaggaatgcaggcgcattaccctgacgtgccaggctgtagagcatacggctgttgctgtaaacaccactgttataaacagagagagcggcggtcagtaccaccacgttcagcacgtgggcaatccacaggttgatattgccctgcacggaatccgcagcaccaaaggcatggccgatttcacggaagatcagcacaaacggactgacgttctcgacaatttttgtccacggatagagagaaaggataacggtaatagaaccgatatagaaaatcaggatacggtaaaccacctgattgatagctttcggaatgctgtagcgcgggttttccgcttccgctgccgccagaccaaccagttcgaggccgccgaaagagaacataatgatcgccattgcgaaaatcagtccgccccagccgtgcggcataaatccgccgaactcccagaggttactgacagaggcctccgggccgccgttaccgctgataagcagataggcaccgaaggcaatcataccgagaatggccaccactttgatcatggcaaaccagaattcagtttccccgtaaaccttgacgttcaccaggtttaccaggtttatcagcacgaaaaagatcgccgcagagacccaggtcgggacatcccaccagaatttaatatactcgccgaccgccgtcagttccgccatgcccaccagaacaaacattgcccagtagttccagccggataaaaagccggcaaaaccacaccagtatttatgggcaaaatggctgaatgacccggtaaccggctcttccgccaccatttcgccaagctggcgcatgatcagaaacgcgataaacccggcgactgcataaccgagcaggacagaaggccccgccatctgaatcgttgtggctgttcccagaaacagccccgtacccacagcaccacccaatgcgataagctgtatgtgtctgttttttaatccgcgcttgagcgtctgctcctgctgtacttctgacattagatcctctgtaacggctatattattattctgcgtcgtgcatcactgcatcctgaaaagtttaagcccgttattaaaacatcattttgctgccttgaataccgttagcaacaagataatcagagggaaaaggcaaaactcagcccttgtctgacggaataaatttcgtaatttcacagattcccagcataaaatcctcacgctgatcacagtacttatcgagcgccgcaatataaaaaaatacaccggcaacaatcagcagcaggataattatgatttttttcatgtttcgcctattttcatctgaattatacccgtttaaaagatttcgttacattccggtatcgtcacatactttagcggaatgagtgtgctgtttcacaaaaaaattcatttcatcagcaggaagcgcataaacagttaacaccctgttttgtcataatgaaataaacttgtatacttggaaaaccctgaaactgagccgaaatcatcaatgccgcaagataatcatgtcgcacttgtgtgcgcacttagtaaatggatagaaaaccacacgggtcgtgttatccacctcgaagaactggctgcctattccgggtactcgctctggcatatgcagaaaatcttcaaagaagttgccgggatctcgctcggcaaatacatccgtcagcgccgtctggccggtgcggttaacgccctgcgccggagtgaacagactatctttgatatcgcccttgatttcggtttcgggtcgcaatctcatttcacctatatgttccgcaaagaatataacatcaccccttacgactaccgccagaacccggatatcactctggatatcaaagagccgtggcatttcagtcatgactgtaactaaggcaacttaaacaattaataacaaaactatatttagccatatgattttaactatcttattcagcattcagattgacgggacaaatccctgccgcagcacaacatatggtgtatccggctgtttttgatgaataacggcaatcttatcgcgcaacaggcggttttattgacatccccccgaaatggcggcataacattttaactgtctgttattttgttgccgctgttttcaggagcctgcatgtccgtaaaacttatcgccattgacctcgatggcaccctgcttaactctcaccatcagattacccccgctgtcagtgctgctgtcacccgcgcaaaagagaaaggtctgcatgttatcctgacgtccggccgcccgtttaacggtattctgccctacctccgtgaactggggctgaataaagcgaatcattactgcatcagtaacaacggtgcggtgatccatgatgccgaaaccggcgaaccggtgattgaaacgctgatggattttgaggattaccgctattttgaggcgctggcccgggatattaacgtgcatttccatgtgctgagtaacggtgaaatgttcaccacaaaccgtgatatcagccactacacgctgatggatgcttacctgacacaaacacagctgcactatcgtccgctggcggaaatggacagcgaaatgcagttcagcaaatttatgatgattgataacccgctgcgcctgaatgaagccgccgggtatatcccgcaggtctcctttgacagctataatattctgcggacggcaccgcattttgtggagatttctgcaaaaaacgccactaagggacaggccgttgcgctaatcaccgaaaaactggggctgacgccggacaaagtcatgtgtatcggcgatcagaacaatgatatttccatgctggagtacgccggggtgggtgtcgcaatgggcaatgccgccgaccacattaagcaaaaatccggatatgtgacaacctcaaatgatgaggatggtgtcgcggcagccatagaaaagtttgtgtgaccgggattatattttttcaaattcccctaattaatgaatttgttccgtttactcttctgagtcttttaatcaacctgcattttgttactattttaacggtttcatttaaaaaataactaaatcacagtatttaattttaacatgtacaggttgttttatgttttcaacaaaagacatgctcgttctcgggatgatggtttttgcgcttttcctgggtgcgggcaacataatttttccgccgatggcgggttatcactcgggaactgactggttcagtgcctccctcggatttatcgtcaccggcgtcgttctgccgttcctcaccctgattactgttgcggtcaaaggccgtggtgagcggctttctgtcgatctgccgcgctgggtttctgtgacattctgggtggcgctctatctgatcctcggctcaacattcgccatgccgcgtgtcaccaacaccgcgtatgagctgggttttctgccgctcggttttgttgagaaaagcaccgccagccatctgatttttgcctttgtgtttaacttcgtttctatgttttttatgcttaaacagggaacgatgatcagtgccatcggtaaatttatgaccccggccctgctgttcctgctggttgccgtggggatcgccgtggtacgcaccccgctctccccgattaatgaaccgatcaatcagtatgtggattttgcgttcttctccggtattgtcgatggttatcagaccatggatgtgctgtccgcaatggcgttcggcggtattgttgcccgtgcgctggcttcacgcgggataacctcaccgcaggacgtagtggttatcactatcaaagccgggctgattgcggtcgggttgctggctgcactctatatctgcctgttctacctgggggcgaccagtgatgcggtttcacagaccgccaccaacggcggacagattttctcccgctatgtcgatgccctttacggcgcgctcggtacctggctgatgtgcggtatcgtactgctcgccagtatgaccacctttgtcggcgtgaccagtgcctgtgcggatttcttcgcgacattcaacccgcgcctggactaccgtttctgggtggtggtatccactctgctgaccaccattgtctccaccttcggtctggatacgctgctgcgcgtcaccattccggtgctgctgctgatctacccgaccaccgttgcgctggtgttcctgcagtttgcccgccgtaaaatgcgtaatccgcgctttacttactgctttactgtcgcggtgctggtggtgatgagtgcgttcgacaccctgaataacatcggcctgctcagtgaaaatgtgctggcggtgttacaccggatgccgctgtttaaggaagggatcggctggttactgccgggcgtgattgcctttatcatctcgtttgttgccggcaatatgaaaccggcaaaaccacagccggatgcagccgcgtaaacacaaaagcccggtctgataaccgggcttttttattcctgccactgatacgttgtcagttgtatttcttcagcaatgctttcaccatagccagagtctccgcatccgcttccccgttgactttatgggagcggaaatgcatctggaacgctttaatcacattacgggttttcccgtcggccttaccgctcagcggaatctcatagccgtattttttcagtgcctgctgtaactcaccgacactgattttatccgacggatgccggttaccgagaaaacgtttcacatcagaagcatccggccaggcgccgaccccgcgttttgccagatattcccacgggaacatcgggcccggatccagtttgcgctgcggcgcgatatcactgtgccccaccacattctgcggggcaatgttatgccgcgctatcacatcctgtgccagttttacaatcaggtctatctgtgcggtctgatacggcacccagcgctgcccgacagacattttcacagtgcccggattgacaatttccacgccgatcgagcttttattcaggctgctttccccgcgccagtgacttttccccgcatgccaggcttcattgccctccggcaccagctgcaataccaccggtttaccgtcacgtaccgcagggattgtcggcaccagatactgaacactcaccccgccggcagtcagcacacgcagcgatgcctcatcattcagtgcggtataatggaaaaccagataattattcggtttggataaccacggctctttgatatttcgctgatcaacaatatactcaccgcgatcaatatactggctctgattactgcatcctgtcagtatcagcgcacacaccagacacacactacgccacatctttctttgtcctgtacaatgttatccggcacgatgccggtacagcccctttcccggaaatatcacgaccgcattattcacaacggacataatatcacggccgtgtattatgacgacttcactgcggcagtgctatgctctgaaagcgaatcatcatgatgtttttcagctttttattcacacggagaataaaatggatatttacacctacccgaagtcgcgctcaatccgcgccacctggatggcagaagagctgggtcttgattatcagtgtcactttaccgatgtgatgtctgctgaaaagcaggtccccgggaaaaaccagaaagtcccggcactgtctgataacggtctggtcatttttgaatcctccgctatctgcatttatctggcacaaacctacggcaatggccgcttttacccgcaggatccgaaaaaacaggccatcgtaaatcagtggcttgcctatattatttcggagctggaaggtccactctggatcatactgagacacgcagtggttctgccggaagccatgcggcagccgggggcaattgaaccggcaaaagcggattttctgcgggcaattaaggtgattgagcaggagatcagcggaaaaacatggctgtgcaatgatgatttttctgtggcagatatcttcttatttcatatctcacgctgggcaatgatgctgggctttgtattgtcagaggatttgatgcattacaccggcgagctggaaaagcgaccggcgctgcagcgtgcccgtcagcgggaacaacaggcggctgaaaacgcatgaaaaaaaatccccgccgcagcgggtattcaataagtcagttatgactgagtgactttttctgttctgtcatactgttctgacgctgctttcagcccggtaagatccgccgaacaaatcagcggtttcagggcatcaaacttcgcctgcggccagtcataaagagacagcgccagcaattcgcggatagtcttttcatcaaaccggctgcggataaaagcagccggattacctccgacgatagcatagggcggtacatcgcggacaaccacactgttcgcggcaatcaccgcgccctccccgatagtcacaccgggcataatcatggcccgcattcctatccaggcaccatcaccaatccgggtatcccctttaccgatataagcctcatcaatcatatccggaaacggatagaggctgaaccagtcatggcggtgtgtatgattgccgcccatcaggatcacggcttctgccccgatacagacataatccccgatatacagctcatccactttccagctgagctgccagtcgcggctgatttcatcgccctgtaaatagcggacaacagaggcttcaaagccattatcccagcaatcgctgtaataactgtgcgtacctttgatatgaatattcgggtttgtaacggtttcatgcagccgttcgcaaacggaccaatgcttttgtttcatggtaaatctcattatttaatggatagttaccacagaacgctattctgtggtgatgcactcgcgttcaaagcacatcacgccgggttatcctcgcccgtttcagccggggattgtccattattctctcccatacagaaaaacacccgcaaacgcgggtgtgagattgcagacaaagcaggataaaacgtggtttttcctgctttgtgttatcagccgaaaatcaatggattgattttcctcgtttatttttacaacctctgtcggtcgtcgccaaaccctgcgggtttgtcaacggcctgacacccgctttcccgggtgttatcatcagttaaccttttgttcgaccagcggttccggtacttcttcccagatgccgtcttcgacctgtttacggatttcaggataaaggttgatatcaaactgcggtaatttccccgttttgcgctgttggttataatctttcgccagcttaaatgcaacgccggataacaacagaatagcaatcaggttagtcaccgccatcagccccatcgagaaatcagccattttccagaccagcggcatttctgacagcgccccgaacatcaccattcccagcgccgccagacgcagcacaaacaaccctttggtgtgtttatgctcgaggaacaccatattgctctccgcataagcgtaattagcaataatggaggtaaaggcgaagaagaagatagccaccgccacaaaggtggatccccag

SEQ ID NO: 19 - DNA, 147990 bp, unknown
  Altogen 322075 strain
  misc_feature (17488)..(17511): n is a, c, g, or t
  misc_feature (44415)..(44447): n is a, c, g, or t
  misc_feature (57343)..(57418): n is a, c, g, or t
  misc_feature (145379)..(145379): n is a, c, g, or t
tttgcgtttgggcgaaaagaaaattccgtttgtattttattcaccggaaggtagattggataattgatcacttcaatccggcagaaaatacaaaggagcatcgttatggctgatccaacctatgtcccgcctctggtgtgggaatggaaacagaaaaacggcggaaaatttgccaataccaaccgtcctgttgccggggcgacacatgaaaaagccctgtctgttggtaaacacccattgcagctttactcgctgggaacacctaacggccagaaagtcactatcatgcttgaagaactgctggctgcggggatccgcgatgcggaatatgatgcctggctgattgatatcggcgaaggtgaccagttcggttccgggtttgtggatattaacccgaactcaaaaatcccggcgttggtcgacagaagtggtacggagccggtacggatctttgaatccggcgcaatcctgacctatctggcagaaaaattctctttgttcctgccggaaacacaacctgaacgggcagaaacactgtcatggctgttctggcagatgggatcagcaccgtttgtcggcggcggatttggtcatttctatgcgtatgccccggaaaaatatgaatatccgattaaccgctacgcgatggaaaccaaacgccagctggatgtcctgaaccgtcagctcagtcagcatgaatttattgccggcgataattacactattgctgatatggctgcatggccatggtacggcgggttagtgctgggtacgctgtataatgcggcgacattcctgtctgtcagtgaatatccgcatgtgatccgctgggcgaagcagatagcggcacgtccggcggttcagcgcggacgccgggtaaaccgcagcggcggagagccgtcagaccggtttgtccgtgaacgtcataatgcgtcagatctggactgatatttcacgcgttcccggcagagagttttctgccgggaaacgtatctgcattattaacgcggttctggtaatttaaaggccgataccatctgcgaaagctgttcggcttctcttcgcaggatttgcgtccgtgaagcggcatcatcaattaatgtggcattctgctgtaccgtggtatccatctctgaaactgccatcgttacctcagccagccctttgctctgctcctcaccggcgacacggatatcactcatcagctgtcttacctgcaacacatccatcaccagatctgccagcgtttctccggcttcatgtacctgattactgccggttttgacattctgcacagactcattaatcagtgccttaatctcctgtgctgcctgtgcactgcgctgagccagtgatctgacttcagtcgccaccactgcaaaaccccgcccggaatcaccagcacgcgcggcctcgacggcggcattcagtgccagaatattggtctggaatgcaatactgtcgatcactgacacgatttcaaccattcgtccggatgatgtactgacgctgttcattgtcgaaatcacatcacgcatcatatccccgcagcggctcgctgtttgtgcagtggtttccgccagttcatcagcctgatgggtattctcactgttctgacgcactgtcgcgttcagttcttccatcgcggaagcactctgctccagtgccgccgcctgctgtgtgacccgtgcggacaattcgttattattatcagcaagattaacggtatttccggccacaacagaactgctgctgcgtaccgtgagcaacatggatgatattttatcggcaaacagattaaatgcctgtgagatagcggatatttcatcggcaccgcgtacttccatccgccgtgtcaggtcgccttccccgtgtgcgatatcatcgagggccttacgggtctcatcgaggcgggtgatcagacggcggacaaccagccaggagcccagtaacagcagtgccataatcggtaacagggcttccagcacatcctgcatcatcacttttgccagcccggtgatccgctcttcaggcgtgacaaggccgataacccatccggtgtcagccatcgggaacagcatcacttgtgaagcggtgttcagctgcccgtcattatcaatgcggatactgtcgatagcggattgctcagagtgtggttgcttcaggcttgccgccaccggtgccagccaggctgattgtgcggccagctcatcaaaggttttgaattgcttattgtcatcacccggaaaatagatcagctgcccctgccggtctgtcacaaaagcatagccgccggtgctgttaccgtattgctgcataatagcggcgatattatccagacggatatccgttgtcgcgacaccggcaaattttccgtcggttttgtacggcacactgcaggtcaccatattcacaccggaaatggcatcacggtaaacatcagaccacaaacagctttccgtggattgctctcgggcattccggtaccagctttcattgtgataattaccggcaccctctgtattgtactcatcagaaaaaaccagttccccggccggattccgtgcccagaaaaagctgcgtttctcaattcccggggtgaatgcccccggctccggccagatcccgccaccggtgatcaggctgttgctttcaatcagattgggcgggatatagcggtacagcgcctcatcattgggcagcacctccgccaggcgcgccagactgaccgtttttccgtctgtctgagataaaatcgtgctgacccgggatgtcaggccgcgtccggtttcttcaattaatgcagtattaatttccacaacgcggggctgcccccgccacagcataacaacaatgataatggcagtagtgacagccaggagcaggatgcccccgatagtcaggcgggttgaaatgcgggacggataccaggacatacaaaactcccgaaacaaataagggtatatttgagttatcggcggtgtgacttatatctttatgatgttttattgaacaggtgaatgaatgacggatatctgtggcagggatcgcactttcgtcattttatgatgattttctgtccgctgcggtgtttcagaaaacagtattttcatccgcagcactatgttatgttataacatcttttgcctgggtgagataatctgtgaatttaatcagaagaatgaatacgttactgctctcttgcttagttttgctgatgttcagttcgcagacatttgcacacccgcacagttttatcgatatggaaacgaccctgataacggaaaaccagactctgacaggcattgagtatgtctggaaaatggatccgatgacttccgcagatattctgtatgatttgatgaacaccaaagaagacagcccgcagtggaagaagcaggcagcatctgtgatggccaatataattgcacagtcttatttttccgaactgaatcatcagaataaaaaacagcctcttaaactctttccggacacctaccggatgacacgtgagggattgcagattgtcatgtcattccgtgtttcactattgcacccgataccgttaaccggcagcactattgagctgaaaacctatgagccgactttttttgtcagtatgacctacaacggcaaacgcgcggttcacctttctccgccggatgcatcacagtgccggttaattttcaccgaggcagatccttcggataccctgaaagattacgcattgtcgctggataccggcgataccccggatgatgacctgacgctcggtcgccagtttgcacagcagatcaccttacattgcccggagtgagatagcggatgacatcatattcacggattattcttcagctcactgttgtgcttattattttatctgcgggtgggttgctgtacagccagtggccgtcattgctgcatgtcagtgcaaagttacaaaaagaactgaattttgaaatggcggtgctgattcagaaagtagtgtctgatccgctgaaagcgggcgggctgctgacccttttcagttttttatacggtttattgcacgcactgggtcccggccacggtaaagtcattctttctgcttacatcgccacacatccggcaaaattacgccacagcgcgttattaagtattctggcttctctgcttcagggcaccgtagcggttgttttagtctctgttgtgctgtttatattaaatctgtcagtacgccagttaaataatgtcagccagataacagagaaagccagttatgcgtttattattctttttggcgccattattgttatccgcgcattacgccgtttatttatcagaccaccggtcaataaaccacaaataaaaacaatccgcgtatcggataataaaccccctattgcgttaaaaccggtttttctgcaaagcggacaaattcagacatgcagttgtggtcatcagcatgttatgccgggaaatacagtccccggcaattggcggacacaagccggtatgattctggccatgggcagccgaccgtgttcgggggcattattagttttactgttctcatcagttatcggtgtttttcactggggaattattgccgtattcgcaatggcgctgggaaccggtatcacactttgtatgattgcctggttcgtacacagcatgcgctttctggcactgcgcctgtcccgtaatccggggcaaaaaccaaaccggcattatggcgatattctccggttgatcgcaggggggatatttattattgcggggctgctgatgtatcagggagccgggatatcagcagggggattttttgtctgaaaataaaaagacaccggactcagccggtgtcttatattcaccgttacttaaccagtttcagcaccagttccggtgccatttctcttctgacactgtccagtgacggcataatattacccgggtgccttgattcgcccatatatgcgggtttatagagaatttcaatcatttgttcatagatcaggttattgatctcattgctggtttcatccagtccgccccggcttttattccggacaaaatcatattccgtattattctttgaattgccgtaacggtacatcggtgcgtgaagtccgccggaaaaactggcccggtaattttttaattcctggttatagacaaagttataaatcagatcaacgcgggcatataaacttttggatgaatcgtcatataaggactgataggtatcaaggtttttccggcaggcttctgtgaatagtttgtgattttcagcatcagctgccataccgacatcaatcagaatagtgtaaatatcctgccggatataggtactgtcctctggtgttatttcccagtaaatatcctctttgcttttacctttctttttaagctgatatgctttggatacactgttaccaatctcagagcatgttattgttttaccatacattctgtatgcggcaatatttaaattatcactctttggtgtgctttctccgccgataaggccggataaatcatagcccgcacatcctgtcagtatcagagggaatacgcataacagtaatttcatttttgtgatcatatttatcatcccggaagctatttatcactataaagataatcattatctttgctaaaaaaatggttaatagacgcggtacgtgcaggctaaaactgtaattttacagtctgtttctgcaaggctgcgtactttggaacggcgtttatcattacgggttttattcagattgatatcgtttattttctcttcacactgtgtgagtgcatatgagcggagatcccgatcactgccgccataatatgttccggtaaaatcatagcggcgggaatacacaatagtgccgcaagagttattgaatgtcatatactcgcaggacgggcaatcttctttcagtgcctgttcagcttcccgggcagtggaataatcggtacccgcagatgtctggccggttttcgggtcaaaaccgacagccccgtaacagttaggtgcccagcaggcatagccggatgcggacataaaaataaagagaaaacagccaaataacactttcataaattatccctgtcagttttccgttaaaataaaaataccccatcggttaaaatggaataaaaatatatctgttctgtaaagctaccttcttattcgttttttttcttcctcaaattactatctgacaggctaaagatgtgaaaatattaaaaggtaatcgtttgatgttatttgatgacgggaaattagccattcgggtaagaatcaggtgtttattttttgcaatattacgttatttctgcggaatgaaaaaaatgtgatatccacattcccgtatccgggatggttctgattcgtgttttccggttgcttccgacatcagccgccgtccggaccggggagcaggtaacagcgctgatattgaatgcgtttactgagtcggataaatacagaatggtgtatacttgccggtaagaaatttattcatggttaattaaaatgaaagaaaacgaaaaagcacaaatcaagcttctcagcgaccgtttagaccttacccgtcatcagatggcaggtatgctgcagaagaacgaaacggaaaagtacgctgaacttgagaaagaaaaagccgcgctggaaactgaaattgcccgtctgaaggaacaacgcagcaaaaaactcagcaaagaagcgcagaagctggtggatatgccgttcaaacgttctatcactaagaaagaacaggctgatatcggcaagctgaagaaatcggtgcggggcctgattattgtccatccgatgacggcattaggccgagaaatgggactggatgatatgaccggtttttctaagactgatttctagtcagcagctacttctcaatgcttataacgtccggttccggtataaaccgggcgttaataatcaggcaaaatgcagtttattttgaatggtctgaaagaaacgtgtggtttctttatttgaaggttcgtagtctgctgccagagtgaagatatcttttacccgtaaatacacccgccactcatcatccatcacaaaccctttgatcagatactgttccagcgtttgtgttgcccactggcgaaactgtgtgccgcgaacggagcggacgcggtagccgacagcgagaatggcaggtaagctatagtggtctatctccctggaaacctgacgatttccctctaatcgaactatccggaatttccggagggttgcgttttgagcaagttctccctcagagaaaatattcacaagatgctcgttaatcgtacggacatcttttccatacaattcagcaattgatgcctgagataaccacagcgtatcagattcaaagcggcattcgacatgagtctgaccatcttcactgcagaacagaataaattcgccctgtggtgcctcaggaagattatcactcattgcatggcctccgttttacgggttgttatctcagcggaatgaacacagatgctaccaatatacccggaaaaataaatgttaaaatactcacaccggttagttatgtgctgatgatgttacaaggatgagttttagcgatgtacggaagaatataattggcggaagatcacaggagtcgaacctgcccgggaccgctggcggccccaaccggatttgaagtccggccgccccaccggggacgatgatcttccgttttgaggttgcacagtatacgctttccggcagggattcaaaagttctcttgcgttttttcctttgagatacatcagtatcgtgcgattttttacgagaatgatttttaatcagcataataacactaaaaatcattgaacttgcctgagtgtgtccccatcttatagagagtttcgattttcatttttcatgtgtatgtgcgctgcggcggacgtgcaccagcagccaacaggatggtttatgatgaaccctttgcttaccccgacccagaatcagttaccggcattttctgccatcaatccggaatgtattgtgcctgcggtgaaagaaacgctggataattatcgtcagacggtagagcaggtggtgagtcatgcacctgattttacatgggaaaatgtgtgtgttccgctggcggaagccggggataaattatcccgtgtctggtcgccggtcagtcatctgaactctgtcaaaaacagtcctgaactgcgcgaagcctatgagcagtgcctgccgctgctgtcagaattcagcacctggatgggtcagcacgaagggctgtataacgcctataaatcactgaaaaacagcccggcgtttgcgtcactgtctcaggcacagcgcaagtcagtggaaaattcactgcgtgattttgagttatccggcattggtctgccaccggagaaacaaaaacgctacggcgagatttctgcccgcctgtctgagctgggttcgctgttcggcaataatgtgctggatgcaaccatgggctggagcaagcttatcaccgatgaaagcatgctggccggtctgccggagagtgcggttgctgcagcacaggcgctggcagagtccaaaggtgagaagggctggttgtttaccctggatatgccgagttatctgccggtgatgacttacgccgataaccgtgagctgcgcaaagagatgagcgaagcctacggcacccgtgcttccgagctggggccgaacggcggtaagtgggataacagcagtgtgatggcggagattttagcgctgcgtcatgaactggcacagttactcggctttaaaaactacgcggaaaaatccctcgccaccaaaatggcggaaaacccgcagcaggtgctggatttcctgaatgatctggcagagcgtgcccatcatcagggtgagcaggaagtcgctcagctggctgcctttgccaaagaacattacggcgttgataaacttgagccgtgggatatggcctattttgccgataagcaaaaacagcatctgttctctgtcagtgatgagcagctgcgtccgtacttcccggaagaaaaagcgatcagcggattatttgaagtgatccgccggatctacgggatcaccgccaaagagcgtttcggggtggaaacctggcatccggatgtccgattctttgatttatttgataagaacggtgaattacgcggcagtttctatctggatctgtatgcccgtgagcacaagcgcggcggggcgtggatggatgactgcatcggccgtatgcgtcacaaagataattccctgcaaaaaccggttgcgtatctgacctgtaactttaacaaaccggtcggcggcaaaccggcgctgtttacccatgatgaagtgctgacgctgttccatgagttcggacacggcctgcatcatatgctgacacagattgatgtggcggatgtttccggcatcaatggtgtgccgtgggatgcggtcgagctgccgagtcagtttatggaaaactggtgctgggagccggaggcgctggcctttatctccggtcattatgaaaccggtgagccgctgccgcagtcactgctcgacaatatgctggctgcgaagaactatcagtctgcgatgtttattctgcgtcagctggagttcggactgtttgatttccgtctgcatgcggaatatgacccggcaaccggcgctcaggtgatgccgacactgctgtccgtgaaagaaaaagtctctgtagtgcctgctgcgccgtggaaccgcttcccgcatgcgttcagtcatatctttgccggtggttatgcagccggttactacagctacctgtgggctgatgtgctggcggcggatgcattctcccgcttcagcgaagagggtatcttcaacgcggtcaccgggcagtctttcctggataatattctcagccggggtggttcggaagagccgatggtcctgtttgagcgcttccgcggccgtaagccggaactggatgcgatgttaaaaggctacggaatcaacgggtaatacgtgaagattcgtttacagtgtgaacagggcgcagacagctgcgcccttgatgtattggcggcgcggtggggcctggagcatgatgataccgcgctgatggcgctggtgctgacggcggaagggctggaactgcgcaagtgtgatgaaccgaagctcggtgggatccgtgtggattttgccgggggaacgatggctcaccgtcgccgtttcggcggcggacgcggtgaagcggtggcaaaggctgccgggattaagaaatcctatcttccgtcagtggtggacgcgacagccggtctcggacgtgatgcctttgtgctggcatcactgggctgtcatgtgcggatgattgagcgtcatccggtcgttgcggcattgctggatgatggtttacagcgggcttaccgggacagtgaaatcggggaatggatgcaggagaggatgatccttatccatgcgtccgggattgatgcgctggcggacatcacaccgccgccggatgtggtttatctcgacccgatgtatccgcaccggcagaaaagtgcgctggtgaagaaagaaatgcgggtgtttcagtcgctggtgggcgcggatgaggatgcggatcttctgctggcgcctgcgctggcgctggcaacccgtcgtgtggtggtgaaacgtccggattacgcggagccgttagccgggcagaaagcggctgcggcgattgaaaccaaaaaccatcgttttgatatctatccctgcgtgaaagcagagggataacactgaataacatctgaaaaggggacagggcagttcccgtttcgcgaaggggcaacaagtgagacttccgtaacgcttgttatacccccttcgacgctgtgacgtttttcagtaacagcttacagacttacagcacaccctgcgccagcatggcatcagcgactttcacgaagccggcgatattcgcgccctgcacatagttggtctgtttttcctcactgccgtactcaacgcatgcattgtggatatccagcatgatgtgatgcagacgctcatccaccacttcacgcttccagccgagacggacagagttctgtgacatttccaggccggatgttgccacgccgcccgcattcgctgctttacccggtgcaaacaggacatttgcggccaggaaggcatcggttgccgggatagtggtcggcatgtttgcgccttccgccacggctttaacgccgtttttgatcagcacttcagcatctgccagatccagttcattctgagtggcgcacggcagagcgatatccaccggaacagcccacggagtctgatctttcagatacaccaggccgaactctttcgcatactcttccacacggccgtaacggtctttgatttcggtcagacgcgccagtttttcggcggtgaaaccgtcttcgtcaaccacggtaccggaggagtcagatgcggtgatcactttcgcacccagtgacaggcatttttcgatagtgtactgcgccacgttaccggagccggaaaccgcaacacgcataccgtcgaagctcatcccgtggcgttccagcatggcctgagtgaagtaaaccagcccgtaaccggtggcttccggacggatcagactgccgccgaaggagagacctttgccggtaaacacacaggcggtgttattggacagttttttcatcatccccgccatgtagccgacttcacggccgccgacgccgatatcacccgcagggacatctgtatctgcgcccagatgacggtacagctcggtcatcagtgcctggcagaaacgcatcacttcaccctggcttttgcctttcggatcaaagtcagagccgcctttaccgccgcccatcggcagtgtggtcagggcatttttcagtgtctgctcaaagccgaggaatttgaggatggagaggtttacggacggatggaagcgcataccgcctttgaacggaccgatagcggagctgaactgcacacgccatgcgcggttaacctgcacctgaccctgatcgtcaacccaggtcacgcggaactgaattacgcgctccggctcaacaaagcgggcgagcaggttctgatcgcggtactgcggattcttttcaaggaacggccatagtgtggagaaaacttcgcgcaccgcctggagaaattccggctgtgacgggtcacggcgctgaacattttccagaaacgtttccaaagagataaagttactcatgttgatttcctgtctgtcatgcccttctcattcatgcagcagttatgcaggccgcacttgtctcccggggcaggttctccggaatattttcgcgtacgtcatatctgtgacacgaatgatatcgggttacgttactttgtgaggtatcccgaacatttttgttttatttttcgaataatgtgagatgtgtttgcatttaccacttgaatttatctcttgtttatatcctgttttcaagctgtttttttcatatatgacaaaaaaaattcgttgacggcctttttggcggatccggctgccgcattttcagccaaaaaaaatgcctgcatagacaggcattttatatgaataatttttcagcagaggattatacgttatcatcatcccgcagcggaacaattaacatatcgacatgaacggtgttaatcagctgacgggcggaagacatcagtttgctccagaaatcctggtggtgtccgcagacaaccaggtccatatcatattttctgatggcatcgactaatccctggccgagatcaccgctgccgctgagcatttcctgaatctcataaccggagtttttcgccaggtttttcagtgaattactggtttcttcagtaatgcgctgctgcatatcacccaggttaacatcgataagtccggtgtataagtcagagtaattgacatcaacgtggatcagagaaactttggcgttgtaaggttttgccatagagactgctttgcttactaacacttcactttcaggcgaaagatcgactgcgaccagaatatgtttatatgccataagaaactccttccgttcaaaaggttaaggggttggcagggcttgcgccgctatcctttatgaatactataactgcttaatatcattaaagagtgtaatgctgatcacaactcaatgcttttatcaggcagcagagaatatctgatttataagatataccagtctgcgcacttctcacaaggttgagagtggcaaaacggatattttcagaagattatcgtgaaagaatgcgagagtttgtggaacttcacagcattgttcatactgaatacataaaatactgtcagtatgatgtgatagacactgatatcaccggttccttctccgcagatagtctaaggagtggattatgttcagtatacttacactgttctgggcgttatgttttctttgtctgattaacatgatccggttttattcatccacccgggcattactctccgtcctgcgtgacagcgacccgctgctctaccacgctgtcggcggcaataatgcgtttactgaccacacccagtggcagaagcagctgcgccttatccgctatatcaatcagcgggaatatctcactcatcatgaccctgaagtgattttgcgctgcgaacgtatccgccgtcagttcaccatgatcagtgcgatatgcgggattgtgattgcctctctgctgatgatgattatctggccgtaaccggttaccggatgcaaaaaaaagcctgacacacgtgtcaggcttttctgtttcagaggatagcaacccgctgtcagataatctgcagggagatccagtagagcacaccggacaggataatggacaccggcagtgtcagaatccaggccagcatgatgtttttgatggttttggtctgaacaccaccaccgtcaacaatcatcgtacctgccaccgcagaggagagcacctgggtggtggataccggcatcccggtataacttgccacaccaatggagacagctgcggtaacctgcgcagacacgccctgggcgtatgtcatgcctttcttaccgattttctcaccgatagtcactgcaacacgtttccagccgaacatggtgcccagagagagcgccagcgcgacagaaatgatgatccagataggcgcatactcaacggtattcagcaggtcattggacagacgtttcaggaaacgcgcatcttccggtttggtttccggtaatttcgccacttctgcggcggtatccgaaatacacatcagcagacggcgcatctggctgcgctgttccggtaataaatcatcataggtatgaatattaccgagcagatcctgagcctgtcttaatacgatgccggtacgggagctgtcacagtggaactgttcattgagaacggtattctccgtgttcagtgccggggtcagctcaatggcgtgtgccagtgcatccttatgcgtggtgtaatactgctccaggttgaccacggcatcgcgcgtacgggcgatttcgtaatcactggaattcatattcaccataaagccggcaggggcgacaccaatcagaaccagcataatcagaccgatacctttctgcccgtcgtttgcgccgtgtgagaaactgacgccgactgcggaaaggataagggcggtacgcgtccagaatggcggtttgcgtttgccgtcttttttctcacgttctgccggtgttaagtggatgcggcggcgtttcttcgtgccgctccagtagcggcgcaggaaccagatcattaatccggcgatcaccaggccgaccagcggtgacagaatcagagaaaggaaaatgctgatcattttcggaatattcagcgcatcaaccacggaactgttggtcacaattgcgttggtcaggccgatcccgataatggcgccgatcagggtatgagaacttgaggccgggataccgaagtaccaggtgcccaggttccagatgatagcggcgagaagcagggaaaagaccatggcaagaccatgggccgaactgacattcagcagtaagtccgtgggcagaagatgcacgatcgcatacgccacgctcagaccgccgagcagtaccccgaggaagttaaatacaccggccatgacgacagcaagctgcgcgcgcattgcacgggtatagataacagttgctaccgcgtttgcggtatcatggaagccgttgatggcttcgtaaaacagcacaaagatcagtgccagtactaacaagaggccggtgtgaaattccaggcctgtaaatagatgtagcatagacgttaagccagttgttggacatgaacgcggcgcattatcagcgacaaatgcgtcccggggaagtgaaatatggcctttttttgatttgataccttcatcaaatcagcttaaggaattattaacccttgtatatcatcggattaggctccttttctgaaaagaataaatttttggcctgatttaatcatcatgacaaatttaagacatttatcggaatttctccacatttaaagacacagagaacactattttggaaaagtttgacgcgattgtaataggcgcgggtgccgccggactgttctgtgccgcgcaggcagggcagcgcgggctgcgggggctggtgctggataacggcaaaaaagccggacggaaaattctgatgtccgggggcgggcgctgcaattttaccaacctttataccgaaccggcggcgtatctgagcaaaaatccgcatttttgtaagtcagcgctcgcccgttacacgcagtgggattttattgccctggtgcagaaatatcagattgcttatcacgagaaaacgctcggccagcttttctgtgatgattccgcacaacagatagttgatctcctgctggcggagtgtgagtcggggaatgtggttatccgcctgcgcagtgaggtgacggaggtacagaaacagggcgatgatttctgtgtgaccgttaacggaaagattgtgagcgctcactcacttgtggtggccagcggcggattatcgatgccgggactgggggcgactccgctgggttaccgcctcgcggaacagtttggtctgccggtattaccgacccgcgctgcgctggtgcctttcacactgcataaaccactgctggaagccttacagacgctgtccggcgtggcagtgcctgcgacagttaccgcacaggatggtacccggtttgcggaaaatatcttatttacccatcgtggcctgtccggccctgcggtcctgcaaatctccagttactggcatcccggtgagtatgtgagcattaacttacttccgggtaccgatctggcggagtttttcaccgtgcagcgggaaaaacacccgaatctgagcctgcgtaatgtactggcgaagctgttaccaaaacggctggtggagtgtttacaggcaaccggtgatttacctgatacggcgctgaaccagttatccaaagccgcacagcaggaaatcacagataaattacaaaactggcaggtgcagccgaacggcacagaaggctaccggaccgctgaagtcacactcggcggcgtggacacgcaggcgctctcctccaaaaccatggaagcccgcgatgtgcccggcctttattttatcggcgaagtgaccgatgtgaccggctggctcggcggctataacttccagtgggcatggagttcagcgtgggcatgtgcgcaggcactgccgttttccccggatgtttaatccctgataaccctatggaattatttaattttattaaaataaatcacggtatcagtgagttaacagaaaacatcagtgattatacgaaatcctgagcaaaaagtgctttacaaatgatactgagaactattatcatcaaatcactttcagatgaccaccttcagggttcagatgaaagaacgacattgctcacattgcttccagtgtttatttagccagccacgtgctggctttttttttcccctttttccccggagccattcgcgctgcaggtgcgttggcttttctcgctcaccccggtcacatactgatgtatgctcccggggattcactgcgtcgccgccttcctgcaacgcgaatggcgtcggggaaccgctgccctgccacaaaccggatggtttagcgaatctgcgtcatcctccggtccgtggctgtgttggctgcactcagtattccgggtcacatacttgtgtatgctccccggaatccttcccttgccgccttgccacaaaccggatgatttaacagatgaattgtttggttttgataatgtaaaagttcattcgggaataaccggcaaaaaaaaggaaagcgtacagcgccatggatggagcgaaccgaatctgcgtcatcctccggtccgtggctgtgttggctgcactcagtattccgggtcacatactggtgtatgctccccggaatccttctcttatcgccttgccacaaaccagatgattcagcagatttcgcggannnnnnnnnnnnnnnnnnnnnnnnctgaaagaagatggtttgatgctgcacttattcaaattttttgaattcttgcgttaaacccggctactggtgaaattaacggcaggacgtaaacttaacctcatcagattgaggagaaaaattatgatctatgtacgccctgcaaatgaacgcggccatgccaaccacggctggctcgacagctggcacaccttttcgttcgccgattattatgaccgtaactttatgggcttttccgccctgcgggtcattaacgaagactttatcgcggaaggccaggggttcggtacccatccgcataaagacatggaaattctgacctatgtgctgggtggtgcggtagagcatcaggacagcatggggaataaagagcaggtgcctgccggtgagttccagattatgagcgccggaaccgggatccgtcactcggaatataatccgagtaatgataatccgctgcatctgtatcagatctggattatccctgaaaaaaccggtctgaccccgcgctatgaacagcgccggttcgatgcggcaaacggacgccagctggtgctttccccggatgcccgtgacggctcgctgaaagtttttcaggacatgacactgtggcgctggacactggccgccggtgaagaaggggaatatcagcctcagagcggacggatggtctggatccaggtagtgaaaggtgaactgaccgtgaatggccagacagtgaaaaccagtgatggcgtagccgtatgggatgaagcattaatcagcctgaacgccgcacaagacagtgaaatcctgctgtttgacctgccgcctgctcaataaaacagaaagccccggatcatctgacccggggctactgtgttgctcacactacttttcttgttatccggttacagcgaaggccctgcactaatcagagcctgacccgccggcgtgtcggtatatttatcaaaattatttataaaccgccctgcaaggtcttccgctttttcctgccattgcgccacattatcatatgtgttgcgcgggtcgagtatatgactgtcgacacccggcagttcgtgaggaatggccagattaaagaccggcagcgtatgtttcgccgctttatcaatatccccactaagaatggcgtctatgatagcacgagtattcttaattgaaatgcgttttccggttccgttccacccggtgttcactaaatacgcttttgccccggccgctttcatccgttttaccagtacatctgcgtactgtgtcgggtgcagtgtcaggaatgccgcgccgaagcaggcagagaaggttggtgtcggctctgtgacgccgcgctcggtaccggccagttttgcggtaaatccggataagaaatgatactgcatttgttccggtgtcagttccgccaccggcggcagcacgccgaaggcatcggcagtcaggaaaatcacattgttggcgtgacctgctttggaaaccggtttaacaatattttcaatatgatagatagggtaagaaacccgggtattttcggttttgctgccgtcatcaaaatccacactgccgtccgggcggacaaccacgttttccagcagcgcatcgcggctgatggcgtgatagatatccggctctgcttccgcagataaattaatggttttggcgtagcagccaccctcaaagttaaagacgccgtcatcatcccagccgtgttcatcatcaccaatcagcttacgtttcggatccgtggacagcgtggttttaccggtgccggacagaccgaagaaaatcgccacatcccctttttcacccacgtttgccgagcagtgcatggaggcaatgccctgtaacggcagcagatagttcatgatggagaacatgcctttcttcatctcaccgccgtaccaggtaccgccgatgagctggatgcgctcgctcagattgaatgccacaaagttttccgaattcagtccctgtgcctgccagtccggattcacgcatttcgcgccgttcatcacaatgaagtccggttcaaaatcatgcagttcgttttcatccgggcggataaacatgtttttgacgaagtgtgcctgccaggcaacctcggtaataaagcggactttcaggcgggtatcggcattggcgccgcagaaggcgtccaccacaaacaggcgtttgccggataactgattggtgatcaggtgtttcagggaattccaggtgtcctgtgacagcggtttgttgtcgtttttgccttttccctgatctgcccaccagacggtgtcacgggtgaggtcatctctgaccagatatttgtctttcggtgagcggccggtgaaaatgccggtgtccaccgcgaccgcgccgctggtggtgacgacactgtgttcataaccggtcaggccgggacgggtttcttcatcaaagagtaagtcataacttgggttatagattatttctgcggcatcgcggataccatactgctccagttcattcacagccattgtttttacgctcatccaaagcctccgggttgtcggaatatcttcatatatcataattatttacgactggttaacagcgattgctatcaaataaatgaaaatccggattttatttgggtttattttgtgagctggctcgataccataagaaaaaataaacaaaaaggccgcatccggggagcccggtgcggcctggtgttgcgtcagctaaaacgaatcagtgcagagaagcgtttttctgagtgcggatttcatgaatatcctgttcatcaaagatatgatgagcaccgcaatattcacactccatatcaattttgccatcttcctgcaaaatatgattaacatcttcttccggcagtgttaccagcgtatctgcgcagcgttcgcgggaacaaccgcaatgaaacgctaccggtgccggttcatacagcacaacgtcttcttcatgatagagacggtacaggatggtttcggcatccagggtaaagagctcatcagacgaaatagtggcagtcagctgcatcaggtggctgaacatgttctgtgtttcttcctgagtacgggcttctgccgatgccggcagtgcctgtaacagcatcccggcagcctgcattttgccgtcgtgctccgcaacgcggacaaacaggctggtcggcagctgttcggactggcggaaatagtcatccagacacgcttcaagcgtttccccttccagcgccacaataccctgataacgctcgccctgacgcggcgtaatcgtgatgaccataaagcctttgccgatcatatcgtggaaaccggcaccggcaggcacatcgccgttcatacgggcgatgccgcgcatctgctggcggtcgttgccgttgatcacagcgagacggaccgggccgtcgccctggatctgaacggtgatatccccttcaaatttcagggttgcggtcagcaggctggtgcagaccagcagttcaccgagcagacggcggacaggctccgggtaatgatgattatccaggatttgctgtaatgtgccggaagcattgaccagttctccccggacatcgcttttgttaaacaggaaccggtgtaatgtatcttgtcgtgcagacataattttctctcgtcttaaccgccggttattccgcggtatctgaattactgtgtttaaattttaacaatgtccgtcgttcctttttatcaggacgtcgttccgggtgcggcatcgtcagggcattcattttacgtgcaagtgcggttttttcacgtttttcgatgctctccggggtttcttcccagagtgtctgtgccagcggcgcactcaggcgcttgtccgtgatccccagcacgcggattgtccgttcatcatttccctgacgcaggacgataaccgcgccgttttcgaccagttttccgggcttggtccgctgcccgttataatgaaccttgccgccgtcaatcatggttctggcgatggagcgggttttataaaaccgtgccgcccagagccatttatcaaggcggacaggctctgtgacctgtgaagcctgttgcatggttactccgtgacagacagtgcagccgttacggctgcacctcagaggaagggtagtcgtgccggaagcagttgtcataataacggcggatatccgtcatccggcggcggcgctgacgccagcggataaacgtatagatgccgttgataatggccagaagggaaaagacgaccagtaaaaggcagctgccgataaaccgcgccagcatgacactatccggctgaaagtgcagcaggatatgacgggtgccgttggcatccacagacacatccgtgacaatgccctgaacctcaaacggggtgtgcagcagcatattggagagcttctgcagggactgccagtgtgccagcggtgtcatttcctctgtctgttcattgaccggggcgttctccaccagggatttgccttcgtcactgatcagcagcacaccaccgggtggcggactgttcagccgcattgccgcattttccacttctttgtttatagctgtagatgtggtggcgataaccagcttttccaaggcctctgcacttgccggacgcaataaaacattcgattgctccagtttaccggctttggcgcgggctaataaattttcccagttcggggaattccccagattgacgagggcgtttttcagccgcacacagtcactgttttcaaattcacataatgcctgggttttcagaaccagtgaggaaaaatcatccagcaggctcatcccggagcgggtgataacattgcgcagactgtcgttcaccttacgggctccggcatcgggatgcagctggttattcagttcggcaagcagtgcggcagcgcgatcaacctgttcggactcgggaaccggaagcggggaggtgttgttccagtaaataccggagcagtcaaacgcgcggaaattgggtttatcctgagcggagaggttcggcggcatgtaacacattcccacgcctttggcctccagaaaatcccccacatagagcggcatattctggagttcactgaaattggtggtgactttggtttctgtgccggtcagccagttcagagccagtttaaccggcaaattgaccggctgattgcaggccagaaccagaagggcaaaggcgctggtcagagcgatcagcagattttttccgtaacggcgatacgggaagcgggtggattcctcgcgcagagagaggtatttcccctggcggacaacctgctgatcctcatacatttcaatctgtgtgacagacccgagatcctgatgcagccagggttcccagtggcgcgggtagataaggtcgataccgccgagtgaaatgctgtgcttctggctgtggtcaaaatcgccgaacagaccccagcgtttcgggatccccctgtagcactgaatatcgcgcagacggcggcggttgctgatcgggatcagggataaaatgatgcccggcagcagcagcccggctccggcggccatcatccagtaaaataaaaacggcggcataaagaccgcagtgagcgccgtcagcacgccgcagacaatcagcgtgccgctgataaacccgtgactgtgctgcaggttatattcctgccggctctctctgcgtgtgccgagaaactcaatatcagcattgctgttagtcagtatcgcggcctgtaccggtacgtcattattttttgtcattggccttgccagcgcgtggtcatcagtaaactcacgtaagtcatggccgttcagcccgacaatcatcggtatcccggcggtaaacatcacatcaatgacatttgtggcctggataaattcatccagaaccgcaggcagataaacctcattgccttcaatgtaataatgccactgctgtccgtttttccccgggatagcatagcgggtgatgcggttgcacagacgatagacgtgatcactttttttggggaaagccggtaatgtaaaatgcagatcattactgaccgcctgccgggcagcgcaggtcaggtggtgctcaatggcctgaatttcaccggcacccggccggtggtgtgtcagactggccagtgaaggtaatacataacccgcccggcgctgtttccgccggtgactggtaacagaaaccattataagacaaccgatcaccagagcggccgctataatgagggtgatagtcattttttccccgtcgtaattgcctgtgcagcataacagtgaaggaagccgttaaaaaatcggccttttctgattatgcaaaaaaaattatttgaaataacagtctgttataactgattattttcacttttacctgctgattatgctgtgtgttaccgttatttattcatcccgcccggtgcttttctttgtctcaggaacgggtaatatgaagcagagcaataagtgagtgaaccagggaatttaccccggtttttacttattcgcaaagcggtactttttcaccctgcacagttttactctgtatggttgtactgcgtttttatattacgtacagaggcatacatggctgaattacaaaaaccgaaaattatccgcatcgagactgttgcccaatcccgtctgtttactgtccagtctgttgcactgaaattcagtaatggtgcagaacgggtttatgagcgtatgcgtcctgcaacccgtgaatctgtcctgattgtccctgtggtaaataacgagcttatcctgatccgggaatatgcggcgggtgtggacagctatgagctgggattcccgaaaggtgctgttgatcccggtgaggatatgctgactgccgccaaccgtgagctgaaagaagaaatcgggtttggtgcccgcacactgacaccgttgcgccgcgttactatgtccccgtcctatttttccggacagatgaatatcctgctggcggaagggctgtatcctgaaaagctggagggcgatgagccggaaccgctggttcaggagcgctggccggtcagtaagatgatggatctgctgacgcatccggattttaacgaggcccgcaatattaccgcgctgttcctggcacagcaatttttacagcgtaccggtcactaagctatttttaacacaaatctgtttgtgttaatcatcgaaaaaagacattcatttgtgttaagtaataacgattgaaaaaaagggctgcctgaaggcagcccttttgtcgttctcagtcagatcagaacagttcttccgaaccgccgtcctgctggataatcgttgtacccacttccgacacgccgtaatcagtcggctcggtgcctttgataaagtattcggaacgggagttgccgccggagcccagcttaccggtgctgcggttgatctgaacggagataattcccggtggcggcggatctttgcgttccggcacaccttccagcgcaactttcataaagtcgttccagataggctgggcgcttttcgcaccggcctcaccacggccgaggtcacgggcgttttcatcaaaaccaatccagaccgcagcaacgatgtccgggccgtagccgacaaaccaggcatcttttgagctgttggtggtcccggttttaccgccgaggtcacggcgtttgatatcccgcattgcccgccagccggttccgctccagcccggttcgccatagatattggagttcatggcgtctttgatcaggaaggccacctgggtgctgaccacatgcggcgcatacggggaatcactccctgcctgcggcgctttttccaggtcggcttccggggctgccggctggtcattttcctgcggctggctgtctgatttcgctacgtcgttttccagcgcatccttgttcaggctgctttccaggtcatgtgaaccttcgccgtaaatcaccgggatattggtgcactgcggacaggcaattttcggctctgcggtaaacagggctttgccttcggtgttatcaatccggctgataaaatacgggtcgaccagatagccgccgttggtcatcacggcgtagccgcgcaccatctgcatcggggtgaatgaggaagagccgagcgccatggattctgtccggacaatgttgctgtccgggaagccgaagcgcagcagataatcggcggcataattcacgcccattgcccgcatggcccgcaccatcaccacgtttttcgattgtcccagtccctgacgcagacggatcgggccgtcataacgcggcggtgagtttttcggccgccagtcaggaccagcgccgtccgcacggacaatcggcaggtcattgagcagggaggcgagtgtcagacctttatccagcgcggcggtatacagcaacggtttgatgctggagccgacctggcgcagagactgggtgacacggttgaatttgctcagcccgaaatcaaagccgccgaccagtgcgatcaccgcaccatccgtcggattgagtgccaccagggcagagttgacatccgggatctgcgccagcatccagcggtctttattctgacgcacccagatctgctcaccggcatgcaccacgccgttcaccgcacgcggtgccggacccatggcgcgatcagagataaatttgcgcgcccagcgcatgctgtccatggtcaggtcgatggtggatccgtctttgagcatcacctgtgcacggttagcatccgcactcagcacaacacccgggttgagcgggccgtagacctgtaacgttttcagtttgctcaggatctgttctgtatcccatgccgcgctgttctgcggccacaatacctgctgagctccccggtaaccgtggcgcatatcatagtcgatgataccggtatgaaccgcatcttcagcactgagctgatctttgcgtttaacggtggtgtagaccttataaccatcggtataggcattctcaccgtacttttcaatcattgccatacgaaccatttccgccagatacggcgcggaaaaatcaatttccggggcgtgataacgggcttcgatcggctcattacgcgcttcatcatactgggcgcgggtaatgtaattctcttccagcatccgcgtcagcaccacattacggcgggccagggcgcgggatttggaataaagcgggttaaaggtggacggtgccttcggcagcccggcgatcaccgcaatctcactgagtgtcagctgatcaaggcttttgccgaaatagacataggccgcagcccccacgccgtaagcgcgctggccgaggtaaattttgttcagatacagctcgaggatttcatctttggtcagcatctgttcgatgcggatggccaggaacgcttcctttactttacggataacggttttttccgggctcaggaagaagttacgggcaagctgctgtgtgatagtactggcgccctgtgaggcacgaccggaggtcatggcaacagacgcggcacggaaaatcccgatcgggtcgattccgtggtggtcatagaaacggctgtcctccgtcgcgataaaggcattccttaccatcggcgggatctggctgagtgtcagcggaatacggcgtttttcaccgaactgggcaatcagttcgccgtccgcgctgtagacctgcattggtgtctgtaatttgacatctttcagtgtggccacatcgggcaggtcagcctcgacatatttgtacatgccatatatcgatgctgctccaagaaaaatgcaacagacaacaaagatcaataaatactttaagaacttcacctgaaaatttccgttagccgtgtggtggacagtttataaacagcgaccctgtagtataaaggttcatgcgtttcttgaatacgtattttataaccaccggaaaattaagagaaaaaaggtatttctcatatcaataatacagggatgatttatgcggattgcttcacggatggcgggaatttcacttcaggacggggagatcaggatagcactggcgcggcgcatacgccggaggtggtgttttgaggattttatcacgctgacactggcggaaacggaatcagccgaaaacggtgtgcccggcctgtctgcggttgcggctgcactggcacaatggcggcggcgtatccgcgggcggccggattgccgggcggcactgccggtgtcactctgtcttcagcagcagatccgcctgccggagagccgtgtggcgcagtctgcggtggtgccgctgatagatacctggctggcgcgcacatttccggggcgtcatcaggatcttatctatgattaccggcggttttccggcgatattattctgacggcgctgcaccgtactgtccgtgagcaatggctgtcgctggcggcggaactccgcgcggatctgacggtgctcagcattattccctgtgcgctgcgttgttttgcccgtacccggggtgtggccgcacaggactggctggtcttccgccaggggaacagtatttgctggacagccggtgaaatgcagccggtactgagcggacgggctgacctgaccctgccgtcattactgacagaactgaaaacacagggttttgatgagtcacaggcggcactgtgctgcctgcacgatactgcactgctgccgcaggcatggcagcgggaatgccggcgttaccgcaatgcggaagcggatgatgtcccgccgggctacgcggcggcggcagggatggtgctctgcggggaggagcggctatgacacaccgggtgaatctgactgcctggcgctcccggctgaaacggcaaatctgccgccggatggctttccggtttctgatggcaggaagtgtgctgttatccgcactgctgccggtttatctgtttcattcactgaatgtgcagtatctggcgctgttacaggccgcatttgatgagcgggaaacccgccttgaaccgcagcgggctgagtttgcccgtcagcgtgcgctacagcggcaggcggaagcggaaaacctgcggcagcagcagactgcacgggaaaaccgccgttaccgggatttgctggtttttttgcaggctcagctgccggaagatgcctggctggcgcgttatcaggcagagcagcaaaagcatgatacagaaagcagtgtgcgccatgccctgtcggtgaaccgccgtcaggtgatcgccccgtctcatcctttattacaccgggcgccgccggggctgatgccgctcaggctgatcagcctgcaacatcacaaaacagccgggatccggcagtttatattggtgaccgggaggagccggtcatgaatctgaatacagtatggcgttgtgcgcagtaccggcgcgtgcagtggggagtgatgaccgggatctggttatcggccggtgtggtgttctggtacttttatctgcaaccggcagccggggaaacggaaatgcggcgccggcagttgcagcaactgacagcactgtcagaacaggcggtgccggaaacggtgattctgccgcccccggatatcccgccgctgtttaccttactgcccgaaaatgcgctgccgctgctgaccggctggcagcaggagccgccggaacagccggaacgctgggtgttgacctttgaggcacattaccctgagctggcggcgctgctcgataccctcagcggggaactgactcagttgccgatcacccggctctcgctgcacccgctgacacccggaatctcctcatctccgccgctgttgcagatgacgctgcatctggcattaccgggtgctgactcaccggatccggaaaaggaatggcatgatgatgaataaagcaaaatcagccgcccggcggatcaccggttgttgcctgctgcttgcgtcagcggcttccggcgggcagcatccgcgggatctctttcagccggttatcatcagtgaggaaccggccgcgctgacagaaccccccgggatgtattccccgccgctgataccggaaagcaggcagagccgcacatttaccctgcaatatgcggatgcggcggacatgctggccctgctgaaacagcatcacggggaatggtttacagataataaagcgccggaagccgacccgctgacaaattccctctttatagaagcacaaccggatgtgctgtcgcgggcggaagcctggctggcacagatggatcagccgcagcagcaggtgcagattacggcgcatattgtgtccggctcgcgggaagggctgcatgagctggggctgcagtggggaaccgtgctgccgtcaccggagtccggcaaccgcctgcagctgcatcaggcgcggggaaataacacgttcacctttaatatcgcccgtctcggcggccatctgctggagatggaactgagcgcactggagcaggaacagcagctggatattgtcgccagcccgcgcctgaccacggcgcacgagcatcccgccagtatcaaacagggagcggaaattccgtacaccacgcaaaaccatgagtccggttcacaggtacagttccgtgaggcagtgctgggaatggaggtgacaccgcagatcctgcgggataataaagtacgtctgacactgcatatcagccgtaatgcccccggtgcggcgctgatgcagaacggcagcgagcagtattccattgataagcaggaaatcaccacacaggtgattgtccgcagcggggaaaccctgatcctcggggggatttttcagcaggataaaggcaggcaggtgaccggagtgccgtatttatcgtcgatcccattgatgggaaagctttttactcatcaatacgataaactcagccgccgtgaattagtgatattcattacaccgcagttgatcgatatttagtaactgtatcaatatcagcatgttgtatcattactcacggataatatgcgcagaataacggatttttttaccggctctgcggtgttatacatttgacgattgcaacgatttagcatacaagagttagcaaatttagcaggtatgaaatcactgccgccgtaaaatatgccgttaatccgttgacggacaacgtcctgattctcagatcgcgccttatgtttctgttcagctcctgttttcaggaggattcacggaaatataaggcgcggtttttcgcaggcgttatgatagtatgtgcggatgttcagaggccggattgcgacaggcgtcacacagcagcacctgaggtatctttccggtttcgtgccggtatggttgcaatcgggcagaatgtgctgagataatttcaggttactcacgcagattcactcatgaggtttcatttgaggtcccgccgctgatcgggtgagcggggcgggttatcattaacgaatattcttagttataccaaaaacatggcagagaaacgcaatatctttcttgtcggcccgatgggtgccggcaaaagtactattggtcgtcagctggctcagcaattaaatatggaattctttgattccgaccaggaaattgaacgccgcaccggagccgatgtgggctgggtgtttgatgtcgaaggtgaagaaggttttcgcctgcgtgaagaaaaaatcatcaatgaactgactgaaaagcagggtatcgtcctggctaccggcgggggttccgtcaagtcacgggagacccgcaaccgcctgtctgcgcggggtgtggttgtgtaccttgagaccaatattgaaaaacaactggcccggacacagcgcgataaaaagcgtccgttgttacaggtcgatgagccggtccgggaagtcctggtcaaactggcagatgaacgcaatccgatgtatgaagagatcgcggatatcactatccacaccgatgatcagagtgcaaaagtggttgcaaatcaaatcattgaactgttagaaaccaacagttaatttcattttaccggcaacatgcggaggtgccatggaaaaagtgactgtgattctgggtgagcgtgcttatcctatttcaattgctccgggtctcttttccctctccggcacctttgcgccgctgaccaccggtcagcgtgcaatgatagttaccaacgaaacccttgccccgctgtatcttcagacactgaccgataatcttgcgcacgccggtgtgcaggcggattctgtgattctgccggacggcgagcagtataaatccctgaccacccttgaccgtatttttaccgcgctgctggaaaacaatcacgggcgtgataccacgctgattgcgctgggcggcggtgttatcggtgatctgaccggatttgcggcagcgagctatcagcgcggcgtccggtttatccaggtgccgaccacgctgctgtctcaggtggattcgtctgtcggcggtaaaaccggcgtgaaccatccgctgggcaaaaatatgatcggtgccttctggcagccggtcagtgtggtgattgatctcgactgcctgaaaaccctgccgcgccgtgaactggcgtcagggctggcggaagtcatcaaatacggcattattctggatcacgatttctttatctggctggaaaacaatattgatcgtctgctggcacttgagccgcaggcgatggcgtactgcatccgccgctgctgtgaactgaaagcagaggtggtggctgcggatgaaaaagagaccagcgggctgcgcgcactgctgaatctcggccatacattcggccacgccattgaggcggaaatgggctacggtgtctggctgcacggcgaggcagtcgccgcagggatggtgatggctgcacgcacggctgaactgctcgggaccttccgcccggaagaaactgagcgggtcattgcgctgcttacccgtgccgggctgccggtgcgcggacctgaatccatgccggcggacgcgtatctgccgcacatgatgcgggataaaaaagtgcagggcggtaaactgcatctgattatcccggaaacgatcggccggtcagttgtccgtgcggatatcccgcatgacagggtgctggctgccattcagtccgtgtaacggaagcggcggcagaagttttttgatatctgtctcgctgagtgccgggaaaatggttacactacgcattatgacgcactcaccgggcgtcagttctcttctgttatatccaaagacacagtttctgctctgatgggagggcaaaatggacggctttaaacccgaaaagcaagaaccacagattttcagccagccggatgatgaatctatccgtccggacgcatctgacagaccggagcgccctgaacgccgtaatccgcgtccgcgcccgcagcagtcacggcctaagtttgccgtctcccgccagcagatgatgatcggcgtggcggttgtggtcctggtattactgattatcgcgataagctccgcgctgaaatcgccgtcagaaccggaagcccagccgcaggcacagaacggcgagcgcccgattaccctcggcaccggcagcaatgacggtgcaacgcagttacagccaaccgaaccggttccgtcacagaccgggcagaccggcgtgaatctccctgctatcaataatctgccgacacaggcacagcagccgtcacagacaaccggtaccggtcagcgcgtggatatccccggggatattaacgatgccctgaatcagggaaatacgcaggcgggtattaataacgccgcgcagcagaatatgaataatctgccgccggtggtcactccgaaggaagagccgaagaaaccggtacagcaggtgaaaccgcagccggtgaaaaccaccacggcgacaccggccaaaccgcgtgaaaccaccaaaccggccactgcggcaccggctccgtcaaaaagcggcaccgcgatcgccaaagcccctgccgggaactataccctgcagctgagcagtgcgagccgtgcggatacactgaaagcctttgcgcagaagcacgggttatccaactatcaggtttatgagacaacacgtaacggaaaatcgtggtacgtcctggtgtacggtaatttcccgacagtcggggatgcaaaacgggaagttgagcgtctgcctgccgaaattcaggggaaaaaaccgtgggtcagaaagatgcagcaagtgcatcaggacatgaaataataaacacggattccgtcaggtgctgatttgctgtctgaaacagagcagaatcggcggctctggcctttttgagcaatgattacagacagcatgaagaaacaacgcgcatttttgaagtgggccggcggaaaatacactctggcagatgaaataaaacggcatctgccggagggtgattgtctgattgagccctttgtcggcgcggggtcggtttttctcaatacagattatccgcgctatgtgctggcggatatcaacagtgatctgatccacctctacacgatggtgaagcagcggactcaggaatttatcgatgagtcccgcaaactgttcacgccgcagtttaatgatgaactacagtactatgcgctgcgggaacaatttaatcagagcacggatcatttcgagcgcagcattctgtttctctatctgaaccgccattgttataacggtttgtgccgttataattccaaaggccggtttaatgtgcccttcgggcgctaccgcaaaccctatttcccggaagctgaactgctgtggttcgcggaaaaagcccgcaacgccgtgtttgtctgccagtcttatgtgaccagcatggaaaatgcaggcaccggggatatcgtctattgtgatccgccttatgcgccgttatcactgacagccaattttacagcgtatcacaccagcggattcgggttaccggagcagcagaatctggcacagctggcacaaatgctttcgtcggatcgcaaaattccggttctgatctcgaatcatgacaccccgctgacccgggagtggtatcatcaggcgcaactgcatattgtcaaagtgcgccgcactatcagccgcaatacacttaaccgccagaaagtgaatgaattactggcgctttaccgcggacagtaagccgttgagcccggcggcgtcttattaagaggaaacaggaatgaaagagtttttgattgctccgtccattttatctgctgactttgcccgtctgggggaagacaccgcgaaagttctcgccgcaggcggcgatgtggttcacttcgacgtgatggataaccattatgtcccgaacctgactatcgggccgatggtgtgcaaggcgctgcgtgattacggtattaccgcgccgattgatgtgcatctgatggtaaaaccggtggacagcattgtgccggacttcgccaaagcgggcgcaacctacatttcattccacgcggaagcgagcgagcacgttgatcgcaccattcagcttatccgcgaatgcggttgtaaaccgggcctggtattcaacccggccacgccgctcagttacctcgattatgtgattgataaactggatctgatcctgctgatgtcggtaaacccgggcttcggtggtcagtcctttattccggaaacactgaaaaaagtggaagaagtccgccgccgcattgatgccagcggccgtgacatccgcctggaagttgacggcggaattaagactgaaaatatcgcggcagtggcgcaggccggtgcggatatgtttgtggccggttccgctattttcggtaaaccggattacaaagccgtgattgatgatatgcgtaaagaattaacaaaggtttcagcatgacagacaaaacagcagtacagcaattcacagggattaaagccgttgcatttgacctggacggcacactgactgacagtattcagggactggcggaagcaactgatcgcgcactggaagcactgggctaccggaaagcgggcagagaaatggcctctgtctgggtcggcaacggcgttgatatgttactggaacgtgccctgactcatgcaaccggtgaaaaacctgatgctgcactgcacgcgaaatgccgtcagctgtttgatgatttttatgctgagacggttaaaaccggcagtccggcatttccgcatgtggcagaaaccttacaggtgatggcggacgcagggctggatctggcgatcgtgaccaacaaaccgtcacagtttattccgtcgctgctggctgaaaccggtctggataaatttttctctgtcgtgctcggcggggatgatgtgaaaaataagaagccgcatccggctccgctctacctgacgctgggtgagttcgggctgcgtaaggaagagatgctgtttgtcggggattcccgcaatgacatcctggcggcacgggcagcggaatgtccctgtgtcggcatgacctacggctacaactacggtattccgattgctgacagcaatccggattgcgtactgtccgactttgcgggtctgctgcctgcactcgggctgcctccgttaactcatcaggaaggataatcatgagcggaactaacaccaaagcacacaaacccgttgtcttcagcggcgcacagccttccggcgaactgaccatcggtaactacatgggcgcactgcgccagtgggtaaaaatgcaggatgattttgactgcatttactgcatcgttgaccagcacgcgatcactgtccgtcaggatccggcggagctgcgcaaacgcacactggatacactgtcgctctatatggcctgtggtctggaaccggcaaaaaatacgctgtttgttcagtcccatgtgccgcagcatgcacaactgggctgggcgctgaactgctacacctatttcggcgaactgagccgcatgacacagtttaaagataaatctgcccgtcatgccgaaaacatcaacgccggtctgtttgactatccggtactgatggccgcagatatcctgctgtatcagactaaccaggtgccggtcggtatcgaccagaaacagcatctggagctgagccgtgatatcgcgcagcgcttcaatgccatttacggtgatgtgtttgtggtgccggatccgtttatcccggcaggcggctcccgtgtgatggcgttacaggatccgacgaaaaaaatgtcgaaatccgatgataaccgtaacaacctgatcgccctgctggaagatccgaaagcggcagcgaagaaaatcaaacgcgcggtgacagactctgaagagccgccacgcgtgatttatgatttggaaaataaaccgggtgtttccaacctgctggatattctctctggtgtgaccggcaaaccggttgctgcgctggaagctgaatttgaaggccagatgtacggtcacctgaaaggtgcggtggcggatgcggtttccggcatgctgacagagttacagacccgttatcacgaaatccgtaacgatgatgtgttactgaaccgtgtaatgaaagagggtgctgagaaagcctctgcccgtgcacaggtcacgctggataaagtacacgacgcgattggttttgtacgtcgtccgctgtaattacatgatatacaaataaaaatagcgcctttcggcgctttttttatctctgtcgttacagccagcctttctcttttcgtgaacggcataccgggcataatgtctgtcccggctgccagctcataaaaggcagatggcagctgctgcaatgagcatcaaaataagcatagcggaccggctgactgtttttttctgcctgcggtatgacatcgatcgctttcgggaaacagacgtcacggcagctcatgcatccgctgcattttgtcttatccacggtaaactgattatccgcaatagtgatagccccttcctgacacactgccgcgcaggcggtacataaaatacagttttccgtatccgggcgcacatcaaaccagctgtcatccggccagagttttttgcgctcattcagaccggttctggcacggccggtattcagcccgctactgatggttttctgccggaacagcgcaaaacgttttccggtatccaccggcggcggcgggatgatagtcaactgccagattggttcgccgagggctttcaggcgcagattgagcgctgccagcaccggcagccagttatcaacttccggctctgctatctgcattccgcggatatggtattgccggtgccagaccagcaactcttccgcacttgccggggtttcttttttctcaatcatcagttgcccgttattgttgtagctgcgttcgcggacagggatgtgttcaatggcatcagacgggcagacaaacaggcagtttccgcactgaaaacagcggtcattatcaattttgacgtcgagatagccgaatgtcaccgcatctgccgggcagcaggcggcgcagttatcacactgactgtttttgagtttcttcctgacacagtgatcgttcactgacggtggtatggttttctcgccgtttatcaggtagttgagtgcgctgcgtctgataacgttaactcctttgcctgatcataatattgagctggtcaccattttcccatgagcggatgccgtctgccattgacgggatcaataatctgcttttcatgcactcattttttgatacaaaacaacccggctgaatcgtaaaaccgtaaaataactataggttaataactgcaggttattgtattacaaatgatttattgcgaatggttaccagtcgcaatctgacaataagccgttaccctgcaactaacaataataataacgataacaaaatcaattaagcgagcaatgtatatgacaaagatgaaagaaacggcgttgttcactgcgccgctcacgcgacgcgggtttgtcaaagcctccggtgcggccggcggactggcagttgcagcgggcgggttatccctcccgttcagccatgcggcctctgccgctgaaactaccccggcacctgcggcggcttctgatgagaaagtggtctggagcgcctgtacggttaactgcggcagccgctgtccgttacggatgcatgtggttgacggcgaaatcagatatgttgaaaccgacaataccggtgatgatgtctacgaagatctgcatcaggtacgtgcctgtctgcgcggccgttccatgcgccgccgggtgtacaatccggatcgcctgaaatacccgatgaaacgtgtgggtaaacgcggtgagaacaaatttgagcgtattacctgggaagaggcgtttgataccatcgccggtaccatgaaacgcctgatccgcgattacggcaacgaatctatctatcttaactacggcaccggcaccctcggcggcaccatgaccaaatcctggccgcctggagcaacactgattgcccgtctgatgaactgctgcggcggttatctgaatcactacggtgactacagtaccgcgcagattgcagccggtctgaattacacctacggcggctgggcggacggtaacagcccgtcagatattgaaaacagcaagctggtggttctgttcggtaacaacccgggcgaaacccgtatgagcggcggtggtgtgacctattatgttgagcaggcacgcgaaaaatcaaatgcccgcatgattatcatcgatccgcgttataccgataccggtgcagggcgcgaggatgaatggatcccgatccgtccgggtacggatgccgcactggtcagcgcgctggcgtatgtgatgatcaaagaagacctggtggataagccgttcctcgacaaatattgtgtcggttatgacgaaaccaccatgcctgccagtgcaccggccaatgggcactataaagcgtatattttaggtgaagggccggacggcgtggcaaaaaccccggaatgggcagctaaaatcaccggtattccggcggcgcggattgtgaaactggcgcgggaaatcggtactgccaaaccggcgtatatcactcagggctggggcccgcagcgccgctcaaacggcgaaaccgcatcccgtgccattgccatgctttctattctgaccggtaacgtggggattaacggcggtaacaccggtgcgcgtgaaggctcttacgctatcccgtttgtccgcatgccgaccctgaccaacccggtgaaaaccagtatctccatgtttatgtggacagatgcgattctgcgcggcgaagagatgactgccacccgcgatggtgtgcgtggtaaagacaaactggatgtgccgatcaaaatggtctggaactatgccggtaactgtctggtgaaccagcactccgaaatcaaccgcacccatgacatccttcaggatgagagtaagtgcgagatgattgtggtgatcgataaccacctgacctcttccgccaaatatgcggatatcctgctgccggactgcaccgcttccgaacagatggatttctgcatggatgcctccgccggtaatatggggtatgtgatttttgccgatcaggcgattgaaccacgctttgaaagccgcaatatctatgacatgaccagcgaaatcgccaaacggatgggcgtcggtgatcagtttaccgaaggccgtacccaggaagagtggctgcgtcacctgtatgagcagtcccgcgctgcactgccggaactgccggagtttgatgaattccgcaaacagggcattttcaaaaaacgtgacccgcagggacaccacgtggcgtaccgcgatttccgcaacgacccgcaggcaaacccgctgaccacgccgtcaggtaaaatcgagatctattccgcacagctggcggaactccgtgatacctgggagctgaacgaaggggatgaaatccatccgctgccggtctattccgcaggctttgagcatgccggtgatccgcttcaggaaaaatacccgttacagatgaccggtttccactacaaatcccggactcactccacttacggcaacgttgatgtgctgaaagccgcctgtccgcaggaactgtggattaaccctgttgatgccgcgaaacgcgggattgcgcacggcgataatgtgaaggtctttaacgatcgcggggaagtgcgcgtcaatgtgaaggtcacaccgcgtattctgccgggcgttgtcggtctgggtgaaggtgcatggtacagcccggacggcgatcgcatcgatcacgcgggcagcattaacgtgttaaccactcagcgcccgtcgccgctggcgaaagggaatccgtcccattccaacctggttgaagtcgttaaggcctgaggaagcgatttatgtcaacgcaatatggtttctacattgattcaagtcgctgcaccggctgcaaaacctgcgagctggcctgtaaagactttaaaaacttatctccggaagtgaatttccgccgtatctatgaatatgcgggcggcgactggacagagcaggatggtgtgtatcagcagaatgtgtttgcttactacctctccatctcctgtaaccactgtgatgatccggcctgtgccaaagtctgcccgagcggtgcaatgcacaagcgtgaagatggctttgtggtggtgaatgaggaagtgtgtatcggctgccgctactgtcatatggcgtgcccgtacggtgcaccgcagtttgatgaggtcaaaggccacatgaccaaatgtgacggctgctatgagcgcgttgcggaaggcaaaaagccgatttgtgttgaatcctgtccgctgcgggcactggatatgggaccgattgaggagctgcgggccaaatacggcacactggcggaaatcgcgccgctgccgtctgcggaatacacacatccgaatatcgttttaaaactgaatgccaacagccgtcctgtcggggataccacaggccatctggcgaacccggaggaggtataacatgggatcgggaattcatgaatggccgctgatgttttttaccaccatcgggcagagtgtggctggggcatttattgtgatggcggcagtgctgctgtcaggaaaactgtcaccggaactgaaccgtaaagtgcattacagcatgttcggcctgtgggtgctgatgggcgtgggcttcctgctctccatgatgcacatgggtacaccgctgcgcgcgtttaatgcgtttaaccgcctcggcagttcatcgctcagtaatgaaattgcggccggttcggtcttcttcgctgccggtggtttttactggctgctggcagtgctgaacaaaatgccggcggcgctcggtaagctctggctgctggtggtaatggttctcgcggtggtctttatttacgccattccgcaggtttaccagattgccacggtgccgacctggtataccccgtacaccacggttcactttgtgctgacagccctgctgggcgggccggtgctggctgctctgctgctgcggattgccgggtttgacctgcgctgcatcagctggctgccgctggtgggtatcgttgcgctggtggcgagtgcggtcgcagtgacgtcacaggcgtttgatctggccttcatccgcagttccgtacagagcgcttccgcgctggtaccggagttcggcctgtatatgggctggcgtctggttctgctggcgctgggtctggcctgctggatcctgccgctggtgaaacggacaaatccgccggtgattatgatgctggttggttttgttctggtactgtccggggaaatcatcggccgcggtattttctacggactgcacatgacagccggtatggcctatctgtcctgatacagtcagcgcgtatcctgttactgttttccggacggaaaccatggcaggatacgcggatattttattgtgagaatcctgagttatgagtgagcaagctgtcagtgatgttgccttaacggcccgtattctcggggcggcattttactatccgccgtcagaaatcgtacagataacggaactgctctcttccggggagtgggtggcggaatggccgtacggcgatgatgcgcaaaagcaggccgccgcgcagaagctgggtctggctgtcaccggtgaggaaactttagcgcaggcctatcagcggctgtttatcggcccgcaggcactgcccgcatcaccgtggggttctgtctggctggataaagaacaggtgctgttcggggattccactgttgccctgcgtgagtggatgcgtgcgcatcaggtggatattgcgctgtcgcagaatgagccggaagatcacatcggtctgttactgatgatggcggcctggacggcggaaaatcgtccggatgccctgaattcactgctggcggaacaccttctgccgtgggcgcgcttctatctggcgcggatgcaggaaaaatgcggcagtccgttctatgaagggttatctgccctgactgctctgacactcaggggctggcaggatgcactgctggtgatcccggcagagaaaaccattttcgcctgagatatcacactatcagatcaaaaagccctcccggtgcagaccggaagggctttttttacggcggatgttactggccgagggcaaattcattaattcttgcgagcatgtccgggtcattgcggtacttttcgcgcaatactttttgctgctctttggccggaggacaggtttcatccagtgcttttttgatatcttttttctgatctgccggcagggatacatcccattcaccggcaaaatgaatgcagttctctgcattatccgtaaagatttccagctcatcggcactgttctgatctgccgcggtggcgggcagtgaaagcgctgccaggctcagcagcattatcaggtatttcatccgtgtctcctgttttaaatgataataattgtcatttgatgttttttttgccagtatagcccggtatttcaccagacgatgaccgggccttatgactgaaaacgcatctgtatcctgtatcccgcctctgcatagacaggtggccgaatatcatttccgcgacaaaattttgctgcgtcaggggattatgtctgtcagcgatgatattgcgctggaagagcgttatgacgcagggctcaaactgatcgttgttcacagtggccgggttcacagcgaaagcaccggcggacagcagatcacgatcgactcaccggcagtttttatcgcggcgggtagtgataattacatattacagaatcggtttaaagccggagtacccctgcattacacactcttacaactctctcctgactggcttgaacagcagcagattctgttaccggccgttttcggcagcagacaggcgctgtctctccgccatatcgctctcgacagccggatcgctgcctgtgccggacaactgtttgacagtacggtacaggatgcactgaaaccgctctactatgccggaaaagccggtgaatttgcggcattgtgtctgcaacaggtgataaccgccccggccgcggctcataaaccgctcagccgccgggaaataagcggtctgcagcgggcagaagaaattttgcgtgatgaaatggaaaacccgccgtgcctggaacaactggcgctgcgtgccgggctgaacagccggaaactgactcagggattcaggcagttgtatggtcagtctgtttacggctggttgcaggaactgcgcttacagacggcctaccggatgctgaccacgcagggggaggctatatctgccgtggcgtatcatgtcggttatactcccgcacatttctcggtggttttccgcaggcgcttcggattggcgcccggggaagtacgcaaacggcatttttgctgaatgtccggaaagcgaaagaaatagccgcgcaaacgaaagggttgccgctggcggcataagcggccgtccgttactctccgcagaagactgcggagaacatcatgtatcacgacttacgggcgttgttgcgcccctatcataccctgctggcgacagcacttttctttcagacgatcgccggtatcgcctctttggtaccctggctggcactgtatcagtgggcagatgcacannnnnnnnnnnnnnnnnnnnnnnnnnnnnnnnnactggcatttcatcttactcacattaccgatgcccgtttcagttaccggctgcggctgcaactggcggagaaaatgcgcaatctgccgctgaactggtttgtacagcaggggcgcagcggggtggatcagtatgtgcagcaggatatcagcgcactgcatcagctggttgcgcatgcaccggccgatattgtccggctgatactggttccgctgccggcggcacttttgctgttgctgattaatcccctgttgctgatcctgtcactgctgccggtgtgcggggcattctgctgtttccggctgacgcgttctcaacgctgccgcgatatttttgctcagcgtgataacgcattgcgtgcattatccggtgactaccggactctggccgaaaacccgctgattgcacagcagtttcccggccggggtattgtgcgtaagactgaattatcgctgtcacatttcctgtctgtttttcatcagtgggtcagaaaaaccggccgcccggcggcactggcacaggtcctgctcagtccggtgctgctgaccgtctggttacttctctgtgcgtttgtggccgggcagacattatcggcagcggcggggatcctgtttattctcctgctgcgcagtattgcagagccggtcgcggcgatggggcacggcgccgatgcattgcgggccggagcccgggccgctgcgcgtatcagccggttactgcggcagccggaaatcgcctgtggcagcaggcaatatgacgatactgccctgctgccgcgttcagtgccgctggaggttttgaatatcacgctgagtgccggggaagagcatacaaagatgtctgtactgcgtgatatctcgttttcactggcggcaggagaaagtgttgcgattaccgggccgtccggtgccggtaaaagctcactgctgaggctgatagcgcgttttatgctgccggactccggcgatattctccttgcaggccggtcgctgtctgcatggtcaggcaccgggctgaaccagctggtgacgatcgtgatgcaaaacagtgagccgctgcccggcacgctgcgtgacaatctgctgctgtttaacccgcaggtttcgcaatcacagatacagcatgcggtgactgccgcctgtttttatgaggtgattgcggcacaggtgaaagggattgatgcgcggatcggcacggatgttcagctttccggcggtgaagcgcaacggctggccattgcccgtgccctgattgcacaaagtccgcttctgctggcggatgaaccgacatccgcactggaccccgaaaacgccggtatgatttttgatgcgctgctcagcagcccgggaacacggctgattgtcacacatgaccttatgctggcaagacgcgcggatcggctgctgtttatggcagacggcacagttgccgcaaccggcacacatgaggtactgatggcggaatgcgcggcataccgggaatttgtcacacagcaggagaagcaacatgaagcatgatccgctgaaagggcttatttattccctgaaaggaccggtattgctgatggctgccggggcggtacttgaagggatctgcggattattgctgatcccggtgatcctgactctgccgtctgatccgctcccggcactgcggaatctggggatcgcgtccgttatcacgctggtcgtacagtatattgctatgcaacagggctttctggccggaacaacggtgatgcgccgcctgacacttgcactgatccggcatatcccgcgtcgtctgtcaccggataacagtgccggggaattgctgacgggggcgcttatcccggcggcggcgattccggcgcatctgctttccccgctaatcagtaccgtcatgataccgctgacgattgttaccggtttgctgttttactctcccgtgacggcgctcctgttcgccgcaaccgccggtatactgattgccgcactccgcctcagtgcgcagcggctgaaacgggatgaatccggactcatccgggcccgggccggggctgcacaggcgctgggcgattttgcattccatcaggcactgttgcgcaaaagcggccagatgagcggggctgcacagcaattacagcagacactgtcgggacagcatgaatcccaaatcaggcttctgcgccgcagcctgccgtaccatctgttatccgggctgctgatccagctgatttttattgtgattctgatcgcaggcgcatggcaggtttctcacggcacaatcacactgaacggctggctggcggtaatggtgctgatcgcccgttttattgagccgctgaatcagctttcccatattgatcaggcactgcgtcaggcgaaagccgctctgaatgcggcagagcaggaactgtgcgggaaaacccgcggttcaccggcacacagcggaaaaccgcagtcagccggggtctcggctgagtcgctgacagcactgtctgatgacggaaaaccgttgctgcatgcggtatcagtgacttgtccggagaacggtctgaccgttattaccggcccgtccggtgccggaaaaaccacattgctgcacctgctggcgcggacagctgatccgcagagcggaaccgtccgttacggcaatttgccggtgatgtcgctgtctgaagcagtactggcatcgttccgtcagctggtaccgcaatcttcccggctgctgcgcggctctttgcgctggtcactgttacagggggccgcaaccccggacgatgcggagttgcttgcgcaactgcggaaaacaggtctgcaccttaccacagcacaactggatgacgataccggtgaacagggtgatcacttttccgggggcgaaaagcagcggctgtgtctggcccgggcgctgtttgctgcaccggcggtactgctggcggatgaaccgactgccagtcttgacacggtcagccgtgataatgtcatccgtctgctgactgagtggcagggaacgcggattgtggtgacgcacagcccggagcttgcccgtaaggctgacagcgttatcgtgctggataacggttatctctgtgcgcagggcaccccggcggaagtggcactgcaatctgactggtttgccggtttttgtgccgccggacaagagacaactgaaattgatcggcaatcgacagaaattgtccggcaatcgaaatcaccgattatctgaaacggataaaatgataacgattatcatttcataaaccggaacagacatgatgcgcctgacaataacacatacacagcaaacacccggtttaccggcccgttttacgctcagcaaatacacactgatgtgcgcactgctgatcccggcgctgccgtcagcggcagagacaaccacgccgggcagcagtgatgtcattgtggtcactgatcgcccggctgccgccggggatgattatattgcacccggtgtcaccacactggggaaaatggcactgaagccgcgtgaaatcgcgcagtccgtcagtgtcattgaccggacacagattgaacagcagaacctgaatacgcttgatgatgtgatgagccgggcgaccggtgtcaccagtgcgccgtttgttctgctgaccacggcgtattatacccggggctttaaagtcgattcttttgagcttgatggtgtgcccgctctgctcggtaatatggcctcgtcgccgcaggatatggcggtgtatgaaagaggggaaattctgcgcggctctaatggtctgctgcatggtatgggtaatccggcggcgacagtgaatatggtgcgtaaacatgcgccgcaccgcgatcaggcgaatatcacgctgacggcaggcagctggaaccgctaccgtgcagaggcggatgccggggggctgctcaatgaatcgggcagcgtacgtggccgggtcgtggtggcgtgggaagatcgtgatttcttttacgatgtttctgaccagcagacccggctgatttatgccaccgttgatgcggatctcacaccggacacgctgttacgcaccggcctgcaatatcagaccattgattctgtcactaacatggccggtgtaccgatggcggcagacggcagtgatctgcatctgccgcgtgatacgtatctggatgtcagctgggataaattcaaatgggataccacccgtgcctttgcgcaactggagcatcagattaatgatgactggcagtttaatactcatcttgattatcagcatgtaaaagcccgcctgttgtatgccggggcatggggaaatattgacccgctgaccggagatggcgcgatgctgacaggcggcgcgtataaattccgtaaccatcagctgagcctggacagtaatgtgaccggcaaactgaacttcggcggtttacagcatgatctgatagccggtatcagctatgccggtgcggaggaagaacagctcactgctgcttttgataccccgctcaatgtgccggtcaatgtctaccgctgggatccgcacagtgtacctgtgccggggataggtacgtattcatcgccgggaaccacaaaaacgatccgcaaaggcctgtacaccatgggacggatcaaggttgcggagccgctgacggtggtagccggtgccagagccgactggtggcaggtacgcaagccggatgcgaaatttaccgaagacgggaaaataacaccttacggcggccttatctgggattttgcgccggaatggtcatggtacggcagtttttccacggtgtatcagcctcagaccggtaaaacctacaacggtaacatgctgaaaccggtcgaaggacagacactggaaagcggcgtaaaaggttcactgcttaacggcggactgaatgtctctgctgcggtttaccgtattgatatgaaaaataacccgcaggctgaccctgagcatccgggtggtgcctttgatacgaactatatcagcggcgggaaagtggtcagtcagggctttgaactggaaggaaccggctatatcacgcagttctgggatatcacggccgggtacacctataccgacacccgttataaagaagatacacagaatcagggcgaaacctttaacagcctgacaccacggcatatggtccgggtctggacacagtatcagttaccgtgggatgaacggaaatggagtgtcggcggaggtgttcaggcgcaaagtgagttcagtaactccaacggccgggtcactctgcgccagggcggatatgcggtggtcaatacccggctgggttatcagatagatgataactggtctgcagcggtcaacattaataacctgtttgatcgtcgttattacgccggattattcaccccgcagtggaataaccgctacggcgagccgcgtaatattatgctgacactgaaggcggatttctgatgacatctgccggattacggcggtggatgctgctgatggcggtcattggctgtgttgccggtgcggtgactctgtcagcagtgatcaccgttttttatcccggcagtgatgcacttaaccgtctttatgccgggatttttattccgttcgttattctgtgcgccattctgtgttatgccctgacatcccccggaccgggggcggcctttctgcgggcctggagctggtggccaccacttttactgctgccgggggtatgctgatgtgtccgggactgaaggcatcgttcgcgcaactgcacagaagtgcggggtccgtatttggtgtggtgctgtttatcatcttattcagcggcacctggagtctgggcagtgacagtctgcgcttgtggtggcagcatttgcccgccggtgagccgctgccgctgtctgtgctgacagagcagggtatgacgcagctgaacggggagaacggcattcacatcgtactgccttcagcccgttatccggtgatcagcgtctgccgtcatccgggggattgccctgtgctgctcagcgccgtcaccggtcagccggtaagtactgccgcaccgacagatatcccggtgacactccacaaaaatctgtttctcggctttcccggccggatactgatcagtctgaccggctttgtgctgacagttttactgatcaccgggctggttatccatcaccgtaaaatccggttgctgctgcgtctcagatggcggcagggaatacggcgctttgcttttgatctgcatagtctgaccggtctgtggtgttatccgtggctggtactgttcgcgctgacgggtgcgctgtccggactcggggcattcgggacaatgatgctggctgaccgcgtcagtccgcaggcaccgcagcaggttatgcagcagctgatggggtcattccgtgagccggatgcagcaggagaaccggcgtttttatcagttactgaactgcttgcgcagttaccggcccgctatcccggctttatcccgcagatggtgtctctgcaaaatcccggacgtgatgaccgggtggtgactatcagcggcgtccgtgaaggacagccgggatcagcgtattttgaacagctgcgctggcagggaacaccgctgcgtctgaccggcatccgtgattctgcagagcagggaatctggccccgtgcttttattgcagtccagccgctgcattacggacaatatacctggcttgccggtgctgctccgtggctcagcgcactgcattttctggccgggttcgcggcttgtcttctgacactgagcggcctgtcgctgcgggcactgaatgcccctgacagtctctcatcccgtttaaccatcggcctgtgcggcggtctggtacttacctgtactgtgctgctgctcagtgcgtggttctccccgttatcagcccctgcggtatttcctgcggtatggctgataacggtttttttcacccttttttatccgtcgctcagccgcgcactgatgttgatctgtctgttctgtgcagccgggtctgcgtttgcggcgctggttcatctgttttcctgcgccggtgcgcagtggtataccgatgccgcactgctgctgactgcggcggggcgtttgttatgtgctgttgtgttatggcggaaaaaccgctgccggagtgaattatgcatgaactgattaaacatcgccgcctggtgataaccctgggttttctgtatctggcacagggtattccgatgggtattgctatggatgcgctgcccgcgatattacgccgtgccggaactgaccttgcggctctggcttttattccgctggtcgggctgccgtgggtggtcaaatttttatgggcaccgtttgtggataatcactggtctgtctctttggggcggcggcgcagctggatcattccgatgcaggtgatcgtcacactttgcctgctggcactcagtctgaccggtatcacggctgacaatgccggtttgtgtgttgccctgctcgcggtggcctctctggccagtgccacccaggacatcgccactgacggtatggcggcggaacatgcgggaggcagtctgctggcaaatatcaacgcagttcagatagccggtgtaatgggcggttttttcctcggtggcgccggtatgatgatgctcagcggtgtgctgggtcagcagggcgcattactggttttcacggcggtaccggcattcagcctgatcctgatcagccgtttccggcagccgccgcgttatcacgcggatgtccggccggatgaggcacaggccagcctgctgaaaactgtccgccgttccggggctgtccgtctgctgacgctgacgttgttatcggcagtgacggctgtttccggtttcgggctggcaaaattatttctcaccgatgcgggctgggcgctggaagatgtcggtaaagcgggcatggcgggcgggatggtcacgctggtgctcggttgcggcggcggtgcctggcttatcggaaaaacaggggtatggcgggcattttcggcgggtcttctgtgcgcgctgatttcgtcgctgctgtggtttgctcagtctcagggcagtgtcagtgtcatcatggtggccgtgtgtattctgttcggatcactgtcttccgggataacatctgtggcaattatgacagccgggatgcgttttgcctcacaggcgaaacaggcaggaacggatatgaccgcggtgcaaagcatgcgggatattggtgaaatggcctgtgccatgatgctggtcagcctgactgcggcgattggctataccggcggattcgtactggcggcagtgattgcgctggcggcactgctattcactgtcgccaatgtccgttatcagcggcgggttcaggtgtcagctgagcggtccggcggagccgaataaccggcggttaaaatcctcaattttaccggtcatcagacggcgctgcatggtcagtgtccagctggcggaaagtccggatgcctgtaacaggtaacggtattcggtttcatcaaacggcagatgaaaagcgatggcagcggcttccctgacggacaccgcgctggtgcgggtcagcagtttcagcggctgatcactgctgacatcgcctttcccgacgacacggtacagccagccggtacggccgcaatcctgcatcacctgtgcaaaatcagacacatctgtcagcggattaagtttataacacggtgagcgcggctgggtgacctgaatcacggcgctgccccactggtaaatatccccgatgaatacggtttcttctgtcataccgagggtggatatattttccccgaagaacggtgcgacaaagcgatcctcaatctccggatacatcattttccagtagtcgtagtgttcgcggggatagtgacacaacgcgcggtcagggccgccgtgaaaggctttttccgcctgctcgtcaccggcgagtccggtggcactgagggcaatcacgccttcggtctgacgcttttcaattgcactgcgcccgcagcgggctgtatccctgacgggaccggtgaaaactaaaggtgtgtatgccatgccgcctccgtattgagtgagacggatatcataatcgaaagcgggaaagaagaatatgtgcggacagcgtccgcacatatttcaggacttattttgcagaagcgaaacgcgctgctgcctcatcccagttcaccacagaccagaatgctttgatgtaatccggacggcggttctggaacttcagataataggcgtgttcccacacatccagaccgatgatcggataaccggaagtaccggaaatcgcttcacccatcagcgggctgtcctggttggcggtggaaaccacagtcagtttgccgtctttcagcaccagccaagcccagccggaaccgaaacgggttgcggcggctttttcaaactcagcctgaaacgcctcaacgctgccgaaatcgcgctcaatcgctgctttcaggtcgccctgtaatgtggtgccggttttcaggcctttccagaacatgctgtggttggaatgaccaccggcgttgttgcggataaaggtacgtttgtccgccgggaatttatccagctgtgcgatcagatcgtcgatatccagaccggccatctcagggaaggcttccagcgcggtgttggtgttattcacatacgtctgatgatgtttggtatggtgaatttccattgtcattttatcgaaatgcggttctaacgcatcataagcgtacggtaatgcaggtaatacatagctcataattataactccagtaattgaccgaaccgctcacaccgtgtgtgaacaggcagacattataatgaaacagatgataatgaaaacgattatcagatctgtgcgatctgtgcggattctttttatttgttagtttactgtcttattttagttaaatattttagttagcacttgtcatctgatgtcatgtgctgttttttctgtcacaggtgattttttatatcgcctgtggttttcgcatcaaatgataacgctgtgaataccccctttttcaatccgtgatctttcgcgcaaaaaagaaacaaaggcggaaaggtaactttatttaacgtgattttgacatagcattaacaattgaaaggagatgcatcatgacaaaaataacgaaatatcctgtacccgaagcaattgcagaaaacgcgctaatcaatcatcagcagtatctggacgagtatcagcggtctgttgaggatcccgacagctactggcgtgagaaaggtcagattgtagactggataaagccctatacgcgggtgaaaaacacctcctttgatccgggccatgtcagtattaaatggtttgaggacggcacactgaatctcagtgccaactgtcttgaccggcatctggcggagcgtggtgataaaccggcggtgatctgggaaggcgacagcccggatgagtcccgcacactcacttaccgtgaactgcatcatgatgtctgccagtttgccaatgtcctgaaacagcaggggatccgcaaaggcgatgtggttgcgatttatatgccgatggtaccggaagcgatggtcgccatgctggcctgtgcccgtatcggtgcggtgcactcggtgatttttgccgggttctcaccggaggcggtgtccggccgtgtcattgattccggggcaaaaatggtaatcacggcagatgaaggtctgcgcgccgggcgtactattccgctgaagaaaaatgtggatgacggcctgaaaaacccgggtgtgaccacggtcagcagtgtgattgttttccgccgcaccggcaatccggtggagtggcaggacgggcgggatatctggtggcacgatgctgtcagcggtgtcagtgcggactgcccgccgcaggaaatgaatgcggaagatccgctgtttatcctctatccctccggctcaaccggcaagccgaaaggcgtgctgcacaccaccggcggttacctggtttatgccactctgacatttaaatatatctttgattatcatggtgatgaagtgttctggtgtacagcggatgtcggctgggtaaccggacacacctacctggtttacggcccgctctccaacggggctatcacgctgatgtttgaaggcgtaccgaaccatccgaaggtcaaccggatgtgtcagattgtcgataaacatcaggtcaatatcctgtataccgcgccgactgctatccgcgccctgatggcggaaggtctcagtgcgattgaaggtacctcccgcaaatcactgcgcattatgggatcagtcggcgagccgattaacccggaagcctgggagtggtattacaaaactatcggtgacagccgctgcccgattgttgatacctggtggcagaccgaaaccggtgcctgcatgataggtgcgatgccgggggcgattgaactgaaaccgggctctgcgactgtcccgttctttggcgtccagcctgcgctggtggataaccagggagaaattctggacggcgaaaccgaggggaatctggtgatcctcgattcctggccgggccaggcccgtactctgttcggtgatcatgaacgttttgaacagacttatttttctgcctttaaaggtatgtattttgccggggacggtacccggcgtgatgaagacggctattactggatcaccgggcgggtggatgatgtgctgaatatctccgggcaccgcctcggtaccgccgaagtggaatccgcactggtttcacacccgaaaattgccgaagcggccgtggtcgggatcccgcacagtatcaaagggcaggctatttatgcctatgtcacactcaaccacggcgaggagccgacaccggaattgtatgcggaagtgaggaactgggtccgtaaagaaatcggcccgattgccaccccggatattctccactggaccgactctctgccgaaaacgcgatccggtaaaattatgcgccgtattctccgtaaaatcgccgccggtgataccggtaatctgggtgatgtatcaacactggctgacccgggtgtggtcgaaaaactgctcgaagaaaagcaggccatcaaaatgaactagcacgctaacctcagtcagtgccgcgctgtgcggcactgacactccggataacaaaaacagaggagtatcctcaatgagcgcatccatttatcagcaggtggagaatgaccctcgctttcaggaactggtcagaaagcgcagtcggttctcatggacattgtccgctatcacacttgtgctgtatgtcagctttattattctgattgcatttgatccgcaatggctgggcacgccactcggcgaaggtctgacgattacccgcgggatccctgtcggcgtcgggctgattgtcagtgcgtttgtcctgaccggtatttataccatccgtgcaaacggggaatttgaccgtctgaccgccgaaatcatcagcggggtgaaacaatgaaaacgcgccttcctgctcttctgttatccctgctgtttccgctgctcagtcatgcggatgccatcagcgggccggtggagcgccagccggtaaactatcaggccattattatgttcctggtttttgtcggcctgacactgtatatcacttactgggcggcaaaacggacacgttcccgcgcagagtattacaccgccggggggaaaattaccgggtttcagaacgggctggcgattgccggtgactttatgtctgccgcttccttcctcgggatctctgcactggtttacacctccggttatgacggactgatttactccatcggcttcctgatcggctggccggtgatcctgttcctgattgcggaacgtctgcgtaacctcgggcgctacacgtttgcggatgtggtttcttaccgtctgaaagccaggccgattcgtgtgctgtctgccagcggctcgctggnnnnnnnnnnnnnnnnnnnnnnnnnnnnnnnnnnnnnnnnnnnnnnnnnnnnnnnnnnnnnnnnnnnnnnnnnnnntggtggtggcgctgtatctgatagcgcagatggtcggggccggtaagctgattgagctgttattcggactcaactatatcgtggcggttgtgctggtcggcatcctgatggtgttttatgtcctgttcggcggcatgctggcaacgacctgggtgcagattatcaaagcagttctgttacttgccggtgccagctttatggcgctgatggtgatgaaagccgtagatttcaactttaacaccctgtttaaagacgcggttgcggtacataaaaacgggctggcgattatgagtccgggcgggctggtgtcagatccgatctccgcattatctctgggactggcgctgatgttcggtacagccgggctgccgcatattatcatgcgtttcttcacggtcagtgatgccaaagaagcgcgtaagagtgtgttttatgccaccggattcattggttatttctatatcctgacctttattatcggcttcggcgctattttgctggtcagcccgaacccggtatttaaggatgcggcaggggcactgatcggcggcaccaacatggcggcggtgcatctggcggatgcggtcggcggtaatttgttcctcggctttatctccgccgtggcattcgcgaccattctggcggttgttgccgggctgaccctggcgggcgcttctgcggtttcccatgatctgtatgcctgtgctatcaaagacggcaaagccaatgagcgggatgagttaaaagtctccaaagtgacggtgattattctcgggattgtcgccatcgggctgggggttctgtttgaaaaacaaaacattgcctttatggtggggctggctttctctatcgcggcgagctgtaatttcccgattattctgctctccatgtactggaaacgcctgaccacacgcggcgcactggccggaggctggctgggattattaaccgcggtgatcctgatgatcctggggccgactatctgggtcaacattctcgggcatgaaaaagcaatttatccgtatgaatatccggcacttttctcaatgtttgctgcctttatcgcggcctggctggtgtctgtgacggataactccgcacagggtcaggaagaacgcagccgctttgaggcgcagtttatccgctctcagattggcatcggaatcgagcagggcaaatctcactgacagacgtcacagcgcggtctccgttccggaggccgcgtttttctttctctccggcacttgttttatcaggttgttaatggtttactgcaacccgcttgtttatgttacttaaaagttaatttatgcgtctgttttcttctgttttactgattgtgctgattgctctggcaccggcggggttatccggcggaccgggggcggagtacaatgtgaaaattacggtgatgggcacattattgctgctggcgaatgtgtatctctgccgctataccgcaggcaaaatagttgttggtctgctgaccattttgtgggggctgaacttatctgcctctgcttttttccgccgcgaggccggtgctgaatacctgacgaaccttcctgagctgctccatcagggctacccgttgtcagccggtgatttcctgtctgaaaacagtggtatcgtgctgttttttatcgtggtttctgtggcatatttcgcggtggttcacctgctgagccgcgcattgccgcgccgcgctatccgtaatgccggtatctcgctgttattactctcatttattctgcccgttgaatattacgcgatggaaaaagacaaaacaccggggctgacggtgtatgaccactacctgctgggtacgccgctctataatcttgccacggtaccgatggcatggcgggggtgtaccggtatcagctgaacagcagcagccgtccgggagatccggacggcgctgtatcagtcaaactgcagaataaactgcgtatttgcttccagcctgccgggtttaacggaatcgccatagcggtaatattcagcaacaagcggaacacgtgtttttccgtcctgtaagtccgcgattttaacaaactcctgattaaccagtacggcatcattattcatcggtgatgtgacaacaaaaccgacaccggacgcattattattaccttcatcatcaggaacgataacagactcttttccgttataattttctgttttagccgccattaatttcatatgagcagacagatcgccgttacatgaaataaataaattatcttcagctttataattaccgtccggaaatcctttggacgaaaaggcatttaccggtgcccggggtaatttaaattccaggtcagaattttccagcgaacatgatgacggtgcgctttcaatcttgcctttcagtctgtaactgtatcctaccgctgttgtgccgccgccggggttatatgcttggattaaaaccgtaccaatgtatgccccgccggttaaagaaagcgtatccgggttatcttttgcggcataaataataaccgttaagtcaagcggcaggagcggaccttccggtacaggcacattacttcccggctgattctgaaaatgcataccggttctgttatcgatcagaacataaacaaaattccgttcaccacccggataaatatggtatgcagggtatccgtcaatatcaccataatacttggcgacaataccactgccctcactgtagctggtatagccgtgaataccggcatccggcccgcagtttgccacgccgccgataccgccttcacggacaaatgtgaagcggccgacttcctgattctgctttatactgccggtaaggcgcagattgatggttgacgtcattgtggaatggttctgatttccgcctctgatacagtcctcgagtgcataagcatggccggtcgtacctaatccgcctgcggtaattatcagagataatatcagatgtctggttttttttatcaggtgacagtatttcatcaaatctcccgctgacaattcagctttgtaatatatattccgttcgtgggtaacgtaccggtaatgtcataccggataacacattgctgcatatttccgtcctgcttccaggtcgcgcggatatcacctttttctttatctgcaatgaaatagagcgtattaaaattagataccaggtattcagtatcaccacccatcgttgcttttgcgcctaacggtatttctttattatcaggtgttttcagtgtgatcagcagcttgtagcctttcttcacattgaaatcggccagaatcagtgcgccttttgtcggaacaatatcgttaataatattattttcgatctcggtatcaccggggatggtctgagtatcaatcacaatattatttttccggtatggcgtcataccggaaacaacagcaaggcccgaattatttgtctgagcagactgaccgttaatgatacccacaccggcagtatctttggtcagtaccagtgcattggtattctgtaatgcaggagcggcaactacgccatattgtgtggccagcaatgaaccattcatgccatagctgagatttttattatttttactgtatgaataaccggcattaacagctgcatattgtgagcggtaagaactgctcagaccgcctgaattcccggtgcctttattaccctgactctgataaatatcccagctgccctgttggttctcaccataattcccgctgagcccggcagtctgcaacgtctgatgatcggcatcggaagaaatattataatttgcccagatggtattatccttaatattgagcggaatattaaggttcatactgacattataggtattatttttaccattctcagttcttgtgccctgataataattataatatataccgtagttcattttgttaaatgagctgttgaacccggcattataggatttttgtcttttaccggatgtatattcataaataacagtcgacagattaagtgatgaactgccggaaaaaacgggctgattcagtgataaggtgtattcatttttaagtttattgtggtcgttccggttttcatcatatgacattgcatcttcgaaacgataaaatttagcatcaaagtgacggtaacccaccagggatacactggtatttgttgcttctattctcttcgagtagtttacgcggaatgcattcccggcagaggttttatcattattcagtgttgcctttgcatgcagaatatccgctgtgattgctccaaaggcaccaaagttaaatgcagcaccgataccgccggactgataatctttggcaacaaatgccccgccgaaaacggtgacaaaatcggtcagaccataaaatatttctgcctgattgattttctttccgttacctttgttattgctgtcataggttccgccggaaatgctgtaacgcatattccctttcttttccagtgtggaaattgaagagaaaggaacgatgaaatttttctcactgccgtcagtttccttaacattaacatacaggtttccgccattactcatcgggtaatattcggtcaggttaaacggaccggcgggaacactttgtctcaggataatttcaccattctgaacaacagtgacaacggcctctgaatttgccatgccggaaattgacggaacatagtttgttttactgaccggatccatggatctgtctgttgtcagacgaataccacgaaatttaacagaatcaaataactgtgatgatgaatagagattaccgacagtcaattcacttttcagtgaattgatatttctcgataaggtattactgatatttttccatttgtttttattgttgtcatcattcatccaggtggagtaattctgataacgccatgcgcccagattgactctggtctggatatttccataatagctgtcttttgtttcgccattgtgctgacgatttactgccgaaaataaatagttaacaaaaagtgcagggataccattatcccagttttcctgctctaatgcttccagtttatctttattaatgtatgactgcggtgttgtcagtgcataaatccgggagttaaggtcgagatagccatgagtatattcaatgtcattgatattaaaacagccaccggtatcatcattatctgatgacggaaaatcgacacccatgtttccccactcttttccggaaaagcagggaatgagtttttcattaccggctttgttcttttgcagaacaaaatcaatctcttttgtgacaattttattattgttaataacaagagttactttgtattttcccggtgcattatcattgtctttgaaaacattgacatcttcattagtcagttgtgagttactgcctggaatgttaaataagctggccggataataatcatcggccataacagagaaagatgtccctgccataaggacggacatcacggataatgacataaaatggtttttattatgatattttttcatcatcattatcatctgttatttagcagagtaacttaattcaacggctttaccgtaatcatttatatatgtcagttttacatttgcaggtgctttaattgcctgcgggactgttattgtttctgccgatttaggcgatatatatccggcaggcagttttacttcctggttgttgacggtgatttttgaaatatttacataataaggcgtgctgttattaaccgtaaggcggttacctgaaacagaccagtctaacttattcgcataggtttcaatatcacggctgttatcgagagccgccggacgatacaggatttttattctgttggtcatcgagtagcgcagaacgttttcctggccttcctcactcggcgccacaaacttaacattcagccagtaaagagactctctgtcagccggtaatgacgccacttttgtgacctgtaatgtattctttttttcagcccgtaatttgacgagtggtggtgttgaaacaaaatcagggctgacatttcctgctttatcttcaacccatgactgcaaaagatagtttctgcctttgtcggtattaaaggcaacaacaccctcgctgttatttttttcatgataaataacgcgggttgtttctaaaccaaaaccggcatagctttttgatatcaaaagaagtaatgcacaagcagagagaatgtttgttttagtgaacataattaagccttatttattttattatagcgggggcgcgcagaatatttcatctgcgcataaatattaattatatgagagcgtgtaattcagagttgcatccgcctggccggcttcaacgtcatcagcggtgctgtagtagtatgcggtataacttcccttccatgatgcgctggaagatacgttatattcctctgtttttgagccatcaatcacgacagggttattactggtgtcgccattctcaaatataaggacagcaatatttttagccgttgtacttgcgttcggattgtctaattctaacagctcgttatcaccatcttttggcttgccatgtaactgtaattttactttcccctggtccgggcagtctgttaatgaaatatccagttctccataaccatcttttccgccaaccatagtgccggtttctgtaaatgcactggtcggataacgacccattaaaacatcaacattaggagagttagtatcgttaagatcaatcgaacaggtggcattataaataaagcctttaaaggaaattgtacctgtctgatcaactgcggatgcactcatggcagtaccggcaagtaatgcagaaattaatgatttaccaattaaagattttttcatcttaaaccttatttaaatgaattttttattcagtgtcagctgaataaaaatgaaatcgtggtgttttatgcgaaacaataatgaataaaggcagaaaaaattctggcaatgataaatacaattttcattgtccggaattgacgattattttttctgctgattactggttgtctggtttaatttatagatatatgagcttttctgaataactcacggaatgagtatatcgaaataatgtattgagaatacccggcggtgtatctctgtgtaatctgatgtttcaaactattgcgctgttagtatttgatttaatcttttgatttttatgtgtatttttattgtatttattttatcttatttctttttcaccggatgtgaacaaaaccaatagtaagtaatgatttaaatatcaataggttgagtaataataaatgaaagaaaaacgggaagggaatgcattatttacttacatctcacacgcgtattttttttaagaaagaacacagaaaatgattttttatcggcctgaataatcatttacatcggaatttgatgtgtgatttttttcggaaatgagaggtattatcagagaggcgggaaataacagataccggaacaggggatattgccggtatctgtcaggtgttatccgtaaattataatgttatgccggacagttttatattgctgcgctcacttcctgataagcgaatagtccggcggcaccgccggtgtgcacaaacagaagcggcgaagtatcttccggatgtctgcgaacctggtcaatcagcccggccatggctttaccggtgtaaaccggatccagcaaaataccttcgtgacgcgccagcagttcaatggcttccagcccgccggcattcggcatgccgtattccggggcaaaatagctgtcccacagcacaaccggcgccggtgtttcaatgtcaaacagctgtgccagttcgttttgcagtttaaccactttcggcgcctgatcggcatatacccgcgatacggtgacaccgataaccggggtctgcggcatcaccagctgtaatccggcagacagcccggcgtgtgttccggcgctgccggaggcgaccacaacagcaccgaatactgtgccttccggggtctgctgtgcgatttccagggcgcactccgcatagccgagagaaccgagcatattggagccgccgaccggcacgatataggcatcactgagctgcatatggttgatcagcgcctgcatctgcgcatccgggtcagtcagggcatcacacatcacacagtgtgtgccaaataaatccgtcagcagcttgttgccgttattcaggaaattgacttcctgactgccgatcgggttttccagcagtgccacacatttcaggccgtacattgcagcaacagcagctgtctggcggacgtggttggactgaatggccccggcggtgacaataaactgcgcgcctttttccagggcatccgccatcaggaattccagtttgcgcagcttgttgccgcctgccgccagcggtgtcagatcatcacgtttgatgtaaatctcccgtcccagcaggcgggagagattattcagtttattcagcggtgtgacaccgctgagcagattaagcttactgaactgcgccagtgtctgttgcagccgggttgccccggcggtatttacagaagaagacatatcatttccttattgaattcgcagtcatactcagtaggtgaatcctaaccagagatagacggccagcgcaaaactcgcggttaataccgcatacggcatctgggtacggatatgctcaatatggtcacagtctgtcgccatcgatgccacgatcgcatcactggagataggggaggtcatatcaccgaagatagacccggcgatcgccgcaccaatcatatattccggcggcataccgacagacagacccagctgcacaccaatcgggatcatgatggcgaatgtaccccaggaggtgccggtcgccagtgacataatggcactgatcaggaagataaagccgacagagaagcccggtgcgataaccccggatgtcacctgggcaatataggcaccggtgttaaggtcagaagagacagagcccatcaggaaggcgaggatcatcaccgaactgattttaatcatattggcatagccgatatagagctctttaaagaaggtatcgacattcagcacgcggcgcgccaggaaccagacaaatgacaccgccgtcccgaacattacgccccagtagaccgaggtggaaccactgcctttgctgaactcgccgtcaccggtgatatacagcgcgaccggcaccatcagaatggtggagaggatcgggataaagaagttcagtgaagtatggcagttcggatgatcaataatgtctttatcatcttccggctcgtcgtgcgtttcttccggtgtaccggtgataacatccgcagagctgatgagtgcctgcgcccgcatttctgctttgcgcatcggtccccaggagacattactgaagatatagaacagaatactggcgagtgagaaccaggccatgatgttgtaaaccatggaatgtgccaggatatcaaacggttcgccggtgatcagcccctgagagatctgcacaccgataacgcccatcattgccgcaccccagccgttgatcatggcggaagaacagacagacacacaggcggtctggatgatgtaagacattttctccggcggtacgccgtattttttcgccagtgctttggtggaagcaccggaaaccagctggttaatcgagctttcgataaaaatcagggatgtgataatcaccgccagcagctgtacacctttgcggcctttgatgatctgcgttttgttggtcagcaggcggacaagtgcccgcacaccgccggtcaccacgaccagccgcataatcccgccaatcatcagcataaagatgatggttttggcgtttcctgatgatttaaagacatcaataatcccttcgagggtcgcgcggatccccagtaagaggttgtgatcatgaataacagtaaagccgacaagtatcccgatcagcagtgataaaatcacctgacgggtacagatagccagaataattgtgacgaccggggtaatgaccgtccagataccatagtcctgcatacgctttctcttttattattgtggtagtgatgctgtgtcaggccagagcctgctgtaaatcagccagtaaatcgccgatatcttcgatgccgacagacaaacgcagtgtgctgtcaaaaacaccgatggattcgcgctcttcgcgggtcatggagccgtgggacatggtcgcggagtgattcaccatgctttccacgccgcccagcgattcagcgagcacaaaatagcgcagttttttcacaaatgcttcggtttctgcgaggccgcctttcagctgaatagtgaccaccgcaccgccggtgcgcatctgttttttgcataactcatattgcggatgatctttcaggcccggataaaatactttttcaatcttgtcgtgaccggacaggaattccgccacggcctgtgcattgctgcattgtgccgccatccgcagtgccagggttttcaggccgcgcagggcgagataggcatcaaacggagaggcaatcgcgccggtggtggttttcaggaaattcagtctttccgcgagatcgtcacggttggtgatcaccgcgccgccgattaaatcagagtgaccgccgatatatttactggaggagaccatgatcagatccgcgcccatggtcaggggcttctggttccacggtgtcgcgaaggtgttatcgatacaggttacgatattgtgttctttggccagcccgcagatggcttcaatatcaaccagttccagtaacgggttggtcgggctttctatccagatcatgcgggtattgtctttgattttgctgcggactgcggctaaatcattgagatcaacataatcgaactcgtggccgcagttctctttcgccacgcgttcaaacagacggaaagttccgccgtacacgcctttcatcgcaataatatgggagccctgcgggaagatattcagcaccagtgccgcagccgccacaccggaggcagtggcggtggcggaagtcccttcctcgacatcggccagcagtgtttcataggcgtgacgggtcgggttactgacgcgggaataggcatattcgccgtgctcgctcaggctggtctgcacaaacgtactggcggtggtgatcgccgggaaaatagcatggttcactttatcctgctgctgtccgccgtggatcagcacagtggcaattttcttactcatagttggtgtcctgtaaaatatgcgatgaatatttaatggttattgtaatggccggatagtggcacaggtagtcagaaaaaattttctaaaaaaattccgcagccgcagacggcagagaataaatttctctgttataaaataagtgttatatatcagacaattgcatgttttatatgaatgagaggtgaatcacactatgaataataaggttattatttttattttacggtcaaaaaaaccgggctgattttgcccggtttctggtgtctgagagtaaaaaatgtgtgcggggggatcagttccgtaccaggtcgacaggataggaattgaacagataaccatcaaaattcgggtcatcgacatccgacagctccagcaggcgctgttttacattttccagatgctgccacatggcttctttggccgccgccgggtctttcttaatcatggcggcgaggatcacctggtgatcggtcatccactctttgcggtaatctttattggtgatgcgcgtatgcagcttcagccacatcgggttgttttcccgccatgcccaggattgtttcagtaactccaccagcatgctgttatgggtcgcctgcgcgatggccaggtgaaactcgcggtcaccggtttcatcttccccggttttcagttcgtcgcgttcccgctgcagggcgctgcgcatattggcgatatccaccggtgtggcctgggtggcggcaaattccgcgatattgctttccagcagctgccgcgcctgtaacagctcaaacggaccggcggcattgagcgaaccgttatccgtataaccgtctttctggtgcggcaggtcagtaatatagataccggatcctttacggacctctatcaggttttccagttccagcataataagtgcctcgcgtaccacggtacgggacacactgagcatctcagcaatttcgcgctcaggaggaagcttatcacccactgcatagtgcatgttggtgatcatctgacgcaatgcgtggccaacttcctgataaggacgttttgattcgataaattgagtcatctgtggtgccataaataaaatgaaatcggagtcagtttaccagatattggtcaaccaaaaatgattttgatgactataatataaaataaaccacccgatattggtaatacagggtggtttatctgagaggtgcaacgaagattatttcacgtcgcggatacgatctgccattttggataactcagggttggacttggcaatatcgtcatacatcggttttaccgcatcctggaaggtgactttatcaacggtgataaattcaacaccctgcttctcaactttcgcacgttcttctttctctgaggcttcccagagtttcgccattgtctgtgcggagtctttggctgcctgcttcacaatttcctgctgttccggtgtcagcttatccagtgatttggtcgacattaccagcacatccggcaccatcgtgtgttcgtccagggagaaaaacttggtgacttcgctgtggcggctcagtgtataggacgggatattattttctgccgcatccaccacgccctgctgtaaggcggtatagagttcaccgtaagccagcggagtcgggttaccgccgagtgcttttaccattgagatagcggtcgggctcggctgtacgcggattttcagacctttcagatcgtccggtgtgcggataggtttcttggcatagaagctgcgcgcgcccgcatcatagtaagtcagaccgacaaacccgctgtctttgctggagtcgaggatctcctgtccgatatcaccgtagataattttttcgtagtgtggtttgtcacggaacaggtaaggcaggttaaagacggagtaagccggtgagaaagcttccagttcagcagcattggatttgacgatatccagtgcaccgttctgcattaattccatggattcacgctggttgcccaattgcgcgtccgggtagatacggatgcggacgtcaccgtttgttttggtttttacgtcatccgcaaactgtgtcatggctttgtgaacagcatgatcacggttctggttatggctgagtttcagcgtggtggcggcgaaagcctgggtagcgctgagagcaaataccgcgccgataacagtgctgaggatacgtttgctgtttttcacgttagggttctccggaggaaaatgagcttcttattatgttgtctcaccttaatcacaagtcactaagtggtcaaaaggtaaaccttcattggttgaccactatcacaaaataaccccaatctctggttaaccaaatcataatgtgatcaccgtcactcactgttttcagcgggatagactatgctcgaacagcaaaatttgtatttggtgtgacagttgccaaattggttaaccaaaataagaacaaggacaaggccaatgaaaaaccttgtagcgctgattaataaagggcttgctgtttttactatctgtttatcagcattcctggtgttctgtgtgacatggcaggtgttatcccgctatatcctcagctccccgagtaccgttactgatgaactcgcccgttacctttttatgtgggtcgccatgattggtgcggcttacaccacaggacaacaccggcacctcgcgattgatcttctcgttatgaaactgtcaggtgcaagaaagcagtttgtcagtttatttatccagattgccattattgcctttgcaggtattgtgctggtgtacggcggcagcacactggtctcttccacactggaaagcggtcagatcaccccggcactgggctggcagatgggttacatctatctctgtttaccaatcagcggcttactgatgattatgtatgcactggttgatatcttttcactctttcagccgggttcagcaaatactgaactgactgacagccattaatggtgcgatgagaggttaattatggattggtatgtgattgccgcgctcttcggcacctttgcgtttctgctggttctcagtgttccggtttccttcgctatcggcctgtcatcgttagtggcgattgccatgacgctgccgctcgactccgcgattactgttgtcgcccagcgtatggcggcaggggtggataacttctcgctgctggcgatcccgttctttattctcgccggtaacattatgaaccagggcggtatcgccgcccggctgattaatgtggcaaaagtgatcggcggtcgtctgccgggctcactgctgcacgtgaatatcatggcgaatatgctgtttggtgctatttccggttctgcggtggcttctgcggctgcagtcggcggcaccatgtccccgatgcagaaaaaagaggggtatgacccggaactgtccgctgcggtgaatattgcgtcctgcccgtcaggtctgctgatcccgccgagcaacacgctgattgtttactcgctggtttccggtggtacgtcgattgcggcgctgttcctggccgggtatattccgggcatcctgatggggctgtctctgatgatcgtttccgggattatcgcgaaaaaacgcggttatccggttgcaccgcgcccgacatggaatgagtttttctcaaccgtctggaaagccgttccgtcactgatgctgatcgtggtgattatgggcgggattatcgccggtatctttaccgcgacagaagcatccgcgattgccgtgatctacagctttgttctggccgtgattatttatcgtgaagtcagtttcagccgcctgccgaaaattattctggaatcggcagtgacaacctctatcgtgctgctcctgatcggtgcctccatggggatgtcatgggcgatggcgaacgcggatctgccgtatctgattgctgatggtctgatggcgatttctgataacgcactgactatcctgctggtcattaacatcatcctgctgattgtcggtatctttatggatatgacgccggcggtgctgatttttaccccgattttcctgcctgtcgccatggatatggggattgacccggtacacttcgggatcatcatgacattcaacctggctatcggtatctgtaccccgccggtcggcagcgcactgtttgtcgggtgttctgtgggcggtgtcagtattgataaagtcctgaaaccactggtgccgatgtatatcgcactgattgcggcgctggcggtggtgacctatttccctcagctcagcctgtggctgcctgagttagtcctgaactatacaccatcgtaataccggtgttgtcactcatctgccctgccggatgagtgacagttttggtttaccggtttaataaaatgaaagtaacaaaaacgcacttatcgttgatgtaattttatttacagtaaaaacaataaattaatcataaaacaaaatgtgatattggttgaccaatgttgttttcaggcttgacgtctctctgtgttgataggaagatgacaacgctgtacacgtgacagcaaggtttgacagcaatactcgccacaccggggattaaattggtcaaccaaataaacagtgatgatattcgcggagcataaacgaggtttagtatgaaacaaacttggcgttggtacggaccggcagatccggttactttatctgatattcgtcaggcgggcgctaccggtatcgtgacagcgctgcaccatatcccgaacggtgaagtctggaccacagacgaaattcagaagcgcaaggcgctgattgaagccaatcatctggaatggaccgtggttgagagtgtgcctatccacgaagatatcaaaacacagaccggtgagtatgaaaaatggattgccaactatcagcaatcgctgcgtaacctcgccgcctgcggtatttatactgtctgctacaacttcatgccggttctcgactggacccgtactgacctggaatatgagctgccggacggctcaaaagcattgcgttttgatcagattgaatttgcggtgttcgaaatttacctcttacagcgcgaaggggctgagcaggactataccgcagaagaactggcgcaggccaaaacccgctttgaaaccatgcgggatgacgaaaaacaaaaactgataaacaatattattgccggtcttccgggtgcggaagaaggctatacacttgaacaattccgccagcacctgaaacgttacgcaggtatcgataaagcgaaattacgtgagcactttgcgtacttcctgaataaaatcattccggtggctgaagagtgcggcctgaaaatggctgtgcatcctgatgatcctccgcgtcctatcctcggcctgccgcgcattgtctccacgattgaagatatgcagtggatggcggataccgtcaacagtgatgccaacggttacaccatgtgcaccggctcttacggcgtgcgtgctgacaacgacctggtcaatatgattcagacctttggtccgcggatttacttcctgcatctgcgttcaaccatgcgcgaagaaaacccgaataccttccatgaagcggcgcatctggccggtgatgtggatatgtataatgtgatcagcgcggtggccgccgaagagaaccgccgccgtgagagcggctctgagtccctgatcccgatgcgtccggatcacggccatcagatgctggatgacctgaagaagaaaaccaacccgggctattccgctatcggccgtctgaaagggctggctgaaatccggggtctggaaatgggtattcaccgcgcattctatacaaaataatatctcatacctttgtacctgccgggctgcgggatctctcccgcagcctgctccccgggagcctgtaatggaaaagaatcttgtcactgcggacatcaccgcaacgcgtcctgactggacgactgatcgtctcaccacccgtattgttcacctcggctgcggcgcgtttcaccgcgcacatcaggcgctgtatacccatcacgtattagaaaaaacagacagcgactggggttactgcgaagttaacctgatgtcggcacaggatgcggcactgatcgaagggctgaaagcccagtccatgctgtataccgtggcggagaaaggggcagataaaacagagctgaaaattatcggctcgatgaaagaagcgatgcacccactgatcgacggtattgatgcggtgattgagaaaatggcctccccggatgtcagcattgtttccctgaccgtgaccgaaaaaggctactgcaccgatccggcgaccgggcagctcgacccggaaaatgcgctgattaaacaggatctggcgacaccggagacaccgcgctctgctatcggttacatcactgcggcactgaaacgccgccgtgaacgcggtctgccgccgtttactgtgctttcctgtgataacgtccgtgagaatggtcatgttgcccgcgaagccgtactcggcctggcgcggttacaggatccggcgctggcggcgtggattgaagccaatgtcactttcccgtgcacgatggttgaccgcattgttccggcggctaccccggaaacactggcggaaatcgcacagcttctgggaacagaagataactgtgctatcgcctgtgagccgttccgtcagtgggtgattgaagataactttgtgaatggccgccctgagtgggattgcgccggtgcacagtttgtgcaggatgtggtgccgttcgaattaatgaagctgcggatgctcaacggcagccactccttcctggcgtatctcggctatctcggcggttatgcccatatttccgacaccatgactaacccggattaccgcaaagccgcccgcgcactgatgctggatgagcaggcgccgactctcaccatgccggaagaaactgatctggtcgcctatgcggataacctgattgaccgctttaccaacccgtccctgaaacaccagacatggcagattgcgatggacggcagccagaagctcccgcagcgcctgctggacccggttgcacagcatatcgcggacggcagtgattaccgccatctggtactgggcgtggcgggctggatgcgttatgtcagcggcaccgatgagcagggcaataaaatcgatgtgcgtgacccgctggcagaaaccttcgcggcaatctacgcaaaacacggcctgtctgtggcggtggtggatgagctgctggcaattgaatccattttcggtaacgacctgccgaaacagcagggctttgttgatgcggtgaagcgcgcgtatcagcagttacttgatgtcggtgcccgtcaggccgttgccgcactgtaatcccggagagtttatgaaacagtttctttgcgaagactttttactgcacagcgacattgcccgccgtctttatcatgactacgcggcggatatgccaatctatgactatcactgtcatctgaatccgcgtgaaatcgcggaaaaccgccgttttgataacctcgggcagatctggctggaaggggatcactacaaatggcgcggcatgcgttcggcggggatcccggagcagcttatcaccgggcgcgacagcagtgattatgaaaaatatcaggcgtgggcaaaaacggtgccgatgaccctcggtaacccgctttatcactggacccatctggaactgcgccgcccgttcggtatcaccggcaaagtgttcgggccggaaacggcgcagagcatctgggatgaggccaatgaaaaactggcgcagccggaattttccgcgcgcggcattatgcagcagatgaatgtgcatatggtcggcacaacagatgacccggcagattcgctggaataccaccggcagattgcacaggatgacagctttaatattgaagtgcgcccgagctggcgtccggatcgcgcttttaaaattgaactggacggcttcacggattacatcgcgaagctcggacagagtgccgatgtggatatccgtcgtttcagcgacctgctgaccgcgctggaaaaccgtctggcacactttgcacagcacggttgtgttgcctctgaccacggcattgagatcctgcgctacgcaccggtaccggatgaatcggtgctggatgcgattctgcagaaacgtctcgccggggaaatcccggatgaaaccgccaccgcgcagtttgcaacggcggtgctggtctggctcggaaagcagtatgcgaaacgcggctgggtgatgcagttgcacatcggtgcgctgcgcaacaacaatacgcgtatgtttaagctgctcggtgccgacagcggttttgattccatcggtgatgcgccggtggcgtatccgctttcacgtctgcttgatgaaatggataaaaccgatgagctgccgcgcaccatcctttactgcctgaacccgcgtgataacgaagtgctggcgaccatgatcggcaacttccagggcggcggtatcgcaggcaaagtacagttcggttccggctggtggttcaacgaccagaaagacggcatgcagcgtcagctcgaacagctgtcacaactgggactgttaagccagtttgtcgggatgctgacagattcacgcagtttcctgtcctatactcgtcatgagtacttccgccgcattctgtgtaatatgctcggcacgctggcggtaaacggtgaaattccggcggatgagaatatgctggggcagatggtgcgtgatatctgcttcaataatgcacagcgttatttttccgctgcaaaaggtgaataatgacagtgaaacgcattggtctgatcggcgagtgcatgattgaactcaacggtgcgccgttcggggagatggttcagcgctacggcggtgatgccctgaacagtgcggtttatctggcccgtgcggccggagacgccgttgaggtgaattttatctctgccatgggaaccgatccgctcagtaaaggcatgatcagccgctggcaggcggaaggggtcaacactgcgcatgtactgatcgatccgcatcatcagccggggttataccttatccagctggatgagcagggtgagcgcacgttcctttactggcgcaatgattcggcggcgcgttatcttgtccgtcatccggaatacccggcgctgctggcacagatggcgcagatggatgccatttatctcagcgggatcagcctcgccattctgccgccgcaagaccggctgcgattgctggatgacctgaaaacgctgtcacagcagggcaaaaccattctgttcgacagtaactaccgcccggcattgtgggcggatgaaaatgaaacccgtgactgttatcaggctatgtatgcactgactgatatggcgctggtcactgatgatgatgaagcacgtctgtggggcgacagcgaccgcaacgccacctttgcccgtctggcaaaagccggggtgaagcaggcgattatcaaagcgggtgcccaggggtgtgactaccgtgatttgcgcactgacgcaccggccatcaatattgccaccactccggcggaacaggtggttgataccacctctgccggtgatgcctttaacgccgggttcctggcgggctggctgaccggcgcggatattgaacgcgctgcccggatgggccaccggcttgcgggtgtggtgattcagcacaaaggggcgattatcccgcaggcggcgacccgcccggtcactgatactttactgaataacacgttttaacgggaaaagaggagaacgagatgtccgaattacaggcaatgattacccgtttccggcagctgaaaattgtgccggtgatcgccgtggataacgcggaagatattatcccgttaggcaatgcactggcggacaacggtctgccggtggcggaaattactttccgtactgagtgtgcggcagaagcgatcaaactgctgcgcgaagcccgtccggatatgctggtgggcgcgggaaccgtgattaaccgcgagcaggtgcgtcaggcgaaagccgccggggcgcagtttgtcgtctctcccggtctgaacccgaacaccgtgcaggcgtgtcagcagattgatatcccgattgttccggggatcaacaacccgggcgcggttgagcaggctctggagctgggcatcgattttgtgaaattcttcccggcagagccgtcaggcggtattccgatgatcaaagccatgctggcgccgtatcaccagttacaggtgatgccgaccggtggtatcgggctgaacaatatccgcgactatctggctattccgcagattgtggcctgcggcggttcatggatgggtccggcttcgcttatcaaagcaaaagactgggcagccatcggcaaactggcgcgtgaagccagtgagtttgtgaagtaaggattttttaccgttccggcagcagatctcttctctgctgccgtattatctgttttctcctgccagtaacattctgaaccatcaattatcctgttgtttttacagagattccggaactatgaccgttcgcaaagatattttttaatcagttgtatatgctggtaaatcatactgcttttcagacgggccttctgtgttgcataaatattatcccttcagtctgcgtgacaaactcatattgatggccattctgctggtcaccgtgccgacacttatcatcggttattttgtggaaacagaggggcgttccgcgttgttgcaggagaaacgcaacaaactctattctgttgccgggttgctggaacaggcactgaatgatgaatatgaccttgccgcatccctgccgcgtgaccagcgcctggcgctgatcagcgaaaagctgtatccggcggcggaaatcatcacctccaccttccccggggtcggggccgggtattaccaccgcgagcttgacggtattgtgacttattccccgcgtgcccgttacggcaacaaaaccggtacccgcatcagtgaggatcaccccggccgtcatgtgatggcaacgggagaaccggaagtcggctggggaacccaggtgcgcggtaatattatgaacgccatgattccggtcaggcgtaacggcgaggtgatcggctatatctgggcgaatgaactgacagatgatattgaccgccaggcgctggcgatggatgtcaaaattatcgcggtcattgcactcgggatcctgttcagtctgctgattattattgttttttcccgtcatttcagccgtgatatcggtgcaattaaaagcggtctcagtgatctctctcatgacctcaatactcatctgccgatgatgaaaggggaaatgggggagatcagcgacagcgtcaatgcgctggcacagacactgcgggagatgaaaaccctcaacgagctcattattgaaagtgcggcggatggtgtgatcgcggtggatatcaacggctgcgtcactatgattaacccggcggcggaagagataaccggttatctggagcgggatctgcacggcaaatattacggtgatgtttttgaggggcgcagtttctccagcccggttctcgataccctgaagcgcggtattgagcacgtcagcctggaaattgcgtatcctgcccgtgaccgcaccattcagataaacgtcagcaccagccgcatccgtaatgcgggcggggagcttatcggcgcgctggtgatatttaaagatctcactgcgcagaaagaggttcagcgccgtatgcagcaggcggaaaaactcgcgacactcggcgagctgatggcgggagtggcccatgaggtgcgcaacccgctgacggcgatcagcggtttcgtgcagatcctcaaagaactggaaaatcacccggataaactggaatacatcagtattattctcaaggaagtggattccattgaccggatcatccgccagctgcttgatttctcccggccgcagaccggtacattccgcccgatcagcgtcaaccggctgattgaggaagccctggtactggtcaaaaccaaaggagtggaagcgcgggtcacctttacctgggagccggatgacacactgccgctgattgaggccaacagcgaactgctgcgtcaggtgctgctcaatatcatgataaacgcggtgcagtcgattccggccagaggcaatctctttatctccacctgttacatggaagagcagcgggtcatggtggtgatccgcgacgacggcaccggaattccggcggcgctgcaaaagaaaatttttgacccgttctttaccaccaaagcctcgggaaccgggctgggactggctatcagccagcggatcattgccggtcacggcggtgatattttccttgaaagtcaggaacatcatggaacgacgttcaccataacgttgccgataacgcagggtaagaaaaatgattacacataaatcgtaccggcttctgatagttgatgatgaaaaaaatctctgccggatgttacagaccgccttttctattgatggtcatgaaacccgggtggcggaggacggcgaggcggcgctgataagctttgtgcaggacaaaccggatgtggtgctgatggatatccgtatgccgaaactggacggcattgaggccctcaaacggatgcgggaactgaacccggaagtgccggtcattctgatgaccgcctatgccgccgtggaaacggcagtggacgcgctgcgtctcggggcgtttgattatgtaatcaagccctttgacctgacggagctgaaactgcttatctcccgtgcattacagctgcaggagatgaaacaggaaatcaacctgctgcaccgcgaactgagcgacagctaccagtggggacgggtgctgacccgtaatccgaaaatgatggaaatctgccgcgatatcgccaaagtctcgcgcagtcaggcgacggtgcttatcaccggggaaagcggcaccgggaaggaagtggtggcgcgggcgatccattacaacagcgaaagggccaacggcccctttattaaagtgaactgcggggcgctgcccggctcgctgctggaaagtgagctgttcggccatgaaaagggcgcatttaccggggcgcaggtacagcgtcagggattatttgaacgcgccagcggcggaacattgctgcttgatgaagtcggtgaaatgccggcggacttgcaggtgaaactgctgcgggtggtgcaggagaaagaattcgagcgggtcggcggcagtaaaaccatccgtgtggatatccgtattattgccgcgaccaaccgcgatatgcatgaacgggtgcgggaagggcatttccgccaggatctgttttaccgccttaatgttattcatctgaatctgccgccgctgcgtgagcggccggaggatgtgggtttgctggcttcccattttctgcagaaattcagtcaggaaaataaccgcgatattgtcgagctggcgccggaaacgctggcattactgatgaactatcagtggccgggcaatgtgcgggagatttccaacgtgattgaacgggcagtcattatgagcaccggttatgtgattttccccgaagatctgccggagcagttactggcacaggtccgcagccagccggtggcactgattccggtcacgcaggagccggggctgaacctgaaagagaatattaaagcttacgagaaagagctgattatttccgccctggcagaatttcagaataacaaaacccataccgcctctgcgctggggatcagccgccgggcattaatgtataaattgcaggaatatgatattgaataattaataataattttataaaaataattttaaaaagcacggtgaaaataaattcaccgtgctttttttgttgtgaataaattttcacactgtgcattttatttcaccatcaggaatgaattatttatttataatatgttaataagtttatttttataaaatacaaatcaataagtatcagcattttagagtgatataaatataacaaaaaacagattttattattggcatagcgcttgctattacccttgtgtctatatttttttataaaagggaagtgctatgaagaataaacaaataacggtgaaaaaagccggtgaattttttcgtgacggcatgacaattatggtcggcggatttatgggcgttggtacaccgccgcgtttaatgactgaattattagagtccggcgtcaaagagttaactattatcgccaacgataccgcgttcgtggataccggtctgggcccgctgattgtcaacggacgggtgaaaaaagttatcgcttcccacatcgggacaaacccggaaaccgggcggcgtatgatcgccggtgaaatggaagtacagctgatcccgcagggtacgctggcagagcaaatccgctgcggcggtgccgggctgggcggattcctcacaccgaccggtgtcggtacggtcgtggaagaaggcaaacagaaaattaccctcgatggccgcgattatctcctcgaacttcccctccgcgctgacctggcgctgattcaggcacaaaaagccgacccgctcggcaacctcacctatgacctcagtgcccgcaactttaacccgctgatggcgctggcggcggatatcaccattgccgagccggacgagatggtcgcggtgggggatatcgacccggattgtgttgccacaccaggggcaattattgactggctgattgcagaataaggaaaacatcatgaatgcaaaagaattaatcgcccgccgtgtggcacttgaactgaatgacggtgatgtggtgaacctcgggatcgggctgccgacacaggtggcgaactatctgccggaaggcgtgcatatcacattacagtcagaaaacggatttctcggcctcgggccggtaaccacgccggataagaatctggtcaatgcaggcgggcagccgtgcggcatcctgccgggcgcgtccatgtttgacagcgccttctctttcgcgctgatccgcggcggtcatgtggatgccagcgtactgggcggcttacaggtggatgaacaggccaacctcgccaactgggtggtaccgggcaaaatggtgccgggtatgggcggcgcgatggatctcgtgaccggtgcgcgcaaagtgatcatcgccatggaacactgtgcaaaagacggttccgccaaaatcctgccggagtgcaccatgccgctgaccgccgtgaaagcggtggatgtgctggtgacggaactggcgttattccgctttgaaaacgatcagatgattttgtgtgaatacgcgccgggtacggatatcgataccatccgcgaaaaaaccgctgcgcattttattgtttcaccggatatctgtgaaatgccgctggtgactgcgggggaagccgtatgataggacgcatctcacgagtcatgacccgtgtggtgagccgctatctgccggatccgctgatcttcgcaatgctgctgaccatgctgacgtttatcatcgcgctggcactcacaccaagcacaccaatggatctggtgaacttatgggggaacggattctggaacctgctggcgttcgggatgcagatggcgctgatcatcgtgaccggtcacgcgctggccagctccccgccggttaaacgcattctgcggctgactgcctcactggcaaaaaccccggttcagggggtgatgctggtgacgtttttcggttcggttgcctgtgtcattaactggggattcgggctggtggtcggggcgatgtttgcccgcgaagtggcccgccgtgtaccgggctctgactacccgctgctgatcgcctgtgcctatatcgggtttatgacctggggcggcggtttctccggctctatgccgctgctggccgccacaccgggtaaccctgtcgagcatatcgccgggcttatccctgtcagccagaccatgttcaccgggtataacctgtttatcaccctgacactgattctggtgatgccgtttgtcacccgcatgatgatgccgcgcaaagacgacatcatgatgatcgacccggcgctgctcgaagaagagccggatttccagaaaaaattaccggaagatgcgccggtttctctccggatggaagagagccgccttatcgcgtggattatcgggattctgggcttcacgttcctcggcatgtatttcatcaaaaacggtttcaatatcaccattaacaccgtgaatatgattttcctgctgaccggtctgctgctgcataaaaccccgatggcgtatatgcgtgccgtcagtgccgctgcccgcagtaccgccgggatcctcgtgcagttcccgttctatgccggtatccagctcatgatggaaggctccggactgggcgggcttatcactgaattctttatcaacgtcgccaacaaagaaaccttcccgctgatgacgttcttcagctctgcgctgatcaactttgccgtgccgtcaggcggcggtcactgggtgattcaggggccgtttgttattccggctgcccaggcgctgggggctgatctcggtaaatccgtgatggcgattgcctacggtgagcagtggatgaacatggcgcagccgttctgggcgcttcctgcactggcgatcgccgggctgggggtcagggacattatggggtactgcatcaccgccctgctgctctcggcaccgattttcattatcggcctcgctttcttctgacagatactaaacagtaaggatttcgcaatggaaaatatcgttattgtcagtgccgtgcgtaccgcaatcggcaactttaacggcgcactggcgggggtcagtgccgtggaactcggctcggcagtggtcagcgcgttactgaaaaaaacgcagctggaaccggggctggtggatgaagtgattatggggaacgtgttacaggccggactcggacagaaccccgcacgccagatcctgctgcgcagcggtataccggaaagtgcctgtgctttcaccgtcaataaagtgtgcgcctccggcctgaagagtgtcgcgctgggcgcacaggcgatcagcagcggtgacgcggacattattatcgcgggcggcacggaaaatatgagtcaggcgccgtatctgctcgacagccgtgcccgctggggttaccgcctgggcgacggtgcagtacatgatgtgattctgcgtgacggactgttatgtgccgagaataactatcacatggggatcacagcggagaacatcgccaaagcctataacctgacccgtgaagagcaggatgcactggcactgtcatcacagcagaaagccgtcagcgcgattgagcgcggcgcctttaaggcggaaatcgtaccggtgacggtgaaaagccgtaaaggggatatcgtggtggataccgatgagttcccgaaagccggatcaacggcagaggggctggcgaaactgcgcccggcctttgataaagcgggaacggtgactgccggcaatgcttccggtatcaatgacggtgcggcagcactgatgctgatgacggaaacccgtgccaaatcactgggactgacaccacttgcccgtatccggggttatgcctccggcggggtttcaccgtcaatgatggggctgggaccggttccggccacgcggaaagtgctggagaaaacggggctgtcactgaaggatatcgatcttatcgaagccaacgaggcatttgcctcccagttcctcgcggtcggccgtgacctggggtttgatcctgaaaaagtcaacattaacggcggggcgattgccctgggtcacccgattggtgcgagtggtgcccgtatcctggtgacactgctgcatgcattacaggctcagaacaaaaccaccgggctggcgacactgtgtatcggtggcgggcaggggattgcgatggtgattgaacgtctgtaatccggtgaaataacaggcggatattcagccggtggcagggtgactgccaccggcttttttgtgccggtttctgtgtttctgacaaaattcgaattaagttaatttttcgtgtaaaatatttacattaatttaatttattaagtgcggtttgctgctcatattaggatgagtcatcaacctattatgctgaaatccgatgtgtgggatcaaacacactttttcacatcctgtaaaaactcggaatttgtatttgaatggagtgaaaacatattttttttctaattatttggtatataacacttattatactaatccattgtactttcaatcgattaatattttgtaatattatttcgttacactatgattttaaaggcgaaatatatcgaaacattcagtctcatttaccccctcatgtactcacaaacagcataacctttggtttttcaaaaatggccctatgtacgataaactacttatagttttaagtgttttttctatgatcagtgagctaaataaggaattttagtgatggtctttatagggttattgattaatgatgaagaaatatgcaatttccgaagctatcggacaggttatcagacaataccggaccaatgcaggtttaaccacaaagcagctggcacacagaatagggattagccagcagcagctctcgcgttatgagcggggggtaaaccgtattgatgtggatacgttattgcgtgtcagtctggcctttaaactcacaccgggtcgtttctttgaggaaatgaatatgaccggcaccgggctggatgatattctttatgaaaatgaagaaggggatattcaggaaatccggatgagccttattgcggacagtattatttccccgcgcgatttttaatcacaataatttccgcttttaaataaaaaagacagaccagtacagctgatttgcggattactgtacgggtttgccgtgcccggtaaatggctgaacaggctgtgctgctcagtcccggatatattatccgggatgagcctgccggagacggtaatggtttaaaaaaggtatttaacacccagcatagcctgagtatcactgtatccggcatcgccgatctgctgagcgacgttaccccagagattcaggttggtattaatctgaccctcaacaccggcttttatttccccgatattccgggtaccggcgatatcaaactggtcgtcatttattctgacgccgtatttttggctgttataaatccagtttatttctgcaaaaggttcaaaattacgccctttaccatcatcaatgacattatggccgtgcagataagcccgtaaaccgaggcgggtacggatattattatctccgctgctgcgcacatctgcgccgtccgcgtttttgtggtttttcgctttcacaccctgaaaggtgatttgtgcttttggttgcaggaagaaggtatttacggtgtcactggcggtgataaattccccggctttaaaggtataaccggactcaaccgaggctgttactccgcgtgaagtgtatttttccgcagaaaactgctcactgtgaacttcatgatcaaaccagttatataacacccaggcatcggtatataaccctgatttatccgcgtcatccgcataccaggttccgtacaggccagcactgtaaccagttgtttttccttttgaataatagccgttaaggttatttttggttttactgttctgatccgcaaatccggccatgataccggcatggtagcggttcagaccatcggttgaccactgagccagatcgccgccaatctgcacgacataacggttgtcctgcgttgttaactgcccctgtaactgacggaagcggttatgcccgccgacctggcgcagccacagcgatgtgacgtttgtttctcctgtcagggcatctgtataacgggtttccccgagacggtcgtgaagacgcaggtcaaacaggttattcgccgccagtgtgttagcggcgtaactgccggttgcagggtcaataacaggaagcgacggttcggaaggcaccggggtgactgaaggttcaggaggaacagagggatcagaaggcaccggggtgaccggcggctccacatacaggttggtcagataccagtttttattatctgttcctgcaatatagccgccgcgctgcaatgtatattcatatgcgccggacacaatacgtccgctttgtttaaattctccggatgaatcgccggataccgtaatcagctcaatacctttgtctgtttttgcgccccggccattaatgttattcacctgaacggtggtattaccggtgctgtttttattgatgattaatttatcggtcactgagttatcaccacccagttcggtattaaaaataaccgttccgttatcggagttgaaattattgattatatttaatgttgtctgtgtctggttattttttgacagccggacaataccccggttatccagtgaggaaatgctctgatcaaatccgttaaggtcaaaattacctctgttgtgaacattaaccccgttaccgaatgaattcagattgcctgcttttaatgttccgtcatcaatcacaaccattccgctgtggcggctgttatttccggtcagcgtgatggtgttggtattttctttaatgatattgatggtgtttatcaggtcgggtgaaaagttgttgctgtcctgatagttaaacactaatccggatttcagattcgcgtttccggagtcagggatgtatttgttattaccggtaaaacctgcaatataatccgtttttaacgtaccggcattgccgccgttgccataaaaaataacggcattatcaaaataactgtccttattcaggctgatgctgtcagtgattatttcacctccggcaagcaggttgacgtaactgccggtattcgttgtgactgcgcttttattgccgatgataatgtcccgggcagataatgcgcctccctgttcaacggtgatgacgttgtctacttcatcgcccagcaccatcgtattttgtgcggttatttttgattgtgcgccggtgacgagaacctccggggatgcttttttcccgttatcaatgatataagaggttcctccgctggccagaatgatatttgcggcgttgatttcagcaccgtctgccacttttaaaaaactgcggggattaccgccggtaacaaaattatcggttacctcaactgatgatcctttacctgatattaataccgatacagggaatgtatgattttcgtaattatgtttaccggcatcatgtataccggcataaaaattttcagcgctgatttttccgccggataatacattcagctctgaaggagtgtcagcgtgtccggtttgagtatattttgcaaagtaaaagtctttatgtacattcagaagaccgttattttttatattcaacgttgtgttaaccgacgtatcccggctaatacggctcatctcatgtacagacatgttttcagcttcaattacgccgccatcatcaatatttatgatgaccgtgccattcggaagtctgttggaattataggttgatgccagaatattattatttacttttaactttgagccctttccgctgacagttaattcataaaacccgctttcatctatcctggcctcgttataatttcccataacgaaatcatcagttatcacattagcaccatcagtaattttcaggctggcatgcgatacaatatgatcaaaatcgagaggcctgtcgatgatacctaatctgagcattccggtgttattccaccgtgaatcactgcccgaaagggtaacaaaccctgtttccccggctttttccgtaatggttgcaccctgcgtttcaagcgtgccgttcttaacaatgataccgcccttcagaacagaaagattaccgagattcagtgtcgcggatttgtcatccagctctttggtttcaccattttttatcgttacggcatgaccggctgacgcggctaaaagtaaagaaaaacaataaacggtacggtgattctgtttcttttccatgtaaaaaacccctgaaattaaatattcccggactgaaggtcaacccgggtaaaaatcatgtttatttttatacggaaaaactatagtaaaaataatttttattagccaagtgtttaatagcgaaataatgcgttataagcatgcttattttatttctctgtgctttttatgatgttttcattttcttctgtcagcagctgtttcattcatttccgggatatggaataaagacagaaaagagaatcaattacaatgacgtgaagttttacaggagggtatattgccggtgaggcggagacgaaaaaaagcgggagataatatctcccgcaatatgctaaccaatcaaggaacttaataatatattggtcagaaggacagaggtttttttattcagactgcggtgctgagttttttaactttccggaaccggtgctgtgaccggttccgggttttactttatttcagtcagtgcggggcaccgacggatggcctgttttctcttacccgtcactcgaggtatttgaagaacggtgcgatgagcagcaggataccgaagcccataacacaccaggctttccagtctttgaattttttcagtttcgcgacacggaataccaggtaaacaggaattaagcaggaaacgatagcgtataacggactaccaatctggaagaagacaaccacggagaaccctgttgacacccatgcagtcagtaatgcaacgatgaagacagagatacagatgtttaatacggtgtggttgattttttctttatccatgaagcgggaaaggatgttaaccgcaagacctttcactgattcctggaagcccagatagataccgaagaacgctgtcagaactgcaaagatgttcagtacggtggtcatcacactcacgaccgcgcccgggataacctgagcagcaatagccagtgcagagatgttctgttcaaacgcggatacggcctgctcatgactgatagagaacgtaaaggagaatgagaagaacaggatgattgtcaccagggtgatataggccacgcggtgagcgcggatagcacggtaggtggcaacacgtttgtctgattccagtttacggtacgcgatgttcatcgggttcagaatctgaacgaaaaccgcagagaagaacgcaaacggtacagtcagcagcacgtcacgggtaaagtcaccaatcggcgggaacgcagtgatgttattgaaatcccagtgagggatcatcaccagacccagcgatacaatgataccgactttgacgataaccatcggaccggagattttaaacagcagtttctcgcccttggaggcaatgaaaatcagcgcggcaaagacagccacacgatagatcagtgagcttgaaagcacaccctctgtaacaccgaacgtatggagataagaggcactgtcgaaaataacagagagagagtaaataaagataccgtggataagcatcaggaagtaaataacccccagcgccacaccccagttactgcccagatactgtgtgattatgtttgtgtagtcttcacattcttcactttcagacagcgtattcatgtacagcttctgcaacatataggttgccggatacgcaatcatgaaagctaaaataaatacccaaatacctttcagaccgatctgaatcggcattacaacggtaccggcaccgatcgccataccaatacaaagtactacccagccggcgtcatacattgtaaatggtattttgcccagcgctttcgcggaattctcggttgaggtcatgtccgccatactaagcccccttggttttcataataatttattgtgattatggtttctaaaaaatttcagcactgcgttgttctttttattaccgctaaaaataacctgttaaatacttaaaaagcacgccggagagaattcagagtggctctcaatgaatttttccgcgtgcttcgtgtactcaccccgtctgtgtgttaacggcaaatgaggtgagtacatactgcaggacttaattttccgctctggtcttaagcaactgctttcgcaatagcctgttccaggtcagcaatgatgtcttcaggtgtttccagaccgacagagatacgaatcagaccatcggtgatacctgctttcagacgctcttcagccggaaccggagagtgagtcattgatgcagggtgctgaatcagagtttcagtatcgcccaggcttactgccagcatgcataactcaacagagtccatcactttacggcctgcttcgataccgcctttgatttcaaagctgatcataccgccgaagttgctcatctgttttttcgctaactcgtgctgcgggtgagacggcagaccagggtagaatactgcttctacgttcgggttagattccagatatttagccactttcattgcgttagagcagtgacgttccatacggacgtgcagtgttttcagaccgcgcagggttaaccatgcgttgaacgggctcattacaccaccggtgatgtctttaacaccaaccagacgggcaggaaccaggaagtcagcaggaccgacaatcacaccaccgataacgtcgccgtggccgttgatgtatttggtcacgctgtgaaccacgatgtctgcacctaattccagaggacgctggcagtacggagacatgaaggtgttatccacaaccagcattgcgccgccttcgtgagcaacatttgccgctgcttcgaggtcgatcattgccagagtcgggttagccggagtttcgacgtaaaccattttggtatttggtttcatagccgctttgatgttcgcagggtcatttgcgcgaacgaaagtgacttcgataccgaatttaggcagggtgtgagacagcagagcataagtacagccgtacagagtgtcagaagcaacgatatggtcgccctggccgcacatagtcaggatagtggtagagatagctgcgataccggaagaagtcgccagagctgcttcaccgttttccagtacacgcattttttcttctaatgctgcgttagtagggttacctaaacgtgagtagatataaccttcttcttctaatgcgaaacgtgctgccccttgtgctgcgctgtcgaagacgaatgtagaggtctgatagattggggttgataacgcaccagtcagtggatcagcctgctggccagcgtgaacaatcttagtgtcataacctttattcgtataatcgtgcataaatcctccaaagaataattttttattatgccaacatgtgttgttgttgcagtaataaaagcaatagccgtgccaactcaggagttatttttataacacattgaattaaaagagataaataattttaaggtataggttagacaaagtcagtgcagaggaagtggaaaggggactgtaagtaaaaatgacaaagtggaaagaaagttgacagtaggttgccactttctgatagtgaggttaatcacattggaggataaaaccggacttgcgtcacattatagccccaaaagggaagggtgatccagatctctttttaaattttttcctgaatcgatacgtccggcggttgataatgatcaaagtcatgaataatcaattccattaattagcgcacttttaatgatttgccactccaatagatgcaggtgtaaacctgacaatctgcggactttttttcatagaattgagatatctggcgggtacaagccgactgaacttgtttatagtaagtaacgtaacaaaatccaaaataacaattacactctgtatgataaggctacttatcatatggtttttttattgcgcactattttgttgtatttcgccctttgttcacctctcagtgattacctaagatgggttaaccctggtaaggtgggtgaaaaatgagcactacatacactaaccgggagtgactaatcacatgtctgcatatagatggttaattaataccattgaccgcgtcgccatggtggaagaagtcatcaatgagttttcggcctccgaaatcagcattaattccatggaagtctttccgtgcaaaatttatgtcaaattcaatacggagtgcgagcgggatgtgaagctgctgctgagcaaactcctgcttaatcctgatgttatcagtgtcacccgttccaaattacagccctacgagcgtaaagaaaaagaattacaggcgattctggaatccaccacggacggcattatcggtatcaataatcagggtaatatcaactacttcaataaagtggcggaagactttttctcgatctcacgggaaaatattgtcggcgtcaatatcagcaagattctcagcggcaaaaaccaggcggtgctcaccaaactgctcggcggcaacagtttcgatcactatcagatggtcaccagtacgccgaaaggggagctgtactatatctgctccggtcgtccgattctgagtgaagagtctcaggtgatgggggcggttatcaccttcaagagcctgcgctcggtgcagcaaatggcgtcttcggtgaataaaagcctgccgttcagctttgatgacattatctgtgaaagcgaaatcatgatgaacctgattgattttgctaaaaaaatctcaataagcccgtatacggtactgatccgcggtgaaaccggtaccggtaaagagctgtttgcccgagccattcataatgccagcgaccgcagcgctcacccgtttgcaccgattaactgtgcggcactgccggaaaacctgattgaaagtgagctgttcggttatgagggcggcgcgttcagcggcgccagcaagggcgggaagatggggctgtttgaatccgccaaccacggcaccgtgtttctggatgaattcggcgagctttcccttatcctgcaaagtaaattactgcgggtattacaggaaggtgtgatccgccgcgtcggcgggcacaaagagatcccggtggatgtgcggatcattgtcgctaccaaccggaatctggaagagatgatcgagaacaaatcgttccgtgaagatctctattaccggatcaacgtgatcccgattaatatcccgccgctgaaagagcggaaaacggatatcccgctgttactgcagcgctttatcagcaaatacacgacagagctgaataaacagctcagtttgtcccaggatgcgtatcaccagttaatggcctattcctggccgggtaacgtgcgggaactgcaaaacgtgattctgcgggccattcatctggcttccggacgggaaattaccgtcggggatctgtggctgccccatgaggaagtgatggcctctccggcactccggccgcaaccggtgcagaaaacggaaacagcacctgcggtattgccggtgcaggaagacattaacctgaaagagtccctggcgcggcaggaaaaaagcctgctggaagattatctgcgccgctatggttcggcccgcaaagtgtcccgtgaaatcgggatgtctcacaccactgtactgaacaaagcccgttactataatctggagcatctgctgacctacagcacggtgcgccggtcagcagacaaaacagattaatacggattatcatccccgccggcagcggtccggcgggcagtttcgtaagcatcgatagccctgatcctcgccatccggtgatcaaccaccggcttcggataatcaatctcacgctgatttttctccgcccattcatggggcgtatggatgtatttcgcaggtacttctgccagctccggcagccagcggcggataaagctgccgtccggatcaaaccgttttccctgcgtgaccgggttgaaaatccggaaatacggtactgaatcatgaccggtagaggccgcccactgccagccgccgttattggcggcaaattcaccgtcaatcagctgtgacataaaatagtgctcgccgcgccgccagtcagtcagtaaatctttgaccagaaaacttgccgtgatcatccgcagacggttatgcatccagccggtttcattcagctgacgcatagctgcatcgaccagcggaaacccggttttgccctgctgccaggcaagcagcccgctgttatccggtgaccagataatggactctgtccagcgctgcatcgggcggtgacggctgatatccgggtgctgtgccagctgatgcagataaaactcacgccagataagttcactgagccaggtataagcgccgctttccggctcatcggcgaccatcgggaaatgcaggcgcagacggctcaggcactggcgcggggacaaaattccggtggcgagatacgcggagatgcggctggtgccgtcaatcgccggaaaatcccgctctgttttgtaatccgcagcctgtttctgacaaaaatccgccagccgctgcagtgcggcctcttctccggaagggaaaagagtatgttcctgctgcggcagattaagcggagccggggagaccggcgggcctttggcctccggcagcggcagcacacggacggtggtctgcatcagtgcggtgagaaaggcacgccggaacggagtgaacactttgtagagcccgccctgttgtgtgcttacactgcccggcggcagcaggacactgtcatcaaaggtataaaagcggcaggtatccggcagacgcgcggcaaagcgggcatcgcggcgctgttcattcagcccgtactgtttattgacatagacagcggggatgcgatgctccccgcaccacgcggccagccagtcagcggcatcctcaaaggtatggcacggctgcacatgcagggtgatcccgagtacggctgcggatgtgttcagcgcgtgcagctgacagaaaatcagcgcctgctgtgacggggacatggcgtgctgctcccactgtcccggcgtgagtgtaaaaatcagttttacctgccggtgtgcctgacaggcggcgtaaagcgccgtgttatctgtcagccgcagatcgtgccgcagccagacaacggccggtgctgaatccgtcataactttacctcccgcataaacaataaaaaggcccgcgtccggagaggcgggcctgagcaggacatcagtccagtttagggtgctgatcaatcagtgattgacggcgtttctgcaacgcggcaatctcctcatcaatcgcctcaatcttgtgttcgatattatcgtaatgctcgagcaaaatctctttggcttccgcgcggtcagatgcggccggtgtggcaccgcgtaacggcttattggcggtttctttcatcacaatcgcggtaatcatcccgataacggcaatcaccatcagataataggccggcatatacagattattggtcgcctcgaccagccaggcggcggcggtcggggtggcaccggcaatcagcacggagatattgaatgagatagccagtgcactgtaacggatttttgtcgggaaaatggccggtaaaatagaggccatcacaccggtaaagcagttcagcagcaccgccaggatcagtaagcctaagaaaatcagaccgatgacaccgctgttaatcagcataaatgccggaatggccagcacaaataacccgatactgcccgcgagaacaaacggtttacgaccgatgcggtcactcatcatcccgatcagcggctgtacgaacagcataccaatcataatcgcgataataatcagcacaccgtgatccgcactgtaattcaggttatgcgacagataactcggcatataggtcagcagcatgtaataggtgacgttggtggcaatcaccagcccgacacaaatcatcagacccttaccgtactgtgaggcaatgctgcgcagtgaaacgcggggcttatcttcgccggtttccgggttggcatttttcatatcctcaacatgctgctggaaagccggtgtttcctccagggcatgacgcagatacaggccgataacgcccagcggcagcgccaggaagaacgggatacgccagccccattcccggaaggtttcctcaccgagaatactggagatcagaaccaccaccccggcaccgcagacgaaaccggcaattgagccgaagtccagccagctgcccataaatccgcgtttacgatccggtgaatattccgctacaaagatagctgcaccggaatactcaccgcccacggagaaaccctgagccagttttgccagcagtaacagcaccggtgcccagatcccgatactttcataagacgggatgagaccgatacagaaggtactgacagccataataatgatggtgacggaaagcactttctggcggccgaatttgtcgcccataatgccgaaaaagatcccgcccagcggacgtaccagaaacggtacggagaacgtggctaacgccgcgatcatctgtatacccggggaggcggaagggaagaagacctgacccagcacatacgccaggaagccgtagaccccgaaatcaaaccactccatggcattacccagagaggcagcggtgatggctttctttaattttccatcatcaatgatagtaatatcattgatatttaaaggtttttgttttgttttcttgcgtctcatcgttgtatccttttgttttatgacggggattcacgtaactgagatttcactcaaacctgcaatgactttttgtgtgatagtgaattcatcggtagcaggccatgtttaatactaaattggtaagtataaatacgtattttttcccgtattcatgtttcccgttaaatagattgattgttgaatatgtaacgctaacggcagacggtacaggaaaccgcagacaggacaggaagaataggaaagtattgtgttgtaataaccaaaaaaagcacctttgttttgaaacgaggtcacctaatttagcataaatcatattttttgtaaaattagtgggtttttgtactgattaatatcgtgtatttggcatttaacttctctgtatcgtaaaatgttcaatgctgtttttttctgaaaaatcaacggaagtgcagatcacccgagaaataaggcgtcttaaacagatgctttccagcatattttgttgtgtgaaacggatcgtgtttagtatcacaatccgatgtattttaaattagcagcagaatcataatgtaaatggtttagacttaagcaatatatcgggtgatttcagaaaacagacaatgttatcagtatgtttcacctgatttctcaattttctgtatgtgttttcctgataattacatctgatgtaattaacgcataatcacagtcctcaatgatttctttacgtaataataagataaactttggagttatctgctgaatatgcaaatcatgcagtgatatctgccaacagcaatttaagaaagatataaatgtttcaagatatatcgttttttttccatttaattgtggtttgttactctattaaagctaaataattactattttataccactaatgagtcattttatttttagtggtttatacctagtccaagggtgaaagaaaaggtaaatatactataatacatagggttatcactctttcggacaccgaataattcttttttttacaattcgttaggtgatggagcggcaggtttcaatttggtaaatgaatatgtaatatgtgtttcaacatgtgtacgaggctggtttgcataagtacatacatgcggcagttaaaacaacaacaaagagtaaaactttgtgaatatcaattggtccactttctttaataaacgcatatttttgttagtcatcagagaggaatctgatggttatcacagccatatgtgagggatagcgacatgaccaaagcaaaaaactcgatagcacgcgccgtcgggcaaaaaattcaggtgttacgaaaagatcacggcattactgcagcaagactggctgaaatgattgaaatcagtcagcagcagatgtcacgttatgaacgtggtgtaaaccgtgttgatgtggattgtttagtccgtattgcggatatctttgaagtgccggttggctggttcttcaccgagattgaaggccggagtaaacgcgacagcggaaatgaacgggaatcctggaaagcagaaaccgttattttgccggtcgaatctgaactgatgtaatttcgtgatattgagtgatactgaatctcatctcaaaaatccgttattagcctgctaataacggataccgctttttgcgggacgtgtttatttcttcatcacccgccttgtgctatcatcctgatacacagcatgttgtattactcttataaccctgtttattaataattttaatattttgaatccgttttataactggataaataagcaatgaacattaatcagctcaaaagttttgttgaggtggtcaggagtgactttaatatcacgaatgccgccgagaagctgtatacctcgcagccgacagtgagcaagcagcttaaaattcttgaagatgaactgaacgtttctttattcaaccggaaaaataataacttattatcgctcagtccgattggtgaagaagttcatcgtgttgcctgcgatattctggcgcagtttgataaaattaaaagtctggtatcacacgaagataccacgacaaaacagaatctccgtattgccaccactcacacgcaaatccgttataaattaccgaaagtgattgaacgctttaatgcgcgttacccgaatatttcgctgcatttccatcagggtgccccggcacagctggcggaaatggtgaaaaacggggatgtggattttgcaatcgccactgaatccctgcatctgtatgacgatttactgacgctgccgtgctatcagtggtcccgcagtgcgattgtgccgcacgatcacccgctggcacagaatgagcagctgacgattcaggagctggctcattatccgctgatcacctatgtattcggattcaccggccgttccaagctggatcaggtattttatcagaaccacctgacgccgaatgtggtattaaccgcggtcgatacggaaattattaaattctatgtgaagcgcggagccggtgtcggtgttatttcctccgtggcgtttgatccggcggaagacagtgattctctgcgctgtattaatatcggtaacctggtgaaaccgagctatacccatatttgtatcagccgtcatacacatctgaaggattatatgtatgactttatttcctgttatgcgccgcatcttgacctgaattatattcaccagccggaacagtggctgccggttgatcctaaagcccgtgaccggctttaccgcgcattgcctgagctctgattcttttgtattccggataaaaaaagcccggtaacgtctgttaccgggctttgtacttgctgtgtgtaatcttttttagcgggtggcaatattaataaagatttgcgcaccgatcagcaggcaatcgtcatcaacaaaatacggattggcatgcagatagttattaattcctttggctttgttaccgctgccgaggaaatacatggcacctaatctgtctttggtggcattaatcatatagctgaaatcttcactgccggtcatcggcttaccgtttgaatcaatattttcagccggtaagaaggccgctgccgcgtttttaatgacttccgctgcctgcggatggttaatgacggccgggtaaccgcaggcttccagtgtggttttaaaaccaccggcttcactgcgggcaacaatctctttaaagctggcttttaagattttatcggtctcttcatccatagagcggatggtgccgcgtgcctgcacataatcagccagcgcattcggaatggtaccaccgttgatcataccgcagccgaaaacagccgggctgaaaggatcggttttcttggcgacgatataatccatgtaatcaatgatacgggtagcttcgcggatagcatccagccctttgtgcggcgtggagccgtgcgcggaaacaccgtgcacatccagcgtccaggcggagccgtaagaggacatcacacctgcattaaaacggatgcagccggtttcaatcgcagcgtcgttatgcagcccgtagacttcatccacgccgtccatgcagcccatttccaccattttatccgcacccggcacgcgcatatcttcttccgccatctggaagacaaagcggacgttgtgcgtcagctcatcacggtgttcgctcaggtattttgccgcggtcagcgcgatggtcatatgggtgtcgtgaccacagttgtgggcgcagccttcgtgtacggagctgtgctcgttgcaggtcatgtccggcatttccaggccgtcgatgtcggtgcggtaagcaatcagacggtatgccggattgacggtcagttctgcggtaaagccggtatatccctcaaactgacggatggtgtagccgaagctttccatcagttcgcggcagtattttgaggttttatattcttcaccggacagctcagggattttatgtaaatcctggcgcgttttcttgctgaacgcctcaagcgcaaagagtttttcactgacattgtatttattggtcattacatttaccccgtaactgaaaccggtttgtgtgctgataaagaatccctgatgtaagcgcgggtatgaccggaaaccggtcataccacagcgccggcgcaacatgagtacattttatttttacgaaaaaaagtctgccttccggaaccggcgggtttctgtcagcagctgttttcgttattatttgcaggagggattttaacgtcagtattaaaaaagtgagcgtgacggagatcgtgtttatatcatatcagtatttcatggtgcatgaataataaggatgatatctgtaaaaaataatatcttagtgataaattaatattatattacttaataatatcaatcggttattgaaaatatagttttctgattttttatgttgattctgtgtaaaatataattcgccacccgaaataacaataatattaatattattaaacagaaattaagaaaagtgtatttatatatcattgcggccatttttgtattattccgccggatctccggcaatatcctgaattagtgctgaaaatttcccttattactggtggttttatctgcgacgcgcccgggctacactgaaatgacaggataaacacacagagcaggccggtattgttctgtgcagcatcttattgcgaatcagatttatcaccagtatgagggaagatttacgatgaagcagactgtagcgggttatatcgcaaaaatgttggcggatgcaggaatcaaccgtatctggggtgtcaccggagactcactgaacgggttaagtgacagcttacgtaaactgggcagcattgaatggatgggcacccggcatgaggaagtggccgcgtttgccgccggggcggaagcccatctgaccggtaaactggcggtgtgcgccggttcctgcgggccgggtaacctccacttaatcaacggattatttgattgtcagcgcaaccgtgtgccggtgctggcaattgccgcacatattccttccggcgaaatcggcagccattacttccaggagactcatccgcaggagctgttccgtgagtgcagtgtctattgtgagctggtttccaatcctgagcagatccagcaggtgctgggtattgccatgcgcaaggcgattctggagcgcggtgtggccgtggtggtcattccgggggatgtggcattaagaccggcaccggaatcggcccgtaatgtctggtatgagccgtctttgccgctggtgatgccgcagcgggatgagctggtgaaactggcggatgcccttaacggcgcgaaaaacatcacactgatgtgcggagccggatgtgccggggcacatgatgaagttatcaaactggcggaaaccctgaaagcaccggtggtgcatgcactgcgcggcaaagagcatattgagtatgataacccgtacagtgtcgggatgaccggacttatcggtttctcctccgggtattatgcgatggaaaatgcggataccctggtgctgctcggtacgcacttcccgtaccgcgcattttatccggccaaagcaaaaattatccaggtggatatcaacccgggcagcctcggtgcgcactgtgcggtggatatggcggttatcggggatatcaaagccacactcaatgccattcagccgcgcttacaggctaaagaggatcgcacccatctggatgcggcgctgaaacactatcagaccgcccgcagtgacctcgatgcactggcaaccgcaagcaaacgggaactgatccacccgcagtatctggcgaagaaaatcagtgagctggcggatgatgatacggtattcacctgcgatgtgggcaccccgactgtctgggcggcgcgttatctcaccatgaacggcaaacggcggctgataggctcctttaaccacggttcgatggcaaatgccatggcgcaggctatcggtgctcaggcacttgaccgcaaacgccaggtggtggcgatgtgcggtgacggcgggttcagtatgctgatgggggatttcatttccctggcgcagatgcagctgccggtgaaaattgtcatctttaacaacagtgtgctgggctttgtggcgatggagatgaaagcgggcggttatctgactgacggaaccgatcttcacaatccggattttgccgcgatggcgaatgctatggggatcaaagggatccgcgttgaagacagcgagtcactggacgatgcactgaaaaccgcgtttgcccatgacggtccggtactggtggatgtggtgacggccaaacaggaactggccatgccgccggaaattaagtttgagcaggccaaaggcttcagtctgtatatgctgcgcgcgattatcaacgggcgcggtgatgagattgtggagctggcaaaaaccaactggctgcgctgaataagcagagaaaaaatgccgcatttgcggcattttttttgctcagtacccggcggcgggctccagccgccacaggtgggcggccatcagggcccgccacggggcgaaatccgccagccattcctgtgtttcatccgccgttattttttcatcccgcgccagcaggcgctgcagattacgccgcaccgcaacatcaccgtgcagtgagccgttcagatagttaaagccgcgcagcagggcatagctgaccgtccaggtgccgatacctttaatcgccgtcagtgaggcggaaaccgcgtccgcattctccggtgtgaccacatccggcaacaccagcgctccgctttccagttgctcactcagtgccagcagagcattggctttaccgacagaaaaaccgcagctgcgcagcccgtcaaaatcggtctgtaaaatatgtgccgcatccgggtagcaccacagcccggaggagtggcgcaggccgatatgctgaatcaggcggcggcggatggaaatcgcggcctgaacactgatttgctgcccgataatcgcccagttaatggcttcaaacggtgtggcggactggtagatccgcagccctttctgttgccggataaggggaccggccagggggtgatcctgatattgtgtctcgaactcctccaccggctggatcagaccgagcatatgccgggcgagataatgcatacgggcttcgtcttccggcagtggccccgggccgtcagtgctgagggtgacacacgcttctcctgaactgatttccagtgtcagtaacgcgggatggccgtgcaggcaaatccctttcatcacccggttttccgtgacctcttcggccacatggtgattatcacgtaaatgaaatgcgagaaaatccgctgtatgatagggctcaggtaacggaacagtaatcgttaaatttttgttattattcaacttttcatacctcagaacagggcgggcaattgaccggattatagccgtttttgctcccggacgtacgattttggtcaaaatgtatatttacagaataataggtggattattctgaatgaactccgcatacaaaatgtggtacttatacgtatgaacaaatgagtttaatttcagcatattcattttttgcggttgtccgttttgcataaccgggacaaaagcggaggttattgttaccacaatgaatataattgacgcccgaagttctcatgttccccggaaggagcgttaagccggagattattacagcacagcagcacaacccagaacggataaaggcattaccgatggatataaaacaatattaccttgaggttgcggaaggtaaaggtaagaggatgacgtcggaggtagtggcattctctccctcgcggctcaacctggcagagttagaagagcgtctggcatcacaaacctttttcacacagggtgatattgaatacgcggaacatgatgagaacagcttttattacacctgtcattacggtgatgaagaactgctgtttctggtgtcactggcaccgcgggcaccggaactggaaatcaatccttactattcaaccgatccgctgtctgccggactgctggccgaagtcaatcagaccgagcaggacatttatgttgaatgccttttacagaatgacgtgctgcgaagttaccggtaccagctgaagatggtacagattctggtgccggatttattgctgggtatcgatatctcggcagccgggcgtggttttacccgtgagtggctcaattttcagctggaaaacgacgtgcagctgaacattgaatctctgtataccattcatgcaatctatgacacggaaaattccccgccgaccatgtactggttccacacacacggcctgctgcgctgcgggatcccggaagtggaactgctgctgccgcataccattaatgcgtactacggcattcctgatctgctgcgcagttttatcgggcagagtcttaatgaaggtaaagtgctgtttaatgagccgatgctgtgcggccagacggaaaaacagctggaatatattgtggcgctgccgtatcaggaagggatccgtcagatcaacaaaaataccccgatcgaccagctgaaacctctcgaagagatcgattactctcacgataatatgccggaaaatgaatttctcggcgatcgcggagatcgcgacgatcagcatgaccatccgtcctgtatgctgttccgtgtaaatgaaagttcgccggtgttacagacatttttccgtggcttcgacgacgatgccgccattatgttttaccgcccgaacagtgaaacccatgaaatggcggtaaaagcccgcctgcgctggcactattttgcccagatgtttgcggaatacggtcagccggtggtcaaaacgaaaaagggtctgctcggcggattattcggtaaaaaagcccgtgatgaggaggatgagcatccgtgggcatttatggtcaaatgcggcattccgtacggggatgaggatgacctggagcacatgtggtttatcccggaaactctggataatgacgtgtttaccggcaaactgatcaaccagccgttttatgttgaagagatgaaagagggcggcgtgtattcgctgaatacagcgatgctgactgactggaatatctatttttccggtgagaaatataccccggataccatttatcagctgctcagcccgtcacaggttcactgagaacagacggtcccggaaaaagcgctgaaatgaaggcgctttttttgtgcctgcgattttgtgcagtaacccacgttattaatacatactgaattatatcgttgctgctttttttttgttccggctataatcaatgatcgcctgttctgggtggttatatatcctgtaaaaacaataatctatcttataatctgttatgcattatctgtcatggagtgcattatgcctgatttgacgtcattgctcggatttgccctggttgcactgggaatggtattaacgcccggccctaatatgatttatctgatctcccgttccctctgtcagggaaagcgggccggatatatttctcttgccggtgtcggcctggcatttattttttatatgctcagtgcggcatttggtatcacagcgctcttttttgccgttccttatgcctatgatgctttgcgtattgcgggagcattgtatttgctctggctggcgtggcagtcggtcaaaccgggcggacgctctgcattttcggtgcgggatttaccggaagataagccgaaaaaactgttcaccatggggtttctgaccagcctggcaaacccgaaagtggcggtaatgtatttatcgctgctgccgcagtttattgtgccggggcacggcagtgtgctggtgcagtctctggcgctcggaacaatacaaattatgatcagtctgacagtgaacggactgattattctgatggcgggttcgggggctgtctttatgacgggccgcccattctggcaggtggtgcagcactggctgatggggactgtgctggccgggctggctgtccggatggcgctggaatcccggcgctgaggtgacaaaaaagcagaccggctcacaaagccggtctgtttcgtttccgttattgctcttcgcggcggagccactgctccacctgcagctgttcttcctgtgtgagccacattcccagcttggttctgcgccagagcgcatcttctgcggtgatcacccattcgtgctgtaccagatagcgcagctcggcttcatagaggttatggccgaataactgcccgaggtcgctgagggattgtgcatctccgatgatttttccggcctgactgccgtaggtgcgggccaggcgcagcgccaggccgttcggcagccatgaccagcgttctgtcagcacacgggcatagtcgtcacggctccggccgttcagttcaccgccggtcagtaccgcctgttttgtccatgctttcccggcgtgcggatagtaggccgccagtttatccagcgcgtgttcgcccagcttgcggtaagtggtgagtttgccgccgaagacggacaacagcggcgcctgtccgttgtcatcatgcaaatccagcgtgtaatcgcgggtgattgcctgtggcgagtccgattcatcatcacacagcggacgcacaccggagtatgtccagcggatatcatcgcgggtcagggttttgcggaagtggtcgttatacacatccagcagataattaatttcgttatcatcgattttaacgtctgccggatcgccgtgatattccacatcggtcgtgccgataatcgaaaattcatccatccacgggataacaaacacgatgcggtgatcttcgttttgcagaatataggcctgcggctcgtcgtgagcgcgcggtaccacaatatggctgcctttgataagacggataccataaggggacttgagctgtaatccgtcatcaaagaaggttttcacccacggtccggcggcgttgaccagcccttttgcctgccagcgcagggtttcaccggtcagggtattttccgcttccacctgccataagccgttttcgcgccatgcgcgggtgacttttgtccgtgtgcggacttcgccgccctgccgcacgacttcctgtgcattcagcaccaccaggcgggcatcgtccacccagcagtcggaatattcaaagccttttttaaactctgctttcagcggggaggctgtactgaaggtcaggccgcggctgcccggcagtgtggtgcgtttaccgagatggtcatacagaaacagccccgcgcggatcatccacgccgggcgcagatgcggctgatgcggcagacggaaacgcatcgggaaggcgatatgcggcgccatttttaataatacttcacgttcagccagtgcttcgctcaccaaacgaaactcataatgttcgagatagcgcaatccgccgtggatcagttttgagctggccgatgaggtggcacaggcgagatcccgtgcttccagcatcagcacagacagcccgcgtccggcggcatcagcggcaatacctgcaccgttgattccgcccccgataacgatcaaatctttcgtttccatcctcactcccgcatgaccacatttgttctttaatgttcgttatcgctcataatagtgcaatgtgaacgatattccaacattcaggacataaaaaaacgttctccgtgacatggataacaattcgttagcatatccatacaaagagtgatgaattaaggcagagggaaaaaggagaagaaccgcgccaccgggcggtggcacgggtagagataatcagcagacttcgagctgcacctgttgttcgtccaggattttgataatgctttccggcgggcgtttgtcggtaaacaggcaatcgatcagccccatattaccgaggttgaccatggcgttgcggccgaatttggagtggtcggtcacgagcatcacacagcgggagttttcaataatcgcccgtttggtgcggacttcgtgataatcaaattccagcagggagccgtcagtatcaatgccgctgatcccgagaatcccgaaatccagacggaactgagagataaaatcgagcgtagcctcaccgacaattccgccgtcacgggaacggacttcaccaccggccaggatcagccggaaatcatctttcgccatcagcagagtggcgacattgaggttattggtgacgatgcgcagatttttgtgttccagcagttcatgcgcgactgcttccggtgtggtgccgatatcgataaacagtgtggcaccgtccgggatcagcgccgcaacacggcgggcaatccggcgtttttcatccgaccacatgcttttacgctcatgataggcggcattcaccgagctggacggctgtgccgctccgccgtggtgacggtggattttattctgctccgccagctcattgagatcacggcggatggtctgcggactgaccttaaagtgctcgaccagctcttctgtgctgacatagccctgtttactgactaactcaacgatagcatcatgacgctgtgtttgtttcacaaaatcccccggtcagatcagtaccgcgcatattcagggctatgccgtgatatgcggcggtgatgtcatattttcattattattcaggccgtccggcggcggttatcccataccgccatcagcaggccggtcgcgagaccggatgcatgggccatgtttgcaatcggcattgtaccaaataaatcaaagtaaccgataaccagccataataccgaaaataccatcatggcggcgggcagataaataccggcggacgtattgcgcgcgcgggtgtaccagacataagcgatcagcgcgaaaaccacgccggacaggccgccgaaggatgagccgctgaaaaaggattgcgaccagcaactgaccagggcagaaatcagggtgatcaccagcagccgtccgctgccgagctgtttttccacctgaccgccgagataccaccacagcgccaggttcatcagaatatgggtcaggccgaaatgcaggaagaccgggcttacccaccgccacagttcaccctgctggtcaggctgcggccaggccagatagtccatcaccgcgtcagtgccgcttatctgcatccacagaaaaaccagtgcgcacagtacggtaatggtgatggtcagcggcccggccggggtcaccaggttactgaaggcatgagaggccgggtagcggaacggggaatcggtttcaccggattcccagctggcagcgagatagcgtttgttcatcggatcacgcataaaagtttccagctcagcctgtgtctgtgccagtttgctttcgtcgtcgagccacaattctgcgccgcgcccttcgcgggtggcacgcatagtgagctcaatatcccgggcggccatataatcaataaatgactgggcaatccgcgggttggcgatggtgatcagataaaccatatagctgtccgttgttaagcaagtgacctgactgtgtccgggtaattgcgcaaccaggcctcaaagccgccgttgatgctgtataccgtttcatagccgacattaagcagatactgagccgcgccctgactgctgtgcccatggtaacacatgaccataaccggctgctcataatctgtctgatccatgaaggtattcacggtgtcgtttgtcaggtgaaatgcgccgtcagtgtgaccggcacggaagctttgcggatcacggatatcaaccaggacagccccgttctgctgccagagttcatacgccgtatccggtgtgattaagcggatttgttccataatgatttttcgtatgcaggtgaatatcagcggtgacagagcaccgccggaaacccgcccggcggataaccgggcagtgtattatcacggccgtgcgatatccggccggtacagcactatcagtaataagagtgttcgccgcgctgatgttcagtcaggtctttaacgcctttcagttcaccggcaaacatattcagtaactctttttcgatcccttctttcagggtgacatccaccatggagcagccgttacagccgccgccgaactggaggatggcataaccttcgtccgtgatttccatcagggaaacacggccgccgtgcccggccagctgcgggttgatctgggattgcagaacatactcgacacgctcgatcagcggggcatcatccgccactttacgcattttggcgttcggcgcttttaaggtgagctgagagccgagctgatcggtcacgaagtcgatcacggcttcgtcaaggaacggcgcgctcagttcatcaacataggcggtcagctgctcaaacggcagcgcggtatcggtcgcttccacagcatcaggcggacaataagagactccgcattccgcattgggagtgcccgggttaataacaaaaacacggatttgtgtgccgggttcctggttggcaagcagtttggaaaaatgtgcctgcgcagcgtcagtaatagtaatcataacattgcccaaaaatagttgactgttccggttggttataatacgcccatttgcgggttcactacaaggtgcggcaaaggcaccacacccggactgccgccgcacccgcacgaatgagcaattcagacagcgctgtcatggtcgcccctgttgtgatgacatcatcggtcagcgcaatatgcagtccgcggacatcacgggtgacggcaaatgcagaggacaggtttgtcaggcgctgcgtgcgggacagcatccgctggctcagtgtagcacgggtgcggataaggccggaactgtcataaggacagcgcagccattttgccagcggacgggtgataagatcactctgattaaacccgcgccgccattgccggtagcggtaaagcgggacactgagcagcagatccggcttcggacattccccggcgcggtaagccgccagcacccggcgcagcagcagccgtgccagtgcacgggcaatgtgggtctgcccgctgtatttgaggcggtgaaccagggcggccagcggcggctgatagccggtcacggccagcaggctctgccacggcggcggggattgcaggcagcggccgcattccggctccggtgtcaccagcggcaggccgcagcgacggcagaccggcggcatctccggcagcccccgttcacagaatccgcagataccgtgtgcggcaattgccagcggctgattgcacagcaggcagtaattctcaataataaccatccgtcttccctccggataaataaggaaacaataacgatggcaacgcttttttggcagcagagcggacaaggttcgcgcgatcttgtgctgttacacggctggggactgaacagcgaagtatggaacagcattgaattgcggctcgcaccgcatttccgtattcacaaggttgacttgccgggttacgggcgcagtcaggaatttggtgaaatgtcactgacggagatgtcggataccgttttcgcgcagatgccggaaaatgcggtactggcgggctggtcactgggcgggctggtggctgcggatattgcactgcgttacccgcaggcagtgagtcatctggtgacaatctgttcatcgccttgttttggtgcacaggaagaggaaggctggccggggatcaaaccgacggtgctgagcggctttcagcatcagctggcgactgattttcagcgtactgttgagcgttttctggcattgcagacactgggaactgcaagtgcgcgccaggatgcccgcacactgaagtcagtggtactggaacagccgatgccggatgtgtctgtactgaatgccgggctggagattctgagaaccgccgatctgcgcagcggactgtcgtccctgacaatgccgttcctgcggatctacggttatctcgatggcctggtgccgcgtaaagtcgcgtcactgctggatgagcaactgccgtcctcaccgtccgttattatgcgtaacagcgcccacgcaccgtttatttcacatccggatgagttttgtgaggtactgacgggatttgccggctgataatcagaaaaaagccggtcagtttaatcaccagccggcttttgctgaattctgattcagatgaaggactcagctgcggccttctgctttacgctgcgccaggcgtgctttaagtgatgcggcactgaagactttgccctcagaagagcccgatgttttaacggcgactcccggtgttttattggctgtctgattcatgcggtatcttcctttggcggtctgattattttttgcactataacgcggagcagaattatcgtcaaaaatttttgattcaaattctaattcttttgcatattgtttttcttcatcaatcatcatggttatcagttcagttaatgcttttttattttcaaatctctcagcgatcttttttattatacgatcatggtaattattaatttctgatggttttatccagttaagttggttatcaataataccatctccgtaccatattatttttgcaatatttccgccggagcatttgtctgttttaaaggcatatttcatacttcgtgtaagaagatgcagtccatgttttataaactgatagtgattacctgactcattaattacccggataccggtaataaatgattgtatggcactggcagaaccggagcctgcgccgtaaaaaatgtggccgttttcttcattgacggatgcattctgtgagtagacaacccgtccgtcagtgcgatctacctctatgatctcacattcatcgttatcaatttcagatatttcggccattcgttctgcgtattcttcatctacaccgagggcggatgtcagatatgaggccagcgtcgctaatatcggattaatatcaccggaaaaaaacaggatgctgtcattaaagacatagaattttttaaagggaggtttggcaggctgatcaaattgatctgtccagcgctcatccactgcagaaaaaacagtttcttttgatattattgttgtcatctttattttattgtttgtgagcagaaaacaataatattttatattctgagaaaaattgatgctatttatttcggatgtcttaataatatgaaatgtcagtgcttatttttaataaaaaacgaatcatttaattaaaaatgattcatttcaaattattgttatgaacggatctgatacacctttgtgtcgcagccctgactttccgggcactgtttgcagctgctgctcaggcaactgctgacatccaccgcttcgatttttcccatagccgccagtttttccatgatggcctgcaccagggcttccggggcattcaactggtggctgagcagccgggcgtcagcccggccgttcagtgcaatggcgtcacgtactgcgatcaggctgatcatgtccgtgtccttttatcagtgacactcgttgccggagcagccgccacagcggctgtgtgcatcacggcggaagctgagattcacccggctgcgtgtgcggcgcagcagtgcaaacaggatcaggttgaaaatcaccactacagcgataatcaccgaactgctgcccggatgcgcactgaatgtggcggcctggtagaacagggcggccagtgagtaagccacgttcagaccccacaggatggagaaggtcatccagccgcggctggtttcacgggcgatagcccccatcacagagacacacggtacatacagcagcacaaagatcagatagctgtaagcagcaacatcagagccgaatttcgcggccatggtgcccatggtgccgccgtccatctcgccgtcgcctttgctggcttcaatcgggttggataatgccgcgaacgtgaaggtatctgccagagaatccagggtttcattcaccgcatcacccagttcaccccataaatcaaaggattccggatcaaacggttcgttggtgatactttcggcggtgtagagggtattcagtgtcccgaccaccacttctttcgccattgcaccggtgatcaggccgacagtcgcctgccagttatcattggtgacaccaatcgggctgagcagcggagtgaccactttactgactgaggccagtgcggaatcattaatgctgtccgccggtttgccggagaaactgaagctgttcagtgcaccgattaccatactggcgacaataatgactttacccgcacgcaccacaaagcctttcaggcgctgccaggtctgcataaacagggttttcatatgcggtacgtggtacaccggcagttccatcacaaacggtgatgcttcgccgcgcataatagtgtgcttgagcagcagaccggtgaggatagccaccacaatcccgaggatatacagggagaacacaatgctcgcgccgtttttgccgaagaaggcagcagcgaacaccgcgaagatagccagccgcgccccgcaggacataaacggtgccatcaggacggtgataagacgttcacgcggggcatccagggttctggcacccataatggacggtacgttacagccgaaaccgacaatcagcggcacaaaggatttgcccggcagtccgagtgcctgcatcagtctgtccatcacgaacgcggcacgggccatataaccggagtcttccaggaaagagaggaacaggtacatcatcccgatttgcggcaccagcggcagcacggtgttgataccgccgccgaccccctgggcgaggaatatggtcagccagtccgggaagccaagcgtcatccccagccattgtgtcccgttaatgaaaatagcttccgaaccgccttcaaacagcggctgcaatgccccgccgatattgatggcgagcacgaacatcaggtacatcacaaacaggaataccggtacacccagccagcggttgaggacaattctgtccatcgcggcggtcagtttattcggttcggaatggctgttatcgatggttgtttcgcagatatccgcgatggtctggtaacgggcatccgctatcaccagttccggctcttcctgctgctgtgcctgcatcgcatcgcggacagactgcacatgctccggggtgaaaccggcgcgtgcctggctgtagatatccccttccaggctttgcagtgccagccagcggcgctgtgtggcgctgaactcttccgcaggaatcgactgtgcgagagtgttcatgctgtcgagcagcgcagccggatagttcaccagcacttcatgcggtgtcattgtgtgtttgtcgatcgcggctttcagctcacagataccggacgcgcgggtggaaaccagcgggatcaccgggcagccgaggcgttctgacagcgctttgacatcaatattgatattcgctttatcggcgatatccagcatattgagggcaataatacagggaacacccagttccagcagctgcagcgtcagatacaggttacgctcgagattggatgcgtcgacaacgttaatcagcatgtccgcttcaccgctgaggataaagtggcaggcaatctgttcgtctaaggatgtctgttcggagatggtggtcagtgaataggtgccgggcaaatccaccagctcaatcttgtgttccggcgtggtgaaataaccgattttccgttccacggtcacaccggcccagttgccgacgcgttgtttggatccggttaactggttaaacagcgtggtcttccctgaattgggattaccgatgagtcccagggtgagtgctttcatagtgtcgtatgccaatcaataaatacaaacccctctgccggcggcagagggaaaagagtgagtcagcgcgggatgtgcggcggattacgcctgcacgtcatcaagcatcagcagcgccaggtctttttttctgagcatcaggttgacgtgccgggtttcgatttggatcggatcgcccagcggagcgctgcggatcacccggaaaacagagccgggcagcatgcccagagacaataatttctgacggtatgccgggctgatttgcccggaaaagcccagaattttataactgtgttgtggctgaagtgtcataaaggctccggttaaccatgcaaacaggaatgatattgcaaatgattatcgcacgaacagtttggcagaaaaatatcccttacaaatttaattgatactgtaaatgcaaatcataaccaacaatattttacctatttagcccgaaaattaaccagcaaagtttgatgtgcatcaagatatccggcgtataaaacaattgagagcagatatttcacgtattgatttacgttaataacaatttttacgactaattaacgcaatatgtgactaacaggagggaaatgtacgggcagccggggctgccgcgtacatgatagcaggggaattacttacgcttaccgaatgccgcggcgagggcatcacccatcgcactgttaccggcagagctgtcattattaccgttacgggcagggcggttgttctgacgcttttccgcccgtggtttatcgctgccgccgccaccgcggcgggctgccgtttccggctcctcatccatccgcatggtcagcgcgatacgcttacgggcgatatccacatccagcactttgacactgacgatatccccggctttgaccacggtatgcggatcttccacatagcggttggccagcgaggagatatgcaccagtccgtcctgatgaacaccgatatccacaaaagcaccgaaattggtgacgttggtgaccgcgccttccagaaccatgcccggacgcaaatcattcatggtttcaatgccatcggcaaaggtggcggttttaaactccggacgcgggtcacggccgggtttttgcagctctttgaggatgtcggaaaccgtcggcacaccgaattgttcagtgacaaaatcctgtgctttcagattgcgcagcacatcaccgttacccatcagatcactgagggttttttgtgtggcctgcaggattttttccaccaccggataggcttccgggtgaacggtggaggcatccagcgcatttttaccgccggcaatacgcaggaacccggcgcactgctcaaaggctttcgggccgaggcgcgcgactttcagcagctgtttgcgatccgcaaaacggccgttttcatcacgccagtcaacaatattctgtgcgatcactttgctcagcccggcaacgcgggtcagcagggcgacagatgcggtgttgaggtcaacaccgacggcgtttacgcagtcttccactaccgcatccagtttacgggcaagttgtgtctggctgacatcatgctgatactggccgacgccgatggatttcgggtcgattttcaccagttcggccagcggatcctgtaaccggcgggcgatagaaacggcaccgcgcagtgatacatccaggtccgggaattctgccgctgccagttctgacgcagagtaaacggaggcgccggcttcactgacaatcactttctgggctttgatatccgggaactgcttctgcacatcggcaaagaaacgttcagtttcacgggatgctgtcccgttaccgatcgccaccagttccacatggtatttcaggcagagcgccgcgacggatgccgctgctttggcagtctggccggtgtgcggataaatggtgtcggtggccagcactttaccggtggcatcgaccaccgcgactttcaccccggtacgcagacccggatccagccccatcgtggcgcgcataccggccggtgccgccatcagcaaatcactgaggttgcgggcgaagacattaatggcctcatcttccgctttttcacgcagcgcggccatcagctcggtttccaggtgcagcagcaccttaacccgccatgtccagctcaccaccgctttgcgccagctgtccgccggggcattgttaaagcggacgccgaggtaatcgcggattaactcttcgcaatagctctctttcggcggctcctcacactgcggggcagcattgagggagagttgcagaatgccttcattgcgaccacggaacatcgccagagcgcggtgtgacgggacattggcaatcggttcatggtgatcgaaataatcactgaatttcgcgccttccgcttcttttccgctgatcacaacggaaaccagatgcgcattgcgccacagataatcacggactttccccagcagaccggcatcttccgcaaaacgctccatcaggatgtagcgggcgccgtcgagggcggctttggtgtcggcaacccctttttcgctgtccacataggtggcggcgagggtttccggatcctgtgacggatcctgccacagggtatctgccagcggctccagaccggcttccgccgcaatctgtccgcgtgtgcggcgcttgggtttgtaaggcaggtagaggtcttccagctctgttttgctgagcgtaccgttaatcgcccccgccagctcaggggtcagtttaccctgttcctcaatggatttgaggatggtctgacggcggtcgttcagttcgcgcaggtagctgagacgggtttccagctgacgcagctgagtatcatccaggccgccggtgacttctttccggtagcgggcgataaaagggacagtatttccctcatccagcagggtaatcgcggcggtgacctggcgggtttgcgcattcagttcaccggcaataatctggctcagagattcattcatcatgatattctttccggctgcgataaattgacgtaaaaaaatttcaggggacagttatacttgttaaaaacgggaattcccagccgatataaagtaatataaatgaattatgcatagctgttatctttcagaaaatgcatttagtattacaatttatttaaataatttattttttgtttaggtaacatatggcaaaaagtaacctgattacccgtgaaggatgggatgcgctggatcaggagttaaaatatctctggaaaacagaacgtccgcaggtcactcaggcagtgtcagaagccgctgcacagggggatcgctcggaaaatgccgagtatatatacggaaagaaacgtctgcgtgaaatagacagacgcgtccggtttctttcaaaacgtctggataacttaaagatagtcgagccggatccccgccaggaaggaaaagtatttttcggggcgtgggtggaactggaaaatgatgatgaagaaattcagacttttcgcatcgtcggacccgatgaattttccccggcaaagaaatggatttctgttgattcccctgtggcccgggcattaatcggaaaacaggcggatgatgaagtaacggtaataacacctaacggtgaagtgaattatgtcattttgtctatccgctatcagccgattgctgaataggcacaattaatctgaagagttgcatgaaaaaatgaacccgggagtcaaacatgcaggaaagttataaggtccttgtcgttgatgatgacatgcgtctgcgtgcgctgcttgagcgctatctgagtgagcagggtttccaggtccgtaccgccgcgaatgcggaacagatggatcgcctgctgacgcgtgagtctatccatcttattgtcctggatctgatgttaccgggcgaagacgggctgtctatctgccgccgtctgagaagccagaataacccgattccgatcattatggtgacagcgaaaggggaagaagtggatcgcatcgtcgggctggaaatcggtgcggatgattatattccgaagccgtttaacccgcgcgaactgctggcacgtatccgtgcggtgctgcgccgtcaggcgaatgaactgccgggtgcaccatcccaggatgatgcggtgattcagttcggtaagttcaaactgaacctcggcacccgtgagatgttccacgaagatgaaaacatgccgctgaccagcggtgagttcgccgtgctgaaagtgctggtgtcacacccgcgtgaaccgctgtcccgcgataagctgatgagcctggcgcgcggccgtgagtacagtgcgatggaacgttcaatcgacgtgcagatttcccgtctgcgccgcatgattgaggaagatccgacacatccgcgttatatccagaccgtctggggactgggttacgtgttcgttccggacggcaacaaggcatgaagcggctgcggttctcgccgaggagcaccttttcgcgctcgttatttctggtcattttcctgttgtttgcaaccataacaacaagttatctggccgttgtgaacttcattgtgatgcccagcctgcagcagtttaaccgggtgctggcctatgaagtgcgcacactgatgagcgaagagatggtgctgaaggacggaaccgcggtacgtgtttctccggcgctgcgtaagaaaatttatgaagagctgggcattaccttttttaccgaaaagacagccgatgagggcggactgcgctgggcgcgtcattttgaatccctcagtaaacagatgagtcattatctggaaggctatgcggatgtccggctggaagtcagccgcgattatcccgtgctgtggctgaactcctatatcgccccggatgtctgggtgagagtgccgctgaccgaaatcggtcaggatcagttctcgccggtcttccgttatatttttgcctttctgctgattgtctttgcaggtgtctgggtgtttatccgctatcagaaccgtccgctgaccgagctggaatccgcagcccggcaaatcggcaccggcggtccgctggttccggtacgggaagccggggcggcagaagtacgctcggttatccgctcatttaaccagatgtccagagatatcaaaacgctggagcagtatcgcactgtgctgatggccggtgtcagtcatgatctgcgcacgccgctgacccgcatccgcctggcaacggaaatgatgaacccggatgacgattatctggcggaatccatcaacaatgatattgaagagtgtgacggtatcattgagcagtttatggcctatctgcgcaccggccgtgagatggagatgatgcatctggaactgacatctgtcctcaatgaggtgattgaagcgcacatccactcggatgtcacacttcagaatgatgttattcaggcaccggtttatctcaccggtaacccgattgcgattaaacgcgcactgggcaatatgctggtcaatgccacccgctacggcaacggctggatccgtgtcagcagcggcagtgatgaacatttcgcctggttccaggtggaagatgacggcaacggtattgatgaggcggatattccggatctgttccagccgtttgtgcagggtgaaaaagcgcgcagcaataaaggtaccgggctggggctggcaattctgcgccggattgtggatgcgcatgacggtaaaatcgatgtcggccgcagtcagcgcggcggattccgtatccgcgtgatgctgccgctgcctgatgacagagatgattaattattatgacagcagcatgtcatcgtcatatgactgtcataaacccctgcggtaagcgattatctcaggggttttacttttaatattaataaaatcataagattagagtcctgcctcgtttttgggttttcccgtcatttttccggttttgtgtccccgcgcacctgcagtgtcataaaactgtcatataacctacatattattgtcaccagattgtcctattttccctcatgttccgacattaaccagatacaacgtttatcgtcattatctataaatcccgtcaggagggatcatgaaaccgatgcgtaccgcagtagccactgttatggcagcgacactttctctctctgcattttctgcatttgccgcgaccagtcttaccggggcgggtgcaacattccctgcgccggtgtatgcgcaatgggctgatacttaccagaaagaaaccggtaacaaagttaactaccaggggattggttcctccggcggtgtgaagcagattgtagccaataccgttgatttcggggcgtcagatgcgccgctgtccgaagataaactggccgcagataatttattccagttcccgaccgtgatcggcggtgtggtgctggccgtcaacctgccgggcctgaagtccggtgaactggtgctcgacggcaaaaccctgggtgatatctacctgggtaaaatcaaaaaatggaatgacccggcgatcaccaaactgaacccgtcagttaagctgccggatcaggatatcgcggttgtccgtcgtgcggatggttccggtacctctttcgtcttcaccagctacctgtcaaaagtcagccctgactggaaagagcaggtcggtgcaggctctaccgttaactggcctgtcggcctcggtggtaaaggtaacgacggtatcgcagcattcgttcagcgtctgcctggctctatcggttatgtggaatacgcctacgccaaacagaataaactggcttacaccaagctgatttctgcggatggtgatgcagtttccccgaccggcgaaagcttcagtaacgcagcgcgtaaagccgagtggtcaaaaagcttcgctcaggatctgactaaccagccgggtccgaatgcatggccgattacctccaccaccttcatcctggtccacaccaatcagaaagatgccgccaaagggcaggaagttctgaaattctttgactgggcatacaagaacggcggcgagcaggcagaaaaactggattacgctgtactgccgaaagaagtgattgaacaggtccgtgcatcatggaaaaccagtgtcaaagacagcagcggtaagccgctgtactgatacggcagatgatgaagtaacgatttatcagtaattgatccccccgtaccggggggatctgtgtaaaaacggaagcgactatggccgaactgaaaacggcaatgaaaccaccaggcaaacgcggcgaccaacttttcagtgctctggtaaaactggcagcgctgattacgctattgttacttggcggaattattatttcactgattattgcgtcatggccgagcattgaaaaattcggcttaggtttcttatggaataaagagtggaacccgccggcggaagagtacggggcactggtaccgatttacggcaccatcgtgacctcggttatcgccctgctgattgcggtcccggtgagtttcgggattgcgctgttcctgacagaactggcaccgaactggctgcgccgtccgctgggtatcgcgatcgagctgttagccgctattccgagtatcgtttacggcatgtggggactgtttgtctttgccccgctgtttgccacctatttccagcagccggtcggcgaggtgatgtccagcatcccgattgtcggcgagctgttctccggtccggccttcgggatcgggatcctggcggcgggcgttatcctcgccatcatgatcattccgtatattgcctcggtgatgcgtgatgtgttcgagcagacgccggtgatgatgaaagaatccgcttacggcatcggctgtaccacctgggaggttatctggcggattgtgctgccgtacaccaagaacggggtgatcggcggcgtgatgctgggtctgggccgcgccctgggggagaccatggcggtgacctttatcatcggtaacacctatcagctggacagcttctcgctgtacatgccgggcaacagtatcacctcggcactggcgaacgagttcgcggaagcggaatccgggctgcacacagcggcactgatggagctggggctgattctgtttgtcatcacctttatcgtccttgctatctccaaatttatggtgatgcgtctgaataagaaagaggggcgctgagatggctgaaatgaatattcaacaaccgaaagtggatatcagcgcacggcagaaacgccagttctggcgccgtcagaaaaaccgcgttgccctgtttttatccatgtccaccatggcattcgggctgttctggttaatctggatcctgttttcgaccgtcaccaaagggatggacggcatgtcgctggcgctgttcaccgaaatgacaccgccgccgaataccgaaggcgggggtctggcgaacgccattgtcggttccggcctgctgatcttatgggcgaccgttatcgggacaccgctgggtattcttgccgggatttatctggcggaatacggccgtaaatcctggctggcggaagtcacccggtttattaatgacattttattatccgcaccgtcgattgtggtcgggctgtttgtttacaccatcgtggtgatgcagatgcagcacttctccggctgggcgggggtgattgccctggcactgttacagatcccgattgttatccgcaccacggaaaacatgctgcgtctggtgccggacagcctgcgcgaagcggcgtatgccctcggcacaccaaaatggaaaatgatttcagcgattaccctgaaagcctcggtctccgggattatcaccggggtgcttctggcgattgcccgtattgccggggaaacggcgccgctgctctttacctccctctccaaccagttctggagtacggatctgatgcagccgattgccaacctgccagtcaccatcttcaagtttgccatgagtccgtttgcggagtggcagagtctggcctgggcgggtgtcctgctgatcacactgtgtgtgctgttaattaatatcgtggcgcgtgtgctgtttgcgaagaaaaagcactgattaaatgactgcggatgaatgagagagagtcatgagtaaaattcaaaacgtaactgaaagcaaaattcaggttcgtgatctgaacttctattacggccagttccacgcgctgaaaaatatttcgctggatatcgccaaaaataaagtcacggcctttatcggcccgtccggttgcgggaaatcgaccctgctgcgtaccttcaacaaaatgtacgcgctgtataatgaacagcgtgcggaaggcgaaatcctgctggatggcaccaatattctgaccgatacccaggatatcgcgttattacgcgccaaagtcgggatggtgttccagaagccgacgccgttcccgatgtctatttatgacaacattgcctttggtgtccgtctgtttgaaaaactgccgcgcgccgagatggatgagcgggtgcagtgggcgctgaccaaagcagcgctgtggaacgaaaccaaagataaactgcatcagagcggctacagcctctccggcggtcagcagcagcgtctgtgtattgcccgcggtattgctatccgccctgaggtactgctgctggatgagccgtgctcggcgctggacccaatctctaccgggcgtattgaagagcttatcagcgagctgaaatcggaatacaccgtggtgatcgtcacccataacatgcagcaggcggcgcgctgttctgaccacactgcatttatgtatctgggcgaactgattgaattcagtgatactgataccttgtttaccaccccgggcaagaaacaaaccgaagattacatcaccggtcgttatggctgatgcggagacaatcatggaaaatctgaatcacaacaaacatatttccgggcagtttaatgctgaattagagcatatccgcacagaaatgatgacaatgggcgggctggtggaagagcagctcagcaaagcgatcaccgccatgcataaccaggacgaagacctggcgcgtgaggttatcgccggtgacaagcaggtcaacatcatggaagtgatgattgatgaagcctgtgtccgcattattgccaaacgccagccgactgcgagcgacctgcgtctgattatggcgatttccaaaactatcgccgagctggaacgcatcggcgatgtggcggataaaattgccaaaaccgcgctggaaaaattttcacagcagcatcagccgctgctggtcagcctggaatccctcggccgccatgccattcagatgctgcatgatgtgctggatgcctttgcgcgtatggatattcaggaagctatccgcatctaccgcgaagaccagaaagtggaccaggaatatgaagggattgtccgtcagctgatgacctatatgatggaagatccgcgcactatcccgagtgtcctgaccgcgctgttctgtgcccgctctatcgagcgtatcggtgaccgctgccagaatatctgtgaatttatcttctactatgtgaagggacaggatttccgtcatgtgaaaggggatgatgtggaacgtatcctgctcggtgagcatgtgattgaagtttccgcgcacagtaataacggcgaaaaagggaatgatccggcataaccgggtggcttctccggcgatattgtctgtttttgtaaaagtccctgttctgatttgaccctggagttaactccggggtttatactttctgaaacagacaaaacagtgtttccggaggtgtacgatgggtttattcagccggttttttaacagcggaggcggatccggtcacgggaaccgcagcagcggtcatggcagcagcggtcatggcaacaagcacggtaatacgggttacaacaagcatggccgcgacaataatggttacccggagcagctaaacaacaatacaccgcagaatatcaccggatattgtcagaagtgcggtaccggttatctgccggacagccgcttctgcggccggtgcggtaatgcactcaatccgtaatgcaacagccggtcatcacctgaccggcattctcagttcagctttttctctgtccgcacattgcgccctttatcattaatgctgatcagtgtgacggactctcctgcagataattgcccggtgtatgccacccggttctctgaataaggggcgagcatcacagtgctgatatgtgacggcgcattatctccgccggagacgagcgcggataatgtgaaatagtaaggtgacgggtttttcagaatcagcgtttctcctgataaagagaccaaaatctgttccgggactgtatccggaggctgtggcaggtcatccggccggtaaaacagctttatccgtgtccgcagggcaaattgcaacgtattgccggtggtggccgtcttcgccggaatatccacgacattgagataaaaaaccgattcccggtcgcggggcaggctgttcttcagagcacggattttcagctgctgcccgccgctaccggctaaccgcgtcaccggcggcaccaccataaacggggcactgctggtttccggcgaggaattgatatccccctcatccacccagctctgcaccagtgacggtatgtccccgctgttggtcagctggatcgctgtattttcctgattgccgggaaaaatcaccctcgtggtattgatgacaacaccggcgtatcccgcctgcatgcacaggagcagaatgatcagaatggctgtccgcatcgtgtcctccggcggtttagttgtaagagaaaaccagagtcgcggaactgctcatttttccctgtgtcactgtacccggactgtagggatagtaatacgcccccatatcgacagagaaagccggtgaaaccgcactgcctttggcggcagtgaaaatactggtggcacttccctgagcattggcactgtcagaaaactgtaccgggctgctgagattcgttgcctgtactacccggaagccgacaccgcctgcaccaccggaaacggtattggtcagcacggttttatcggacggctgcaaattggatgacgacaggaacatggcaatattccgggacgcggtgttacccgggaggaggccgtcacaggtaaaattgaggcggaacggggtatatccggccttatcagtggttttaacggcgttgatactcatcagcggcagactgacggtcagcccggcattggtaaaggtgcaggtggtcaccggcggattgtaagtaatctgcaccggctgcaaaaacatgtcattcggatcgaccggccattgcagtgtcagtaaaaacttcacaagcttatcgagaagtgcggccagccagcccaccagtcccagcgtcgacgcatcagaggcaaaaatgaccggcgtgatggtgatgctattgcccgctactttggtgtagttgcctgtcggcgtggtgaccagatcaaaacgcagtgtgaaaccggtattgagctctgtcccgctgtgagtgccgtcggccagatttgtgacattcgtttttgccagtgatgtcagggtgatattaacgagttgtgtgccgttattaaaaccaatcgttgctgtccggttattaaaaggggagtttatcccgaccgtattcggaaacggctgcaataatacggtggcacaggtaaacgggccggtaaaattggtctgtgtcacttttgatactgtggtggtgctgccggccaggtcagatgaaatatccagcaccacgggcggagcggtctgggtggcggtgaccgtgcagttggcataagcggcccggctgctcatcattatcaggaataaaagtaatacagcggcggatgttttcatcattgtttccttttaccggcagatattgtggtttttatccggcgtcaccaccggattgcggataacacactgctgtttcccgtctgccgtcagttttatgatcagcgatgacggcaactgcccgcttttcagatagagcagcccggactgcccgacataccccagcggctgatgctgttcatcggtcacttctgtgccgaacggcagtgtgccgccgttttcccgcgctgcccgcagaatgaaagtctgacggggatcggtttccatacggatataactgaccgcacctttatacgggctgacctggccgatattgccggtcacttcggcaccggaacttttttctgtgtctgacagggtgtaagaattggcgcggtaaggaacggactgtgtcatcagcaccacaccatcactgtttgtcagggatgctttatcggaattcaccatccggttaccggcctgcggggcatcaataatggtataggtattgccggtgtcgccggacatggcgatgtggcccgggatcgcgacgatagttccttttgccccggcacccgcctggcggtaatcgttaccttcactgaatgagccggacagggtgctgtacgggttgcggtaagtgagattcgcacccgccagattactgccgccgttctggtttgagccggtcagcgtgtagttaaccaaatcatctttaccggctgtgccgctcaggctgacagtggcctgctgataacgggaatccgtggcgtaaataccgctgctgagtgatgcactcttgccgaaaacagaaatcggcacgctgacgttcaggtaaaaccgggtttcgtttttgtcatcaaaattgcgggtgcgtgatgcagacacggtatagctgatctcgttataactgtttgaatatccgagctgatattcccggttgctgccgccggaattccagtaatcccggtgtgtgccggagatataaatcaccccccggttttcccccagatactgatttaaattcacggtgaaggtatttttagcccgtgcaccgcgcatggcatccattgtcatcagatccggtatctgacgcggcgtgttatcggtgaggttttcctgctcattacggtaagcatcccacgcccggtagttatcctgctgatagatagcatcggtgaaactgtaaaaattcccggtggagtagcggtatgtcgcgagggtcaggttggtggaggtggtgctgacaaacttactgtaggcgatacggtagctctggccacttttgcggccggttttaaagtcagcgtccgcctgtgtcacatcaacagaaagcgcaccgaacggcagattccaggcgcttcccgccagaagagagcggtaatcttttccggcaatcccgccggtatacagtgtcacggtattattcagcccgtaacggaattccccctgcacaaactccgggcggtagtgtgtattatccagtcgcgcctgaccggcggtcagactgtaattataaattccctctttcagcatatcgggcacggcggagaaggggacggtaaatgattctttccgtccgtccgcttcctgaataatgacagaaaaatcgccgctgccgccggtcggctgaatatcacggaacataaactcacccggcggcacgttttcctgaaaaataagattgccgttctggtaaatactgacgagggcgttagtctgggcaacaccccggatgatcggcgcgaatccctggccggacggcggcagcatattcatatccgttcccagtgatgcgcctctgaatttaaaactaccgaacagagaaggcggggtataaaaatcccccagtgtcagtgcagataaaatacggctgatcggacgataaaggtaacggctgttatttttccagcctttgtgtccgccggagtaagcggtataaaccgattcatcgcggaattgccagacaccgaggttcagtccggagtttaccgtggcaaaaaagctgtcattgctctgtttgttattctttttttgtctggcgttatagtaattgacgttatagccgagaataacggcaggctgcccgtgatcccataattccgggtcaatataaccggcatcggcggtctttaccccgatttgcggcacggacaaatctaaccgtaatgtacttttattcaggtgataagtcagtccgggtgtcagatcatctgccggaaccagctgtttctctgcggataattttttcgcatcatcagaaagattcagcccgagcttattaatatcctccggctgaaaactcagggcattattatgctcccccacctcaaccgtgaactggcctttccaggtgttattaacataaacgtccatcagctgatcgccggacggcagagtattttcctgatataaacgtgaaatatcccctttagcggattcaccggccagcagggtggtatcgaattcttccgtgaagccttcgcggggatagctccataatccggcaataatcagaatcggcaggcagtgttgtgttttcacgttattatcgtccgtcagaaggtaatattcttcgacttatacacaccgtaatcatccacataggtcactgaggcattacgggccgcgggtttatttttcagtggcaattgtttctcagaaaagggcgggatcatttcggaggcggccagccaggtgtggctgctgtcattggcattgaccgccgcaatggtgaaatgatacggggaattattggtgacggataaatggtcaccattgagcttccactgaatattatcaataaccgtttccggatttgccgtcagccctgcaggacggtaaaacagctttatccgtgaccgcagggccacctgtaacacactttttcctttggcattggcggggggggccggaatatccagcacactgagataaaagacactttcccggtcatccggtaatttttcattatttttctttattttaagctgctgtccctgcatcccgtctattttgacaatcggcggataaacataaaacggcgagctgctgttttccggtgtggcattaatatcaccgtcatctgtccagctctgggctaatgatgatgtctggctgttattattcagctgaacagtaatgctgtcattttcttcatgataaataagccgtgtcccgttaatcacgatattggcggcggcattaccggacaaaataagcatcatcagaaaaaagaatcggcgtttcattatattcccctgtaaacagtcaggctttttgacaagcctgactgtctgacaatggttataaataagagactgtataaatcacgttggaatgtacaggcccgacttttgcaggagaggtattggttttgtaataactggcaattaatgtcacctgatccgatgctggtgcggttttatctcccttcactccggtgtcatacgccgcattcagtgaaagtgccactgacggtgcggttgttgacgataaactgaacccgacatttttcgcgacagacggatccccttcattaacggtatcgttaatcaggtagtttccggttgacgatatattgttgggggacgcgaaatgtattttcaggttacttccgggcgggactgaagcaggtgcacaatcagagaatgtcatggtaaatgctttctgatttttggtaatgacggtatttgcggttaccccggcatccgttactgtaatcggatctaataatacggcgaagtcggcgctgttacctccgttaatggtacaagtggtatcactgatagcacctgtgatgtttataattccgcccgcagcagtgactgcggacgctgagcctgaaaaaaaggcggcagaaactaatgccgtaataagcgttttctttaacatggttaactccggtaaaaataagataccagactgacaaaaataagaggctatttttgcgtattttcatttaaagagactaataaggatcagtctctttaaatctagaatcattaggtatatttaccagttattaattttgaattttacagatgtgtgattattgtcaagatttataaattttcatttccagaatttgtattttttcataagttagaattcattttttattttggtggttccggaaagataaatatacagataacaggatgtgattgtttggtaagggattgctgatgagtaatttctttctgctattaattttaattaacggctgtaagagttgttaagtttctcttatcatgatcaggaaatgttttcccgggaaaaataacgcatgattttatttcaacaaataatcataagtaatgtaattaatttttttaataaaaatgaatgaattaaagataatagcttgttattgcaaaatgaggctctgcccttgtgttcatcttagaacaatcagttatggaattattctttcttagtatttcaggaactaagcaggagttgatagcgtgagatggtgatttacacaaattgacgttttccgtgactgattccaggggtgtgtatgaaaccgacattatttgttccggctctgcttgccggtttagcattagtaagtggtacagcacaggctgataagcttgatgatattcagaaagccggcgtgatccgtatttcggtttttgacagcaacccgccgttcggatttatcgatccgcagaccaaaaaactggccggttatgacgtggatattgcacaggccgttgccgatgacctgggtgtgaagctggaactgcgtccgaccaacccggcaaaccgcattccgctgctggtctccggcaaagtggatttaatcggggcgaatttcaccattaccgatgagcgtgcgaaacaggtggatttctccatccctgattttcagaccggacaaaaatttattgcccgcaaaggtgtgctgaaaaccccggaagatgtggcaaaactgcgcatcggtgcggataaaggtaccgttcaggaagtgacgctgcgcgagaaatatccgggcactaaagtgatttcttacgatgataccccgctggccttcgcggcactgcgtaatggtaacgtcgatgctatcacgcaggatgatgccaaactggtcgggttgctcggtaacctgccggagtcagtaaaagcggagtttgaactctctccgttcagtctgacccgtgaataccaggcgctggcggcaccgaaaggggaaacccgtctggtggaagcggtgaacaaaactctgctgaaactcgaaagtgagggcaaatcacagcagatttataaccagtggtttggtccgggtaccaaagccgaacaaccgcgcggtgaatttaagttcgctccgctggctgatcagccgaagtaatgtgagtgtgttttctgaatcaggcctcactccggtgaggcttcctgcatttgtgaggtaacagacgggattagcggatgtttgagcaatttataagtgcgcacttacttgcgccggaatatctgggatggctgtggcaggggtttgtgatcaccctgcttatctcattctggacgattctcgcggcgacactgctgggttttctgctggtggccgggagggacagtcagctcgcaccgctccgctggttagtcagtgcttacaccagtgtattccgtaatacgccgctgctggtacagctgtttttctggtatttcgcctccggggaaatcctgccgcaggcgctgaaaatctggctgaatacgccgcatgaaattgaactggccgggctgacactcgcatggccgtcatttgaatttatcgccgggtggttcgggctgacactctattccgcgccgttcattgcggaagaattacgggcggggattgccgggatcggacagcagcagaaatcagccgcacttgcgctcgggctgacaccgtggcagtccatgcgctatgtggtgctgccgcaggcggtccggatcgccatgccgccgctgctcgggcagtatatgaatgtggtgaaaaactcgtccctgactatggcgatcggtgtggctgaactctcttatgcatcgcgtcaggtggaaagtcagtccttacaaacctttgaagccttcggggttgcgacgatcctctatatcgccattattgccgtaatggaagccttcgggcagtggcggacacaacgggcactggcacaggggcattaagatggatttttccgtaattcgtgataactgggaatacctgttgttcggcacttttccggacggtccgctggaaggtgcggcactgacgctggtgatcagcctgattgcagggggcatttccgtggtgctcgggactatcggcggggtgatgctggcaatgctgcgcggctggtgggtaaacctgtttgcggcatttctcgggtttttccgcgcgattcccatcattatgctgatattttgggtctatttcctgctgccgatcgcctttggtgtggatgtgccggaaattaccacggtcgtctgcgcactggcactggtgacctctgcttatatcgcccacggtgtgaaggccggtattctggcgatcggcaaagggcagtggcaggcggggatgtctctcggtttcagccggtgggaagtgctgtggcatattgtgttgccgcaggcgctgcggatgatgatcccctcctttattaatcagtggattgcgctgattaaagacacctcgctggcctatatcgtcggcgtgggagagctgtcgttccttgcgtctcaggtcaataaccgcagtatggtctacccgacagagattttcctgtttgtcgcttttatctattttgtgatgtgttccgggctggaactgggggcaaatgcgctgatgcgccgttattcattacagcggcagccccgtcagtcgtggcttgcccgtctgtttggccggggaagagagaaaccggtgcggttgtcagaaaaaccggcatcctgttcatcataagtttgatcagtaacaatcccggtacggttaatggccgggattttcccgcaatgaaacgcaaacgttttctttttgaaaacgatgcggtaggataagccgaaaaaaacaaatttccgggacttcttattcatgactactccgacttccggcactgatcctcatcagggcctgctccagcgcgtgttcaaattacaggaacacggtaccactgtccgcacagaaattattgccgggctgaccaccttcctcaccatggtgtatatcatttttgtaaacccgcagatcctctcgttcgccgggatggatatcaaagcggtgtttgtcaccacctgtctgatcgctgccatcggcagtatcggaatggggttatttgctaacctgccggtggcggttgcgccggcaatggggctgaatgcctttttcgcctttgtggtggtgggtgcgatgcactactcctgggaagtggcgatgggtgcgattttctggggtgcggtcgggctgtttatactgaccttactgcgcatccgttactggctgattgcccatatcccgctgagtctgcgggtcgggatcaccagtggtatcgggctgtttatcgccatgatggggctgaaaaacgccggtattattgtgcctaacgctgaaaccctggtgactatcggtaagtttaccgatcacagtgtggtgctgggtgcactgggcttctttattatcgccattctggctgcgcgcaatatccacgctgcggtgctggtatcgattgtggtgacaacctccatcggacttttcctcggggatgtgacctacaaaggcgtgtttgatgtgccgccggggatcacctctgttgtcggccatgtcgatattatgggtgcactggatctatccctcgccgggattatcttctcgtttatgctggtgaacctgtttgactcttccggcaccctgatcggcgtgacagacaaggccgggctggcggatgaaaaaggccgtttcccgaacatgaaaaaagcgctgtatgtggacagcatcagctccgtcgccggttctgcgatggggacgtcctctgttaccgcatttattgaaagtacctccggggtttctgtcggcgggcgtaccggcctgaccgccattgtggttggcctgctgttcctcgcggctatctttatttcaccgctggcgtcaatggtgccggcctatgccactgccggggcgctgatttatgttggtgtgctgatgacctccagcctggtgcgggtaaactggaatgatctgaccgaatccgttccggcgtttgtgactgccgtgatgatgccgttcagtttctctatcactgaagggattgcattagggtttatcgcttactgcgcaatgaagctgggaaccggccgctggcgtgaactgaacctgtgtgtggtggtggtatcactgctgtttattcttaaaatggtatttgtggacgcctgattcagatctgtcagaacagacccccggcagccggataatccgccaccgggggttttttatatccggctcaggagcggcagggggacgggatcacccggtgcgccatccgctgtgtaaacagctgattatgcgaggccacaatcatcggcagatccagttgtgtaagaatatcttccagacgctgaatatttttctcattcagaccgttggtcggttcatccagcagcagaacagacggcgacattgccagcacaccggccagcgcggtaaagtttttctcaccgccggaaatctcagtcacagcgcggtctttcaggcggacaatatccagcatttccaggcactgcaaagcacgttcccgtgctgcatcctgtgacattcccatattcagcgggccaaacatcacatcatccagcacacccgggccgaacagctgatcatccggatgctgaaacagcaatcccagcgggccgcgcacctctgtgaaatcatcctcggaatgacgggatttaccgaaaactgaaatatccccggtgaacgggataaaacccagcagtgtgtgcagcagggtcgatttcccgctgccgatatcaccgcacagaaaaagccgttctccggcgttcagttcaaagctcagatcctgaattatcggcgcattgttgcggctgacaaccagattgctgacctgaatcaggggattttgggacgtcattaacagacctttttgtattaacagaagacggacgcgcgtaaaaaccccgggctttcagcgccatttcagtggtttccgctttgtgcatggctttgatcagcagcagggcgaccaattgggacaacatggtaaatgtccgtttattcatccctttgcggaatccccgggctttcatggccgtttcaagctgttgtttggtttcgctgaaaattgcgatatagcggatcgtcagaataaacagctttatcagcttgtcgggcagagggtaacgtttcaccgcacacgccagatcgatatctgtcatgtttgtcagcatcgcagagacaaacagcagaatcgcattcattttcagcgtgatttgcagggcgagaaacaccccggccggcgactggacaataccctgactctcaattttccacggcagtgtcagccagacaaacaggataaaaatattcagtttcagcaccgtcagcagtgaacggcccaactgacggcggcggcagacaacaaacagcagaaaagcacccgacagaccggcgataagccagtcggtctgccggataccgctgagcaggaaagcccagagaacagcaagaagcaggcgccggtgaggaggcagccatttatccataggtatgctgtccgggctgattgaccatcagggaggccggacgcattttggccagcgccagcaggatcccgacactgatcagggaatcggtgacaaaaatcggcaggtgtccgataaacagcagccagaccagatcgatataggatttaccgctgtcgagcaccagtgccagcgaggtcaggcacaccgtacccagcgtaccgataaccccggccattaccccgagataaaccagacgtccctgactcagtcccggacgcagggaattccggaacaggtaatagaccagcagcgccgggatagagatattacacaggttaaccccgagaaccgcgaagccgccgaaggagaaaaacagcacctgcagcgcgagggcaatcaggaatgccgggaaaaccgcccagccgaggaacaatccggcaagtccgtttaagatcagatgcacactgctgaccccgatcggcacatggatggtaccggcaacaaagaatgccgccccgaacagggctgccagtgacagacgcgaggtatccagttggcggatgccgatggcaaccccggccgcagccaccacaccggcaccggccagaacaggaagatgtaatacgccttcagataaatgcatggtcttcctcctgttatgcggcgtttttagcggcctgctttgttaattcacgggcacggaagaatgcaatcacaccgaaaatacccacgatatagcccacaccaccgagaatattctgcagatagattttattcttcagctggtcaatatcctggcggatctgaatataaccggaagaagaatcactgctgccggtgttggctgcagcggaaataaccggcacttccgtttccactttgtgtccttcatcaccttcaacatagagaatataatcaccggtcgccgggacttcgattttgaaataccctttttcatcagtcttaccggatatttcatcatcttcgtggcctttcagatacgtaccgacataagtatcttttgccggagacatatcagaataataagactggccgctgatcacatttccttccagctgtgcaaccacatgcatggagtgagcttgtgctgttgttgccaacagcaccccgttaatcagtaaaatggcaaataaataaacagatttcataacgtttaattactcagcgtcaaaagataaaacatattccagctgctggaatccgtactctttattatccggtgtatccagtttgtattcggcgtaaactttattggcacctttttcagctttgaattttgccaggccgtctttgttggtcagcacacccgggtcttcttcgcttttggcgattttcatgccttccagcggctgaccatctttcagggctttgatctcaaactcctgaccggccaccggtttagtcatcggtaccagctcataaggggtgttaaagacttttgtagcgttgtcatcccacttaacgatgtttttgctgaatttaatcgggttcttgctgaactctgcatccggcacttcaattttatttttctcaacggtgcggccattctttaatttactccagacaccgttgtcgtaacctaataatataattgacgcattctcaggcataacaaagtaagcttcgccatctttaaaggtggtactgacggtttccactttaccgtcatgcattacagcctgaaccggttttaatttattttccggatatttttctgtcggattatgaccaaaacggacaacataatcagagccgtcagtttgttcaatccaaatattgtgcgcatttgcctgaaaactaccaaataacagggcggctgaaattaacgtcattttcttcagagacataaaaatacctttcgattaagttgcgggattatttatggccgagtatagaggagtaaaaataaaaataagaccttaaattcagaagaataattaatatcaggaatagctcacagtaaattgttaaatatttatttaccgcaaacgttttttttaatggtcttgggcgggttgttaatctattgcgtgagggttattttttgtctctgaaatgttatgagtgcaatgaatattcgttgaatgaatatttacaggatttaaatgccactttatgacgtatttttcaccgtttgccagcggcctcagtggatcattctgatgaataaggaaaaccgggaagccagccggatatcataaagaaataattgatataaactcataaagtaaaaaagttcttgataggagatcaagaactttccgggaaaacatgtaacaacttatccgcgccggatcaacaaaacgccgctttccatgtgcggggtgtacggaaactgatcaaacagcgccagccgcacgacatcatgtgtctggttcagtgtttccagattttcacataatgtttccggattacaggaaatatacagaatccgctcgtagccctgaaccagtttaacggtttccgcatccagtccgctgcgcggaggatcgacaaaaatggtattgcattcataagaggacagatcaatccccgccaggcggttaaattcacgcgcgccctgcatcgcctgtgtgaaatcttccgcggacatacggataatctgcacattatcgatatggttagcatcgatattatattgcgcggcagctactgacggtttggcgatttcggttgccagcacgcggcggaaattacgtgccagcgccagtgagaaattaccgttaccgcaatacagctccagcaaatcgccctgtgaaccttctgttgcggcaagtgcccactccagcatatgaatattgaccgccgcattcggctgcgtgaagctgttttccacctggcggtagatcatctctttacctgcgaccggtaatacttcatcaacataatcattatccagcatgatttttgttttagaggcacggccaatcagctgtaaatcaaaaccctgtgactgtaattgtgaccgtaatgttttagcggcctctgtccagctgtcatcgagttttttatgatagagcagggaaacaataattttgttgctgcgtgtcgacagataatcaatctgaaaaagtttatgacgcagaagatgagtctgtttcagtaacggcaaaatggcctgcatcatgtcattaatcagctggctcgcggccgggaaggtatcaatccggatacgctgtttggtctgctgatcaaacatgatatgccagaggtcatccccttcatgccagatacggaattcggcgcgcatccggtagtgtgaaactggtgaggcaaatacgtgagcatccggcgcctgaaaaggctgcatcattgtttgcagatttcttgccttttccgcaagttgttcttcataattttcaataggtaacgtgttatgcatggcgcgtcgatccgttttgctgatcacaaaaattgttcgtgtgtttatgaataaagtgtcccgcccgacaattcagatatcttactctggacaggttttaaaaccggatcgtagcatgataattcggtttcttcataagaatgaaaagggaatccggtgaaattccggaactggcgcgcagcggtaatggtaaaagcaacacgatgacactgttataaatgacgggaagtcgttgcggggaataatgtagtaccctcctgagtccgaagacctgccgaagatttgtcgtccgttctgctgacgctacaaagcagacgggtggcatcctctttatatatatgtgggtgctcaggaaaaaatgaaaatgacctcgccttatgcgctgtccgctgtcggactggccgtgttttccgcgttatcgtttagcgcttctgctaatactaatgatgatcagataattgtttctgctaaccgcttccagcagccggtttcgtccgtgctggcgccggtaaccgttgtgacccgtgaagagatagataagtggcagtcgaattctgtggcagatgtgctgcggagactgccgggtgtggatgttgcccagaatggtgggcttgggcagaccagttcggggtttngtttgtcagggggacggatgctcgtcatgtgatgattttagttgatggtgtccgtctgaatcaggccaacgtatccggtagttcagatatcagtcagattccgttatcgatggttcagagtattgagtatatccgtggaccccgttccgcggtatatggttctgatgcggttggtggggtcatcaatattcttacagaacgcaaaacagagggaaccacactgaatgcaactatgggatctcatggttatcaggaatacgatgcttcgacacagcaaaaaatcggtgacagaacaacgatcactgcagcaggaagctatttttatacgaaaggatttgatgttgaagctaacggtaataccggcggtgctcctcagccggatcgtgacgggtttatgaataagtccctctggctgggggtaaaacatcagataaatgataatgttgatatatatgccagagcgtatgggtttgataacagaactgcctatgacagtgctgaattcaacgatgcgctggttgatacccgcaacctctacaccagaacgtatgacggcggaatttcatatagcagcggaatctattcttcatttctgaattacagttataaccgtaccaaagattacaactatgacccgcgccatggtcaatacggtaaagagcaccggcttacagatactgagcagcagaatgttcagtggggaaaccatgttcaggtcggaaatggatctgtcagtggtggtgttgactggtcgcgtcagaaaatgatggacggttccagtgattttacaacggcggataaaaattatttcgataacaccggtgtgtatttaacaggacagcaaggactgggtccggttatcgcagaggcatcaatcagatctgaccatcattcagattatggctggaatacaacatggcagacaaatgtcggctgggagtttgcggaaggttaccgggtgatcggcgggtacggcacggcatttaaagcgccgacattaaatcagctttatagtgcgtggggcagtaacccggacctgaagccggagaaaagtaagcagtgggaaggtggatttgaagggattacagggccgctggaatggagattgactgcataccgtaatgacattgatgaattgattcaaagcgaatcaagttatccgtatcaaaactataatgtcggagaagcaaaaatagaaggtgtggaatttaccggtgaaatggatacctggattttccatcccactttctcttatcagtacattgatgcgagaaacggaaaaactcatgaaagactggaacgccgggcaagacaacaactcaaatatcagctggactggaatattgaggagtgggatctcggcctgacctataattacattggccagcgtactgataaagattacggtacttttgatcctgcaattaacggttataaacctgtctctatgggcggtgtcagtctttttgatgtgactgctgcatatccggtcactgaccatctgacaattcgtggtaaagtagctaacctgtttgataaagactacgagactgtgtatggctatcgaaccgctggccgtgaatacttcctcacaggaagctacaacttctgatccgaaaacccgcccgacagtgctgctgtttgactccggcatgggcggtttatctgtctatcaggaagtaagacaattacttcctgatctccactatatatatgcattcgataacgaggcatttccttacggtgaaaaaaccgaagcctttattgtcgaacgcgtaactaaaattgtccgtcagattgctcagcagcatccgctggcagtgattgtcattgcctgtaataccgcaagcactattacgctgcccgcactgcgtgcaatgtctgatattccggtggtcggcgtggttccggcgattaaaccggcagcgaaactgacacgcaacggcctggtcgggctgctggcaacgcgggcaacggtaaaacgggcttacacccgggagctgattgaccggtttgcttctgagtgtcaggtatcactactggggtcggcggagctggtcgaactcgcagagcgcaagctgtatggtgaggcgattccggcgggtgctctggaaactatccttgcgccgtggcggaatatgaaagagccgcctgacacagtcgttctgggatgcactcacttcccgctgattgccgaagaactgaaatcggcattaccggatggcacccggctggtggactccggtgcggcaattgcccgtcgcgtgcagtggctaatcaataacagcgagaaacctcatcacttaactgcagaaaaaaatgtggcgtattgtatgcgggatgatgaaacgacacagaaattacagcctgttttgcagcaattgggactcgaatcgctgaaaaaactgacgattacaggatgatttgctgcattaatcagcagtcagcacatttttataaattaccccttgcggtcagataaaaactccctataatgcgcatccgttgtcacagcacagaacgcgaagtccgctgagataacaaggtgaaaagtctgaaaataaatacttgacaccaaatgaggaaagcgtaatatacgcagcctcgcaac

SEQ ID NO: 20 - DNA, 183748 bp, unknown
  Altogen 322075 strain
  misc_feature (1680)..(1789): n is a, c, g, or t
  misc_feature (5051)..(5051): n is a, c, g, or t
actgcctggactattgccactgcaccaaccctgccgatacagaaattgttgccggagttcggagaggctttctggcaccacggcaaaactgtctcattttttcaggccagacaaattggtgaggcttatctgcccgcaggtaaaggttcggcaatgacacgtgcccgctggcgatttaattcaggatataaattttatctggtgccggatatccggaaagacctggatgaggacttaagacaacagcagaaataccttatcagtaccgttgataaaaccgtactggaaaagattttccctcagcatactaacccggaccttgacagtgtggtattcagttttctcgaccattccatggtcagtaactatatgtcccttatcagtaatcaggtattgagacagcttgatgaaaacaacacaccgtatgcaaaaagaaaacgggacgattttatttcaaaaatagactacagcgatgcctatccgccgaacgtggcacgaaataatacctttattcacctggaaagtgtcctcggtgagctgtttaaacatcagcacagtaatgcggtcagccagaccgcactgacccggtttacggagaaagtccatgagtttacaaaatagtttacgtcttactgttttactgccggctgtgattctcaccggctgcgcttacagtaccaccttatccccgccggcagacagccggagtattcatttttccgctactgtaccggcagacctggaatcgctgccgttatcggtcatgtaccgctcaaaaaaatgcccccgtacacggacaagcggcagcggtaaatcgtatgaagttccggggtttaacagtacaaaatacccgttgtccgtcacagcgaccggtgacgtgactacggatattccggtaaatggtggcggatattgtgactggcagctcagtaacattaagtttgaagtcagaatgaaaaacccgcaggtaattgacccggaaattacaaaaaaccattcttttgaaactgtgtttattatagacaataatgccccacaagcatttaacggcggatatattcctcatcaggggaattttaatgagtcattgatattattcccatttataagcgaatattttcttaacgggcacaaaaaaactattgaggtcataggtgaaagcgatacgctgacttaccgcttaacaggtactgataatgtacacctgaccgtaaattatgaaagcgacatgctcagccgctggacgggagttaaagaaaaaaaagaaggaaacttcccaacaatagcgtaccccaatggtgaaatagatcccgacccgggaagttatcctgactataaaaagctattaaaaatctatgaagagcggaagaacaatgttcagcattagtcaggcatcagtcggagataaaccgatgcgcggattatttgttccgctgttattgttgccggtgattctcaccggctgcgcttacagcactacgttatccccgccgtcagacagccggaatattcatttttctgctactgttccggttgatttggaatctctgccgttgtcggccatgtaccgctcaaaaaaatgcacccgtacccgaacaagcggcagcggtaaatcctatgaagttccggggtttaacagtgccaagtatccgctatccatcacagcaaccggtgatgtcnnnnnnnnnnnnnnnnnnnnnnnnnnnnnnnnnnnnnnnnnnnnnnnnnnnnnnnnnnnnnnnnnnnnnnnnnnnnnnnnnnnnnnnnnnnnnnnnnnnnnnnnnnnnnncccgttaatggcggtggatattgtgactggcagctcagtaacattaagtttgaagtcaggctgaaaaatccacaaacaattgaatctggtattacagataattttggatttaaaactgtatttattaccgataataacgctccgcaggaatttaatggcggatatatatctcataagggagactttaataggtcattgctattatttccatttgttagcgaatttttccttggaggacataaaaagacagttgagataattggagaaagcgatatgttgacttatcgcttatctggcacagacaatattaatattatggtgagctatgaaagaaacatggtgagccgttggactggagtcaaagaaaaaaaagaaggaaacaaaacagttatcacttaccctgatggtgaagaagaacgaaaatccaaaagctatcccgactataaaaaactattaaaaatctatgaagagcggaaaaatcatgttcagcgttaatccgtcatcagccgatgaaaatgcatagctgcattaatctgttctgataccgtgatgaacgattaacgacaattattcaatgaggacaaattgtgaaactgagtactatccctgcgttattatgttcagtattactgatttctgctccggttaaggccgagcacttctcgacaaagcatccgaattcaagtgcagcgctattcagctcagcggttatcagcggagttatccttctgccgttgcttattccggcacagatagtggttgaatctgttcagttcagcaaaaaagataaaacaacaaccatcaccggaacaacaaagaataatgaaaaggcagccctggttgttgccaccgaaaaattagaaaaacaaccggtaaaacccggtgatacactgacgctggagccggcagaaaaaggggctggtaactacctgaaaaaggacggtaccgtaatttctcatatgatcagtcaggatgaacaaaatctgtcatatcagggcaggatgtctcagtaaaaaagaaaaataaatggtcggcctgtcgcacagaaggagagctggttgtaagaggacatttctgataacggaagtctctcctctggtaaagtttaagggtaactacggtaaataatttttatattcaattccggaaattcagtaatactaatctgtactatcgtaattgttataacgtattgatttaatattattattccccgatctcctctttgcgcgtgaatgacctttttgagacaacgaaactctgaccaggctccgctttgcactataaaatcgcatccggcggtttcacattcctgctattcgatataaacccgcacctcttatagggtcttgatatgaatcaataaggtcagaccacccgcttttatgatgatctgtaattaaagagcgatgtgagatcattatgacaactaaaataacaacagctgacagcggggtgctgcctgtcagccgccgccgttttatgcaggcaggtgcggcactggttacactgccgtttatgacaacgggtgccggggcggcggcggatgacagcctgccgcaggtgtcgtccggtgatgccggtgcggatgttatcgcgacctgcagcacctttgactgcggcggaaaatgcgatatccgtgctcatgtgaaggaaggtatcgtcacgcggatcaccacccggcctgatgcggacttagacgaagagatgccggtgatgcgggcgtgtgtccgtggccgtggttaccggaaatttgtttatcatgctgaccggctgaaatacccgatgaaacgggtcggaaagcggggcgaaggcaaatttgaacggatcagctgggatgaagccaccacactgattgcagataatattacccgtctgactcaaaaatacggcgcagccagccgttttctgaccgtcaatactgccgtgaccggagggattttctccggtgatacaatgctgaaaaaactgtttaatctgaccggcggctatctgccgtattatcactccgtcagcctcggcaataccgttaaagtcaccccgtatacgtatggcgttgccaaaaccggcagctcgatggacacactggcgcatacgccgctggtgatcctgtggggacataacccgaatgaaacgattttcgggcactccaatcactattatcagaagatgaaacagaacggcaccaaatttattgtggtcgacccgcgctattcagataccgcacagtcactggctgatcagtggatcccgctgttaccgaccaccgataacgcgctgatggatgccatgatgtatgtgattatcacggaaaaccttcaggatcaggcgtttatcgataaatatgttatcggttttgatgagcaccatatgccggaaggtgtgccgccgggagaatccctggtgtcttatctgaccggacggaaagatggcgttgagaaaacgccggaatgggcggagaaaatcacccgtgttccggccaataccatccgtcagctggcgcgggaatatgcgatgaccaaaccggcagcgctgatccagggctgggggccgcagcgccatatctgcggcgagcgcagtgcgcgcggctccacactgctggcggcgatcaccggtaatgtcgggaaagagggcgcgtgggcggcgggttacggcggtatcggtaaccgtgtttccatgcacgggccggataccggggaaaacccggtcaaagcacagatctccattatgaactggatgcaggccgttgaggatgcgggcaaagtgcgtccggaagacgggctgctcggtacggataagcttgataccaatattaaaatgattttttcactggcgggtaactatctggtgaaccagaacccggatgtgaatgcggcggcaaaattactggccgatgaatcgaaagcagagtttatcgtggtcagcgatttatatatgtcgccgtccgcgaaatatgctgatttactgctgccggaaaccagctttatggagcgctggaatattggtgatacctggggcaccggcagttactttattttatcggaaaaactgattgagccggcctttgagcgccgctcagattatgaatggatcagcgaagtcgctgagaaaatgggcgttaaagaggctctgacagaagggcgcagcgagaaagagtggattgcgtatctggtcggaatgaacaaagcccgtttccctgaacggccggatttcccggattttgaggaattgcagaaaacccgccgttatctgtttaaagatnaaaaccccgccgttatctgtttaaagataaaccgtttattgcctttgaggataatatccgcgatccggacaataatccgttcccgaccccgtccggcaaaatcgaaattttctccaaacgcctgtatgacatgcaggatccggatatcccggcactctcccattatgttccggccattgaagggccgcaggatgcactgacggaaaaatacccgctgcagatgctgacctggaaagggcgtaaccgtgccaactccacccagtttgccaatccgtggttacaggaagtgcagggacaggcactgtggataaacccggctgacgcggagaaacgcggtattaatgcgggtgatatggtgcggatccacaacgatcgcggtatttctcagataccggcgctgatcacccagcggattatccccggtgtggtcggtatgcaggcaggagcctggtgggatccggatgaaaacggcgttgaccacggcggatgcccgaatgtgctgacatccacgaggatgaccccgctggcacacggtaactcgcatcttactgttctggtggaggtgaccaaagcatgagtgattttaacgattatccgccggtcagtgatgaacagctcgggttttttattgattcttcccgttgctccggttgtaaagcctgccaggtggcgtgcaaagataaaaataatctggaagtgggccgtaagttccgtcgtgtgtatgaaattcagggcggcgggtttgcaccaaatggacagggcggttatgaaaacaatgtgttttcttacacgctgacgatttcctgcaaccactgcgcggatccggtctgtgtgaaaaactgcccgactaccgcgatgcacaaacgtcccggggacggcattgtacgggtggataccggtaagtgtgtcggctgcggctattgtgcctggtcctgtccgtacggcgcgccgcagatgaataaagaggctggccagatgtcaaaatgcgatttctgtgtcgatcttctggcggaaggaaaaaatccgatctgtgtcgatacctgcccgctgaatgccataaaattcggtaaaatccgcgaactccgcgaaaaatacggccatctcagtcaggttcagggattaccggatttcactattaccaacccgagcctggttatcagaccacataaaggtgcgcagaacaaaggggaggcaaaatcatgagtgaatggccgttagtggcgtttaccctgctggtgcagagttctgcggggatggtgatttttattgccctgtttttctgttatctggaaaaagcgctcggtaatccgcgtgccgtccgggcaatgaagccggttctgctgatcgctgctattctcgggtgcttcgggttgctggcatcaacacttcatatgggatatccgtggaatgcatttcatgcgctgcgccatatcagcacctcatggctgagccgtgaagtagtgtttgccgcgctctatctgggggcactgtgcctgtacacgttatatgtgctgataaccgggcggatgaacagaacaatcacggcactgattggtttgctgggattaattgatatctattgtatggcatcgttgtattacaacaccgcaatgatgacatggatgcatatcaatacttatattctgtttttctgtgctgtttttgctgccggcgggtcactggcgctggggctgacagctgtacggataaaatctctgatcgacggaacaaccgctgtcaggatcaccggcgcggctctggcactgatttttgttgcggtggcggtcagaatgacggcacagccattctttaccgaatggttatacgcagctgcacaaaacagtgacagcgtcacatacccgcactcaccgctggtggcgtacggcagtacatacatactgcggattatcgccggtgcactgtctgtcagcggtattttattcaccggactgagcctgctgcggatgcgcagtgccgtcctgagcaatggtatgccgctgatcctgctgggttctctgctgattttcagcggtgaaattctcagccggtttgcgttttttattgtcggataagtgatacagaaaaggccttcggatgaaggccttagtcaataccccgtctccgcttcaatatccagaacggtaccatcttgtttttcggtaaaaagataccggtattcttcaatggccacacggtgagtaaccgtcatctccagtttatccggtgacaaccagcgatagcggatttctgcatccgtcgtctggtaggtcatgtcttttgcgggcagggattttttcagatcgtcaggctgataaaaatcgttccggtagcgggaatagaccccgcggatattttgcttaataaagaaacagcggtatgtgttcagtccgtcatagacttcgccttcattaagctggcggcatgacgcatacaggttatcttgtgtcttctccgcataaccggcggaggcgggcagcaataaaaacagtgcaaaaacagagaacagccggtgttttatcatgatatttctctccctgaataaccggctgatcgtaacacagctctaccactccttcacatcccggtcggctttggtgacggaggtcagttttgccagacgcggtaacaatgcttttttcagatcatccataaaggtataaatcaccggtacaaacaacagactgagaatagtggagcttatcagcccgccgataaccgcaatcgccatcggcgcgcggaacccggcatccgcgccggaagtcagtaccagcgggatcatgccggcaatcatggcaaaggtggtcataattatcgggcggacccgctcgcgtcccgcgtcttttaccgcctgttcacggctgagcccggcgcgctctttttccaggataaattccaccagcagaatggagttttttgtcacaatgcccatcagcatcagaatgccgataatcaccggcagatcgatcattgccccatacagcacaagggcgataatcgcaccgccgacagaaaacggcagagcggcgagaatggtgaccggctggagaaaatctttaaacagtacaatcagaatagccagcaccagcaggatactgaacagcatagtactgctgaaacgcataaacatatcattcatatattccatatcgccgtattccagctgtgacactgttaccggcagattctgatactccggcagcgccatcaccgcatccagcgcctcaccgagtgataaaccggtcagattagcttccaccgacattttccgggcacggtttatccggtcgatttgtgccggtccatcactgaaatcaatggctgccccccctttcagcggtacatttccctgagccgtgcttcgtacggataaatcattcagcacacggatatcattccgctggtattcaggcagtaccacctgtaacgccagttgtctgtccggcagattgaatttggcactgcgggaaccggattcccccatggtagcgatccgcagcgtgtcggcgatttcactgacactcacgccggtccgcccggggccgtcaggccgcggtgtgacaatcagctctttgcgcagcagcggttttatcacctgcacattactgaatcccggcaggcgggcaataccgttacgcagattttgcatggcactttccagttcagccggatcagtgccggtgaaaaccagcgaaaattctttgccgccgttactgttactgaagttatagcgggcatccggcagttcactgaacagcggggcgattgcgtgctcaaattccttctgtgacagttcacggtcaccgggatcaaccagtgtcagaatgatttcccccttgtgctgcgcgataccatccgcatcatccgccacacccgcaatggtataaacggattttatctccggccggtctttcagggattttgtcagtgtccgcagtcgttgctgtgtctgctcaaccggcgtgccgggcggcagttccacttcaatctgtgtcacactgatatcgccctccggcataaagccgaccggcagccgggtcacggaagccactgaacccaccagaaatactaatgccagcgccagtgcggttttccggtgtttcaatgttgcggatagtaaccccgtgtatttttctatccagcgcggtacggctgattccggatgcggtttctttgacggcaacaggatatacgcggccatcagcggcgtaaccagccgtgcaaccagcagagacgacaataccgccgcagataccgtcactccgaacggcacaaaatatttgccgacaaatccgccgatgaaactgaccggcaggaaaaccgccacaatggtcagtgtgatcgcaacaatcgcgaaaccgatagcatcagaggctttgagtgcagcaagatacgggcgctcaccgcgctcaatgtatttctggatattctcgatttccacaatcgcgtcatcaaccaggatcccgataaccagtgtcagcgcaagcagagtgatactgttgagactgtaatcaaacagtgccagcacaaaaaatgccggtaatatcgataatggcagtgccactgccgcaaccaatgttgcccgccagcttttcaggaagaaaaagacaatcacgatggtcaggaatgcgccttccagcagagttttaatcgtcagctgatagcttgattcggtataagtaacggtggatgagatcagttcaatcgtcagttccggatgtttggcggcgatctccgtcagggcggcatttacctgttccgccacggcagtatcactggcacctttggcgcggaatacggcaaacccggccacatcacggccattgaactgagaaatactgcgggtggttttttgtccgttatagatctccgcaatatcacccagttttatccattgctcattttcaacaggcaactgaatgtttttaatatcatcagcggctgttttctcacccagcacacggatagtatgagccagagaattatactgcgatgaaccacctgccgcgttctgatgcacaccgcgcagccattcattcacagtaactaccgacagattcagggcagagagtttgtccgcgtccggttcaatgcggatcacccggtcagcgccgccctgacggctgactttctgaacgccgggtaacataatcagctgcttactgatggtgtcatcaataaaccaggaaagatcggctgccggtacagtatcggatgacaccgcatagcgcagtatggcaccaccttcgacgtctatccggttaatcagtggctcgtcaatactttgcggcagttctccccggatttgtgagatctgctcacggacatcattagtggcaatatacggatcaacatcgaggttaaattccaccgtagttgaggaaataccttctgttacggaagacgaaatatgacggatgccgggaatgccggaaacggctcgttcgacctgtttggtcaccgcattttccagctctgacggcgaggagccgtcctgagtgaccgtcactgtcacaatcgggaagttaatcaccggattggcggttaccggcaattgtgcaaaagaaaataacccggcaatggtcagcgccagaaaaataacaatgaccggaaccggacgggtgattgcccaagaggaaagctgtaatttcattgtgcggccttcaccggtgtgacggtgtcgttatcagttaaaaatgcctgcgcattgaccaccacatccgcatctgacggcagcgggctgaggacagcaatctgcccgttatcaatagcgccggtctgcaccggctgctgcatcactttgttatttttcacgataaacaccgtacgttcaccttttgcgccggtgcgcaccgcactgtaaggcaggctctggtattcacggggcgcggcggtgtatgtcagtacgccggtctgtccctgccgtaaatcagtaccgtccgtaaccgtgatccgcacacggccggactgtgtcagagaggaaagtaccggtgaaataaaccggacagtgccgttcagttgccggttattcgccgttttcatcgtgactgcggtggtttcctgcatttgtgccagttcatcagcccccgctgcagcctcaaattcgatctcaccgttttcgatcagcttaaacagcaggctgttatcagacagcatgccctgtaccgcatggcgttcactgataatcccggcggccggagcatagatttttgatttatcttcctggcttttttcccgtgccagttgcgcctgtaactgacgcagttctgcctgcccggcatcaaccaatgcccgctgggcctgggtgtctgatttggctttttcaaactcgctggcggaaattacgccgctgcgggcgagttttgtcatccgggtcagatcacgctgagattgcgccaccagcacactttgctgccggatatacgccgctgctttttccgtttcagcctgcaactgcctgacagcggcactttgcaacggagattccagggttgccagcagctgatttttctccaccggctgaccttcctcagcaaacactgccgttaccgtctgttgctgcagcggcgagccgatagcaatttcatttttggccacaaattttcccggcaaggtaatgaccggtgcagagcggattatttgcggatgcgtcacactgacccgcacatcatctgcccggccggcaggtgatacagaaaataaaaagagtgtggtcactatcaaaatacagtttttcatcgtggtacaatttccgtccggaagcattgcccgctaaaataaactaaatagtctaattttccttaaacccgcgttaagccgcgatttttcgttaagctgaattaagctttgccgaggagaaccccgttatggatccgctgcacagcattgccgtcacgctttttttgtttgtcctgacttttttcaatcctggggcaaatctgtttattgtggtacagaccacactgagttccggacaaaaagcggggctgacctgcggttacggcgtggtgctgggcaatgcgatttactcggggctgggattattcgggctggtcacgctgatgcatgaattcggggcttttttctcgctgattaaagtggcgggcggcgcttatctgctgtggtatgcggtaacggttttccgtaaccggacgcaactgaatctcaataccgacagcacattaccggctcagcatgcactgcgttatttccggcgcgggctgatttctgatctctccaatccgcaaactatcctgttttttatcagtattttctctgtcacactgacaccgcaaacgccgttgtgggcaaaaatcaccctgtggctcggtattatcacggtatcacttatctggcggattattctctgccgcacattttccctgacctccgtgcgccgtacctattcccgcattcatcgcgtggtcggtaaagtggtgggcgtgttactcggcgcactcgcagcccggctgatttatcagggggctgaggagttactcagtcaccgctgaacaaatccggcgtttttttcagataactgttacaggcgcaaagggcggctttccgttattgtgatgctctgtctgcttttcagcgaatactgctatgactgctatcgcgttatataccgtctcagttctgctcgtgcttgtggcactgctgcatttcggctgcctgtttaccggcgccgacggataccgttttctcggtgccggtgagcggatcgccgggctggcggaaaaagggcactggtatccgcattttaccgccatcagtgtcggggtgtttctgaccgttgttgcggtatatgcctttgtgacggcgggcggaacaaccgcgctgccgtatgcatatctgctgctgtcggcggccgccacggtgtttctggtacgatcggcggtttttccgctgatgaaaaaccgctttaaaggaaacagtgaccgcttctggtacatcagctcattttgcagctttattttaggcgcgttactggctgccggaacctggttttaatcagtcgcgcggcgctatccacgctgtacgtccgccgacagtggcactgcggtgcagtgcggtgtggctcagacaaaaagcactgaccccggcaaattcctgagaataccaggcaccgccgcgcatcagtgcccgctccccgtaattacgcaggtagatctggtcagtctgtggtttttccccgtaaggcgcgagtccgttcagttgcagcagatgcggtacgggcagattgttcgccgttttcatgctgaaaaacggaccatcgagcagacccggcggataactgttatccgctgggtcgccgttataatgcgtcatattttctgacagtaatggtgtgccgccgttgccggtcagacaggcggacggtgagtcatattttgccgccccggacataccgggtgcacaatattgtccgctctgcatatccactgcctgccataacaacggtgcatctgccggtaacgcactgatatcattatcgcggatcagctgaatttcacctgccatcagccggacaccggtctgccattcccacaaatttccgcacaggtcgctgatcccggtcagttgctgattatgataccagcccgggtggggtgatccggtgagcgtattagcttccccgctgagatcaccggctggtttgccatcaatccgcaccgcactctggtccggatgacgcaggctgcggccataatcggtattaccgtccggaataacattctgctgatcaatacaatgcatcagcgctgcccattctgcattactgctgagatgaaatcccggcccggtttgttgtgccagttgccggaattccggcagattcaggtgacaggccggtgctttttccggctggctgataagctcgccgtcatgcaggctgcccgggtagcaggcatagaaaaaggtatcaattatctgtccgttcacacaaaatgccggatgcagagcagtaagatcatcacggcaaatctgatacataaaattcggctgacctttggcggaataaatcacagtccgccgtccctgactctctttctctgttttgacccgcagtgcatcgggtgaaaaaatcgttgtcatcaatattatccttatcgttatgattcagggcgcagtgatacccagtaacccggctgccacggcaccggcagaaactgctgataaaatgaacggaataccgcatcagcatcaatatccgcaaacagtgccggatgcagccaggtggcgaatttaaggactgcgataaagccgaaagggctgtcatagaaggcgtgccagatggcataacactcccgctgctgtacggcggcgagggttttaaaggcagggcgtttcatcagaacagccagctgtttttcagctaccgtaagatcagcccccgggccgagtcccacccagtcaccaccggggttatagctctgccattgtccgccggtgacaattactttctccggccgggtatggataatggtttcctgattgagcgttccataggtgccgtcaatataatcagcgccgatatttttaccgcccgcacaggccagaaattccgcgaaattgccgttgccataggcataacagcattccgcactgaatccggcggcgcgttccagcagaaccggaaccgggcggtaaggtgcggcagccagccgcgatgtcacgagcgcaagatgtgagtgaataaaggcgatcatctcagcagctctgtccgccacaccaagaacagcacccataatggcgatactgcgcggcgtgtttgtcagcggactgatactcatatccagtacaacaatctgtatcccggcgcgttccagtaatgtggtgatcccgccggtttccatggcggaaaatgtaccggtggtgacaaaaataatgtcaggatgcagatcaataatggtttctgtgtttgcctgtgccccggtcagtggtgcaaggtgcggcagggcagccagtgacggaaacgcccggctgtattgctgatagctcagttcatccgcatggcggaaagcagccggaatagctgccagtttttctgtcagctgttttccggtcagtgaggcatacagaaacatcagggaggcatctgccacatagatccgctgcggtgtgatccggcagtcaatctgtcggccgcgtatatcggtaatgaactgcggttccggtgcggcggataatccgcccggcagtgcggccagtgcggaaaacagcaggctgtgtttcagaagacaccgtttcagatgatccataatgtcacggccctcagaagaaatagttaagggtggcgacaacggtgcggtcattaccaatgctgcaataagtggaactggtgcaacccgccacataagatgtattggcgatattgctgatggtgacacccagttccattccgctcagttccggtgtcagcgcgtccatctgataacgcaggctgacatccccaagccagacggcaggtaccgtaaagctgttggtgttatccccctgagtcgcaccgagatagcggacaccggcaccgatcagcgcgccatcgagataacggccctgaaagcggtaatccgcccagagtgaaccactgtggcgcggtacctgaacagggcgtttattcagtacggatttgtcatccgattcggtgatcacattatcggtaaaagcataacccagcataagattaagtgacggtgtcacggccatgcggctctcaaactccagtccgcgggagcggactttgccggtctggttatagtaatccgggtttttcgggttatgagtggtgacatttttctgggtcagctcatagactgcgaggctcgccataatatcgccgttatcactcagatatttcaccccggcctctgtctggtcagattctgtcggcacaaatgctttgccgtccgcgtctgttcccagtaccggatcaaagctgtcggagatacttatccagggagaaaaaccattgctgaaggtgtaggtcagccccgcacggtggctgtaagctgaggtatcatttttctctgttgttccgctgagattgttggtggttttcagtgacgaatcatcataacggccgcttaaaatcaggctccattgctgccagcgcagatgatcctgcatataaacaccatagcgccggtaagtctgtccggtggaggtggatgatgtcatgtgcggcgtaaactgcgggcggtagtgagaaccgtacggatcaaatgttaccgtttgcgagcctgaccagtccttatccagcttaccggtctgaagatcaaagccggtcagaatttcatgggataccgggccggtgagggttttgtaaatcagctgattatccgccgccagggttctggcccgggacggggaatcctgatataccgcggtcagcagacgtccgtcctgcacaaatccccgcgtaaaatcacggcggatatgcgttttcacatccgcatagcggaggttctgtttcagtgtcagtgaatcagatacctgccagctgaccagtgaagtgacggattgctgtgtccggcccgatttttcatgatccggattactgtagttgcggtgcctgtccaaagagccgtaaggcgacggcaacaggccgagggcagcggcgggaaggggattgtagtaaccgacataaggatcatgctgatagacaccggccactgtccagctcagattattcagtggctgccaggtgacggatggcgctatcaggtaacgggactgtttagtattttcaatctgtgaaccggacgatgctgccgagccggtcatccggtaaagccaggtttcatcctcattcagagcgccggtgctgtcaaagcgcagcgcattgttatcataattcccgctctgaaactgaatctgatgggattcctccgcccggggcagccgcgactgcatgttgatcacaccaccggcaccgccctgaccatacagggcagacgacgggccgtgaaccgcttcgacgctctccagcagccaggaatcaatctgtgccccccagatcccgctgttacccgcgacccgcaggccgtcgagataataatccgcatcaaacccgcgcattttggaaaaatcaataccattgccgaaagcaccgtatttttcactggttaccccggcactgtagcgcagtgctttactgagggattcgccgggcagggtatcgagctgatcacggcggatcactgatacaaactgcggcgtttccgccagtgcggcagagccttttgtcgctgaggactggcgcagggaaccataaccgcgcggctcatagtgaacatcatccgcagcagtgacatacaccacatcgtccggttccgctgaaacaggcggggcagacagcaaagaggcagaaaaaacagatgtaataacgacagggtaagaactcagtaatcggcgcatgagggtttttctcagttgatcggaacagcggcagcatatacattgaccgaccgacagtcaataataatggtaattattttcatttgcatttaaaaaatcaggatggaagggacacaaaatttcgctatagtggggcggactccatcacccaacggatcgggaaatgacaaaaaacacaatcaataacacagaacaacctgcacagagcggtataaaaatctatctgagaaacgggctgtattttgtgctgtttttaatggcggtacagttactgaccacactgaccggcggagggttaaccgcgctgggtattgagccacgtacagttaacgggctgttcggtattttccttgcaccttttattcacagcagctgggggcatttattcagtaatctgccgccgctgttgattctcagtgtgttactgatgatcccgtcagtgaaacattatattaaggcatccctgtttattattatcgtcggcggattgctggtctggttattcgggcggacggcagtgcatgtcggggcgagcggctggatattcggtctgtgggcattactgatttatcagggaattttccgccgcaaaccactggatattattatcggcattgtggtgctgatctattacggcggcatgatcagcggattatttccgggacagcaattcgtctctgttgagtcccatctgagcggcgctgccgccggggttttattcggctggctgcaataccgcaaacggaaacagaacaataaaccggcataactattgtgttaagccggttttattttatttttttcagcgggacaagcaaaattccgccggtggcgccgggaaccacaaaacggtaataaataaaatagcgggtatttgctattgtccggacattacccacagttttggccgatgaaaaaacctgttcaaaaaggccggatttcatcacttctgattttgtcagattctgaatattcagctgtaccagcagaatatcttcatcctgcccggcgatacgtaccgcacaacgttcaacggcgtcctccggtgttgcgaagagtgttctttgcataccggcaacctgttctgattgtgtttctgatgccggacggatttctgacgtaaaactccccgccgaaaatatttgtttaccgtcccggtgcttaagtttgaaatattgtgagccttcttcttcacttatatcagtaaatattgttgcggtattaccgcaggtaacatggctgattttatatatgccgtccggcagacattcagcgtatgccgccagcggaaataaaaccggaataagaccggtaattatccgttttttcagtaacgggaaaaatgtcataacaacgattctccggaaagtttccggcaagtatatagcggtaaataagaaaaaagtgcgggagagcgattattcaggcaggtttcagagtaattaccgggtgataacacccggcattattatctgtcagccgcggatgcgggatgtcagacctttcaggaaatagcgcagcagctgatcaccgcagtcccggtaatttttatgatccggattgcggaacagggcgctgatttccggttttgacacccggaagtcggcacgctgaaaaatatccgccatatccgtatccttcagttcaaacgcaacgcgcaattttttcaggataatattgttggtcagacgggcatccaccgccggtaccggacggctttcatctttgccgcgacggaaaataatcagtccgttgagaaaatgaccggtcacattatcatcacaaagctgataatccgcttcatcttcttttttcagccagtcgctcatctgcgctttggtaacagttaatccggcaagtccggtgatttcggccatttttgcgtcactcagatccagcatgtagcggacactgcgcagaacatagttattcagcataaacaggggttatccatggagggagttataaaccctgcaatactagtgattatccgtccgcatttcaatgaaatccgctggttggaagtggattaatggcggtggtatagtaggtttttccgttcagtcatgaggttactatgtcattgtcccgcgcgtttgccaccacactgcttgctgctgcctgctccgcttatgctgccgacccggcagatctgatgataacggacggcactgtgctgaccatgaacccggaaaatacggtgtttgaacacggtaccgtggtggtcagtgacggaaaaattgtcgccgtcggcggccctgagctgacagcgaaatatcaggcaaagaaagtgctggatgtaaaaggcgatattgtcatgccggggctgataaacacccacactcacggctcaatgacggttttccgctctctcggggatgatgtgccggatcgtctgcaccgctatattttcccgctggaaaataaactggtttcccgcgatatggtgcgcaccggtgccaatctggccaatatcgaaatgattaaaggcggcgtgaccacctatgcggatatgtattatttcgaagatgaggttgcgaagactgtagataaggcaggtttacgcgccgtgctgggtgagaccatcattaatttcccggttgcggatgcacagacgccggaagaagggatcgcgtatgcagtacgctttatcaatgaatacaaagatcatccgcgcatcacaccggcatttgccccgcatgccccgtataccaataccactgaaaacttacagaaaatcgcggcactgtctgaagaactgaatgtaccggtgatgatccatctggcggaaacggatcgtgaaaaagaagagatcgccaaacgcaccggcggaaaaagcccggtgcagtatatggcggatatcggcgtactgaataaccgcctgctggcggcacatgtgattatggccgatgataatgacctggatctgctgaaaaaatatgatgtcggggtggcacacaatatcagcgccaacaccaaatccgccaaaggtgtggctccggtcacacaaatgctggaaaaggggatccgcaccggtctcggtaccgacggaccgatgtcctccaatacattaaccaccatgaatgagctcaacctggtcggtaaaatccataagctggaaaccaaaaaccgtgcggccatgccgccgctgaccgtggttgaaatggcgaccatgggatcggcccgtgcgctgcatatggatgataaaatcggctcgctggaaaccgggaaactggcagatatcattgtggtggataccaaagcgccgaatatggtgccggtgtacagcccgtatgccgccctggtttatggcgcaaacggtgccaatgtccgccataccattgtcgacggtatgatcctgatggaagaccggcagttactgaccgtcaatgaaaatgaaattattcaggatgcacagcgttttgcggaaaaagtccgtgaaaccgtgcgcgcttcaggggaagaggtgaaatgacagaaaaactcaaatgtgcgctgatttatgattttgacggcaccctggcagaaggtgactgtccggagcacggactgatgcctgcactgggtatcagtgacacgaaagcattctggcgggaagtgaagcggtttgccaaagcggatgacggcgatgaaatcctctcctatatgggattactggccgccaaggccgcgaataaaaagtcagaggaactgagcattgaaaacctgaagaaacacggtgcaacgattccgctgtttcccggggtgacagagtggttcacccggatcaatgcctgggcccatgagcaggggctggacccggaacactatattctgtccagcggactggacggaatgatccgcggcacggctatcggccatgaattccgcgatatttttgcctgtaaatatcactattccgctgacggaaaaacagcacagtggcccgctcaggctatcaactacaccaccaaaacacagtttttattccggataaacaaaggaatacataactcgtgggataatgtggcagttaatcattttatcgagcaggaagaacgcgcagtgcagttccgccatatgatctatttcggtgatggtgataccgatatcccggccatgaagatggtgcgttatcagggtggtttctcgctggcggtgtttgatcagaagaaatggggcaatccggaaacacagagcaaggtcggcaagctgattgccgaagagcgggcaaattatgtggtacccgcaaactatgaggaaggcagccagctggatgtgaccgtgaaagggctgttacagctgttccgccgtaagcgctgagcacaacgtctgcggcccggtaaatccggcgccgcaggcggtcagcttattttaccagtttcaggccgataacgccggccactgtcagtgtgataaaaaacaaccgctgcagagaaaacggctctttaaaccagagcacaccggtcacacacaaaccgatagccccgattgctgtccagagaatataggtcgtaccaagcggcagcgttttcagtgcctgtgccagcaggaaaatactgatcagggcagaggcaaccgccagtgcgctggccgtcagttttgtccagccatcattcagcttcagcgatatacccattacaatttcaaacagtgatgcggcaagcagatacacccacgccattactgatttcctgccggcgcaataagtgtgacactgtcacgtatcgtgttcacattaaccgcttctttcaccgccggacggacagataacactgtcagccacgccatcacagcagggaatgcagagagatccaaatccagctcatgccaggtgcgtaaccaggagaatgccgccatatcggcgatggtgtaagtttctcccgccagataaggagagatctgcaattgtctttccgccactccgagcagacgcagtgcctctttgcggtaacgtgccagtgcttcctcattacgggtttttgacccgtgcaggaaccaccacagctgacccatcatcggcccgataccgccaatctggaaatgcagccactgctggatctgacattgccctttcagggaatcaggcttaaacagcggatatttatcagagagataagtaagaatagcgccggattcaaacagggtgatatccgttgcgtgatcaacaatggcggggatttttccgttcgggttgatagccagaaaggcaggctgatgctgctcaccggcagataaatcaacaaaacgccgctcaaacggaatgcctgcttcatgcaggaacagggcgactttcaggccgttcggggtatcggcagtgtaaaacgtgatatccggtttttttgatactgtcatggtgactctgtttcagataaatatatagttgcaaatgcaatcgttgtatttgcaactataatcctgtttatctgataacacaagccacggtcattctgctgattgtgctttcccggccaccgccgtaaacagcgcagtcatccgggagatatcatcctcactgaattggctgaggaaatctgttttgattacctcctgatacaccgcccacattttttttctcagtactctgcctttttctgtgatagtggcaaaagcggcccgccggtcactgtcagagcgggagcgggtgaccagggcttctttttccagccggtcaatcagccgggtcaggttataacgttcaatggccagcacatccgccagttcattcatcctccgtgtgccgttttcgccgctttccagcccccacagcacatcataccaggcataaaccggcagcccggcctgtgacaatgcagcttcaatgttgcggatcagcagccggtgagcacggacaaacgcaaaccagggatcaggcagattcggggtcataagggctttcctgtaaaaagttatgattgcaaatgcaattatacaaccggaatcattatgtggagaatatttttgcccggtcaccgtccgtaacctgtcaattggtgtaccataacgacagatactattcagaataagaaatgtatggagaaagtatgaaataccaaaatgtgactgacacgcccggtgagaattcctatttcctcgtttttaatctgacagataccccgcaaacgcgggagacggttgttacgctgtgtaataacctgtccggtattctgcgcagcatccgtaaccgctttccgaagctggaagtcagttgtgtgatgggcttcggggcggatgcgtggcaaaaactgtttccggatgcgggcaaaccccgtgagctgaatacctttgaagcaattaagggaccgcgctttaccgccgtatccacccccggtgatatcttctttcatatccgcgccctgaatgtgtccgcctgttacgagctgggctctattatcagccgtgctctgagcggtgcagtgacctgtgaggatgaagttcacggtttccgttatatggacggacgcgcaattatcggctttgtcgacgggacagaaaacccggaatttgaggatgagcgcaaagagtatgcggttatcggcgacgaagatccgggatttgccggcggcagctatgcctttgtgcagaaatacattcacgatatggatgcctggcagagcctgagcaccgaagatcaggaaaaagtcattggccgtcataaattcaatgatgtcgaactgaccgatgagcagaaaatccccggctcccacaatgtggtgaccaatattcaggacgaagagggcaatgacctgaaaatagtccgcgccaatatgccgttctccaacccggccaaaaatgagcacggcacctattttatcggctacgcccgttatttctcccccacccgcagaatgctggaaaatatgtttgccggaaaagaaaccggtgccactgatgaattactgaaattcagtaccgccgtgaccggtacactgttctttattccgtcaccggccatgctggatgatgttgaataactgacctgatccgggagatcactcccggatcacttttcccgcctgttgtttccgcgttttttattggtatttccccgttgtctgcggtaaagtttccggcttttttccggcatggcaaacagcggaggcattatgtttattggttttgattacggaacatccaactgctcagtggcagtgatgaaagagggcactccggtgttattaccgctggagggggataatgtctatattccgtccaccctgtgtgcaccgacacgcgaatccgtttccgaacacttattccgtcaccgcgatattctgccgtcagataataccggcgaacagttattgcgccgctctatcgcttttaaccgcgaagaaagtattgagctggtgccggaggatattctgttcggtcaggccgcgctggagctctatcttaatgatcctcgtgacgtgtattacgtcaaatccccgaaatcctttctcggcgcctccggcctgcatgatgtgcaaatcagcttctttgaggatctggtctgcgccatgatggcgaatatcaaatctcaggcggagcgttcaacacaggaaactatcaccgaaacggtgatcggcagaccggttaacttccacggactgggtggtgaaaccgccaatcagcaggcagaggccattcttctgcgggcggcaaaacgtgccggttttcagcagattacctttcagtttgaaccggtggcggccgggctggaatatgaatcggtactgaatacggatcagacggtgctggtggtggatatcggcggcggtaccactgactgctcgctgatccgtatgggaccgggttaccggggacaggccgatcgcaccggcagtctgctggcacacagcggacagcgggtcggcggaaacgatcttgatatctatctggcctttaaacagctgatgccgctgttcggaatgaacagccgcgcggcttccggtatcgaaatgccgctgatgcaattctggaacccgatcgccattaataacgtggaagcacagaaagagttctattcccgccagaatctcacactgttgcagcaactgaagcgggattcggcagagccggaaaaactgctgcgcctgctggaagtgtataaccaaagcctgggttacagcattgtccgccgggcggaagaggcaaaaatcgcgctttccgcctcaccggagtaccgtgcggcaatccgcctgctcagtgaaacgctggaaacagacatcagcgcggcggaaatggaagaatcgatctcctccccgaaagataaaatgatttccctggtgaatgatgcagtgcagcagggcggcgcaacaccggatgctatctttatcaccggcggttcaggccggtcgccggtgttatgccgcgcgattgaggcacaattaccgggtattccggtggtcagaggaaacgatttcggctcggtaaccgccggtctggcacgctggggcgaaatttgttttaaataaacttgcaacagaccggtcggtctattaaagtatcgtcatgaacaaacacactgaacatgatacccgcgaacatcttctggctaccggcgaacgcctgtgtcttcagcgcggctttaccggcatggggctgagtgagctgctgaaaacggccggggtgccgaagggctcgttttatcactattttcgctccaaggaattattcggcgtagctctgctggaacgctattacgaagattacctggaacgcctgaccggtcattttgagcacggtcccgggaattaccgtgatcgctttctcgcgtattacggcgatattctgaaaaatgcctgtcagcacagccgtattcagggctgtctgacggtcaagttatccgccgaagtatgtgatttatcggaagatatgaatgccgcgatggataagggcgtcagtaaagtgatcgcgctgctggcacaaaccctggaaaacggaaggaaagaaaattcactgacgtttcagggcgatgcgcagcacgccgcacaggtcttttattcattatggctgggggcaaatttgcaggcaaaaatttcccgcagtactgcgccgctggaaagtgcactggcgcatgttgaaacactgattaccgcgcctgagtaattttttcgcaggcgtttttatttatctgaaaactagtcgactggtctaatccggagttactatgtcacaacaaccattgtcacagaaaaaactgtttaccccgctgaaagtgggcgcctttaccgcaccgaaccgcgtatttatggcgccgctgacacggctgcgcagcatcgaacccggcgatatcccgaccccgctgatgggtgaatattaccgccagcgtgccggtgcggggctgattatctcggaagccactcagatttcggcacaggccaaaggctatgccggtgcgccggggctgcacagtccggaacagattgcggcctggaaaaaaatcacggccggtgtgcatgacgcaggcggccacattgctgtccagttgtggcatacggggcggatttcccataacagcattcagccgggccaacaggcaccggtagcaccgtctgcgatcagtgccggtacccgtacctcactgcgtgatgaaaacggtcacgctgtccgtgttgatacttccatgccgcgtgcgctggaaaccagtgaaataccggggattgtgaatgatttccgtcaggcggtagctaatgcccgcgaggccgggtttgatatggcagagctgcattccgctcacggttatctgctgcatcagttcttatcaccggatgctaaccaccgtaccgatcagtacggcggcagccgcgaaaaccgcgcccgtctggtgctggaagtggtggatgcagtctgtgcagagtggggtccggaacacatcgggatccgtgtatcaccaatcggctcattccagaatatgagcaacggcccggatgaagaggcggatgccctgtatctgattgaagaactgaataaacgcaatatcgcctatctgcatatgtccgagccggactgggcaggcggcaagccgtacagcgaagatttccgtcgtaaggttcgttctctgttccgtggtgtgattatcggtgccggggcctataccccggaaaaagcggaagatctgattgaaaaagggctgattgatgccgtggcatttggccgcgattatatcgccaacccggatctggccgcgcgtctggcgaaaaaagtaccgctgaacccgcagcgtccggaatccttctacggcggtggtgccgaagggtataccgattatccgtttatgtcataaaaacattaacccggcggcagaaaacagccgccgggttatttttacggacggataatcgtatgtgcatacactgtactgtaaccatccatctctattttgcggaattccacatcaaagacttcatttaataatgatgattccagcagtgccgcggatgaaccgaaataacgtaatttcccctgtgataacacaataaccgattcaaaatagcggaataccatatccagctcgtgcagacacaccaccaccagtttttcttttccctgtgccgttaaatcctcaatcagctgcatgcggtgttttatatccagcgccgcaccgggttcatcggcaaatatcaccggcggatcacacatcagtgccatcgcggtcagtacccggcttttttccccgcccgataatatatgccagtgtttatccagtaacggttgtaactcatatttccggcaggcggatgcttttgcagctttcgggtcagatgcccgctctgcggccagagaaattaattcctctgtgcgctgatcccagcagggattaaaactctgcgggatcagcccgattttctgcatccgcgcggctcccttataacggctgatatttttcccgtccagggtaacggcgctgaatacctcccggtcaagcccggataatgcctttatcagagtggatttaccggagccgttcgggccgataagggcaatgctgcctctggcgggtaaatgcagggaatcaaccgtcagtattgttttatcctgtttacagacattcaggttatttactgtgatcatgattttctcacccgtttcgccagcagataaataaagaaagggccgccgataaaggcggtgatcagcccgagcggtatttcccccggcggcagcaggctgcgtgataatgcatcggagaacatcaccagtgccgcaccaataacagcggaggcgggcagtacatatttatgacgggcaccaacctgccagcgggcaatatgcggggcaatcagcccgataaaaccaacaacgccgccgagtgaaacggcaattgcgacaatggcggatccggcaattaaggccagcacggtaaaccgttcaacggataaaccgaaactcatggccattgttctgtccagtcccattaaatccagcccgtcagataacagataaacggataacagaatggccgccagagttaatatcaggctgataagcagaccttctccggacggggtttgtattccgcccagaatccagcttaataccacctgaaggctggtactttcatcggataatgccatcatcataaacgaacgggcggcatttaataccgcactgacggccaccccggttaataacagtgtggcggtatccagtgacccggcaatccgggagacagataacacaataaatatcgccgccagtgcgccgctgaaggcaaataacggcagcgataccgccagcggtaagccgagcggcactaataatgccactgttccgccgatcgcggcaccgccggaggatcctaataaccacggctctgccagcggattgcggaatactccctgaaaaatggcaccgcttattcccagtaatgcgccggtaaatccggcggtaatcacacgcggtaaacgccattcggttaataagcgggatgttaagtcatcactgtaaaacagggcgcttaccaccttcagcggactctcccatgtatgtcccgcacaggcggaaaaaataaatgcagcgaagagaatgagtaacagactgactattttcactgtctcaggctccattgctcaaagatgtcagacatatattcaatgccatcaataatccgcgggccgggaataagtacatacgcacttttcaccggataaatatcattatttttaactgctttcatttgtgaccagccgggaagtgtcagtaaatcccggattttgtctccggaaatggtgtacaaaataatatccgggtcggcggcgataaccgcttccggggatacctgtttcagcgccggtccggcctgtttatattcctccagcgccagggttccgcccgcttttaaaatggaatcagcggtatatcccggtgtttttttatacgcctgcggcctggcaaccagtaataacccgttactgacctgaccggtgatcataatgacccttggtgcgcggtaaccggcgggcttttgctgaacattgtgcagccgctgttccatttccgccgccacctgttcacctttttccgttgttttggtgacctgagccaccagacggatattatggataatttcctcaatactgtttccttccagcaccagtacaggaataccgaatttgcgcagcggtgttaataactgatgcgtggcctggcgggcaggggtcataatcaccagatccggtttctgttcaatgatccgttcaagagaaaacccgaggcggccgccgattaacggtttatttttgatttcatccgggaaataggtataggcatcaataccggcgatattgtcagccagtccgaggatagccacaatttcggtatttgatgaaaagatagtcacaatgcgctgcggtttttcgttcagtgtgaccggcgcagataattgcgccatcatactgaaagcaggcagagcatggcacagggccatgctcagtgtgataataagagtcaggactttcattattgccggttaaaaacggtatgtcacaccggcaataaatgaccggcccggcatagaggttcccagactgccgttggattttgacggcagcataatatacgggtcttcatccagggcaaaaaataccggatgctcgtttttatccagaatattgtctatacgtccgtacagcgtcagtgactggctgagatccacatccgcctgaagattccagaccataaacggcgctttgcgcatcacataagaagaataagggcggacatccgggataattccttcctctgttttataccacatcggtccgcgcagaattccctgtaactggaggctccacggataacgggcattggtaaaatagagctcgttaataaatgccgcctgatactgatacatgcgctgaactttattactgttattggttgcggttattttggcgcctttatcttccatatcgaaattccagctgccgtttaaacgcatgacccaatcccagtctgtctgccagtcaaatacacggttaacagtggcacggctgttaatttccagcccgcgcaccacaatatcatcgtcgctgttggcgtactgatagacattcggtgccagaacgttggtctgtattctgttctgaatcgtattctggaacagggcaatatcgacggaattcagggaatcaccgagtgtcgcgcccacttcaaactgacggttactttccgctttcagggaactgttgcccagatattgcgtaccggacagcgtaatataatccgcgcccagttgtgtggcggtcggcgcacggtaaccggtggcaacagaggatttcagattcagccagtcattgacctgatagttggtgccgagactccaggttaactgattatatgaggcactgccggtgaactgattatccaggttcggtgttttatcgaaattggttttcccgtaggtataacgcatcccgccgcggattatccagctgtcatcaaataaactctgccggtcatcgaaataaacggcatactggttttcagtctggttattatcatacggcgcggattgtttcagcggattgccgctgacactgacctgatcccgttctgaacgcagacggctgtattcataatcaacccctaataacagatcattctgctcatggagtttaatcaccggctggaatttcacgccgtaaatatccagctgacgacggttatgatcactgcgggtttttgcggttaacggtgatgcccagcggaaattatccacatcctgcacaaaataggcatggctgttcattctgaaaatactgtcatcggtgccgtttttccagaccacatccgctgagcggttataacgggtatctttggcgtaaatattcccggttgaaccccggaaaccgccgtcataaataccgtcagtccgcaaagagacatcgagcaggttactttcgttgatctgccagcctaaattaccgcttaagccaaagcgttcccagttggtattttcctgtttgtggccgcctttcccggaatggtaatcatcgcggcgaccggcttcaaacccgacatagccgtaaatatcgccgtcatcattctgaaaaccatagccgccgtaagtctgtgccagtccccaggatccggtttccgctgagattttcccgccttcgtcggttaatccgtttttcaggaaaatattaatcacgccgcccatcgcctgggagccgtaaataactgaagaggggccgcggataacttcaatccggctgacatctttcggtgataatttggataagttcgcggttcctgcccggcggccgttaactaataccagcacctgtccggcaaaatcttttccctgaccatccgttgcagcaccgcggatattaatggatgtctgcccgggactccattcactgaaaaagccgacactgttctgtgccagtaattcggtcagactttccgcccgtgagcgttcaatctggtcgctgtcgatgacctgggcggtaacagtggattttcgctgctgttcttcacgccctgaagcggtgacgattaacgtgtcactgtccggatcctgttttacgttattttctgccgcagcggaaaattgcggatatgacaggatcagtgaaaccagtgccagtttcctgctgtttattttcattgttaaaaactcatttttatataatgcctgaccaaaacaccggcggttaccggtgaatttccctgaaacaatttttctggaataagtaacatcaagtgttaatgagatccgttttcatcttaagaaaacagtgaaggctaagtcactaaaaaatatgactaaaaatccgaaacgggaaagcggtcaaggtaattgaaaataaaccgttataatcacatgggtgaattataaaaaaggtgagcagatgttgaaaatatgctgcgttgttaaaaagtcagcggcaccggaacggtaccgcctgagatggtcacaataagcggatgcggtgccggaaacggtcaataaattgctggttccagttgtcgccgccggtagcattgccgcttttccagattggcggttcaattccctgttgtgccagaagattgatggtctcggttatcagggcattgagcaggaacgcattggcaaaggtggacatggctgccacctgctgggttattcccgggatctgcataaccgcatcaccgacctgcacatgtgaatccagcaccaggtcggcgatatcacacagattttgtccggtagggtggcgcgcggggtgatctgccggtgtttccccggcgtgggcaaccgacgttactgctatcaccgtcaccccgcgctttttcgcttcaagggcaatatcaatgaccgaggcattaataccgtaagcattgataagtaccatgacttccccggtctgtacggggttgttattcattacaattctgccgaatcccggcagccgctcaattgccattgagcgcagcgcgccgtttgtcagcagcgttccttcatccaggatcgggttaatgtgcatcagtcccccggcacggaagaaaacttcctgagggccgagattggaatgcccgccggatgcccccacatggatcagattgtcacgggctatctgctctgccagcagggcggcagcccggggcagcgtgtcacggttgctgtccagcaccgtgtgcaggtgcgcggtgattttgccgagatactcagcggataacgccagcggatcagtcgttgtattcatcatcgttatgcgcggtaaaccgcctccccctgaagataggtttccagcacctgcaatgtgctgccctgtatatccagtaccacgatatccgcccgttttccggcagcgagtgtccctctgccggccagaccgaggaatgcagccggattttcggcggcgtaatgccaggcctgttcagcgtcactcagtccgctgcggatcagaaagctgatgcattcaagagctgactgcgcagaaccggccaacagttcctcatttgcggccagatgcagacggccttgctctgtcagcaccacatcaccgccgatatgggtgtgataacggcccggagccatgccgccgaatgcggtggtatcgctggtcagcagaatttttccctgtttggcgcgcaaaatcactttgatcagtgacggcggcagatgaaaaccatcggtaataatgccgctccataaactgtcttccgccagttgtgcccagatcgggttgtgatgacggtgcatctgtaattcacagccgttgccgaggtgggtggacatggtcgcgcccagctctgcggcacggtggatttgttccggtgtcgcagcggtatggccgacggagacccggatattattctcagtacaaaagcggatggtatcggccagtccgtcttcctgctccggggagagagtcaggatccgcagcagtccctgagatacgctgtgccagtgacggactttttcagtatcacaatgctgcacacaggctttatcgtgggcaccgcgcggcccgctgaccggcgaaataaacgggccttccagataaatccccgccgttgaggcacaaatacggggatcggcggcacaaaaggcagcgaaatcagccatcagctgtgaaatcgcctcatcactgttggtgataacggtcgggcacaggctggttacgcctttctgatacagtctttcgtaactgtggcggacatcatcccggtgcagcggcagggtgttgtaatcggttcccgcatagccgttgacctgcagatccaccagtccggcagcaacatatggcagattttccggggtatcggtattcagcggctcaataccggtaataacgccattgtctgctgtgatggtgaccggcttgccgttcagggttttaccgcagatttgtgtcagcataaatccgctcctgaatcggtatccagataaagaaatgcactgttatggcggcgcagaatggtggcaggcagatctttactgatcggatcacggatcatcctggtaaccgcctgccgtttggtggcggcaggcaccacacacaccatatgacgagcgctgacgagggcaggaattgtcagggtcagggcatacatcgggacatcatctgtccgcgcaaaacagccgtcattaacctgctgctgacggcactgttcatccagtttcacccgtttgacaaccgcgctgtcactgaaatccgccacccacggatcattaaaagcaatatggccattttcaccgacccccagacacaccagatccaccggtgctacagaaagcagctctgcatagcggcggcattcggcgtcactgtccgtggcatgcgcccggataaaatgtgcggccgccggtttcaccgcatcaaacaggtgatcctgaatatagtggctgaaggcctgcggtgcaccgggtggcagaccgatatattcatccatatgaaatgccgtgacttttgaccagtcgatttccgggaatgtctgcagatgctgtaaaaattcattctgagacggcgcagaggcaaaaataatacggacttccggctgtgatgcctgacactgaacaataatatcgcgggctttttcagccgccgcgcgtcccatcgcatcacggtttgcataaacagcatagtgcagcaggtctttctgaccggcagtgacaagagaatcagtcattattattttcctctgacaggttgaataacgccccggtaaaaaggtgctccgcctgtggtgcaaacggggcatcaagataaaagtagtatgctgaaccgtgtggctcatagccgccttcggcgatctggcgggctgacggcaggtaaccggccatgccgttgctgtagccgacccccaggaaatattttcctttggcgcgtaataattgctggtagtgattcacaacttccgcactgacggtcagcagtttcagttgcggtgaaaggtgcaggcaggtcagggtgatggtttgtgttggccgcagcgggatcccgcgtgcggtctgcttcagtttgtaaaccgcccattcatgttcaatcgtgtccggcgcatgttcatcacggaactgaatcagttgttcgttattcatcaccggctgtaagggcagcgaaacctgacgctgccggaaatacggcgggacggtcagcggaagaagcggcaagtcaggctgttccagcgcatcgaggaaaagggcggccagttgttttccacagatttccatctgcgtataatccgcgcggtaaaactgcccgtcacggctcaggtcagggcgcagatcgccgcagaatccctgtaacaacatacagacggcccccgggaaggccgtttcaatttcatcacacaccacacccggatattccccggagagaatattgtcgccggtaatggtcgggtgacactggttatgtaccagcaccgcacacactttttgctctgtatctgtaaaccgcaccagtgtggcggtggtatctgccggctcctccggattcggcgccatggtgatttcgccgttgaccatcagccgccggtgaaccgccagggggcaatctgacactgcaacctgcgctgttaccggctttccggcggccagtgctgtccgcaggccggtaataacctgttgtgtgataaacgcagtgtattgcgggtcacattcacccagttgcggcgagtggttatccgctgtctgaggcgcacagtggctgtgggtggcagtcaggatcagatccagtccggccagttccgggatatctgacagtgccgtacggatctggcggtcaaggttatccccggtaaacagcagttcaagactgacaacagcatactgccggttccagataaaacagcgggcatacagcggcatgccaatttgtgtgcacggctgatgccggaacgcaaacccgcccagtctcaccggcagtgacggtgtgatatcggttttactgacgccgaggatcatgacggctgcccgcaaagtgagacaatcagttgcagattgcgcatgatatggaacggatccttcaccggcagcgcaaccaccttgttcagcggcgcgccttcgcgatcacggatttgtgtccattccccctgttcacggttcgggaaagtgttcagcacatagtctgccgtctgctgatagaggctgaaaaattgcggatcattattctgttccgccatcagcagcagggtatacagtgcttccgaatgcacccaccagattttactgctccaggtgtccgctatcagggtttcatacggatcaccgcctaataaccgcccggccggcggagagccgtctgcctgggtataacggaacaacccgccgtattgatcatcccagcccatgtgccacatcagtgaggtaattttcgcaatggcaggcagatacgtttctgtctcaccgagcagttgcgcggcatggaagcagaaccacatgttttccagggtatgccccggtgttttatgacgggcgagcagggtatcgcggtgctcagggacaaccttcatctccagcgggatcagggtttccggatcgtgaaattctgcaaaaatccgctgaagactccgccgtgtcagtgttgtcagccgggaaagcgccgggtgctgataacggagtgcataacgcagcagttccgttaccgttcccagcataatcatttcataggcatagggttcaaaccccggcggcgcgggatacggctcacttcgtacccggccggatgccagccgctgactgacattgtcatacagtgccagtgcatgctcaaagtacccgcgttctccggagacaaaagcgtattcacacaggccgatcaccacaaagcaatccgcgtaaaacgaggtgtcatatccctcgcccggcttcatttccagcttactgccatagcgatccagtaaaaaggcgcaatggccgttatcgaggaaagcatgattcagcagaaaatccgcggtctgttttgcatgggccagcaggggggctgcatccccctgacacaacccgctgcggatgagcgccgcctgacggctctcattccacagaaaacgcccctgggaccaggtaaatttattctcactcagcagcgtgccgccgtcattactgaagcaggtaaacacgccgccggactccgtatcaaccgcccgcagccagaacggcaggatgttctgttccagctcctgctgccataaggcgcggcattgtgctttctgttgtgcggttaatcccatatcagttgcctccgtcacggctcagtttgtgcatcagggcatctacttccggttttaccggatttttgcgtgccacaatggccgccagggtaaagaacaccagagagcagaagacagggccgccgactgataacgccattgacggtgcggtaacaaacagtttggttccggcaaagactgcaagaccaatcagcatggaggtaatggcaatcttcggaccgcaatgcttatagaacggcagcagacccagaaccatcggaatagacgccggtccgattaatccgccgaaccacaccacaatcagcccgataatgccgccgaaatgctcctgattcagcgccaggacaatagtgcagagggtaaaggtgaaggtgacggtacgcgccatccacagcggggtttcgccgttggctcttttcacttttttcgagataagcggcaggatatcccgcgacagcacggagctgatagcgttggcatcagaggccaccatcgacagtgtggcggcaaacatcgacgcgaggatcaccccgacaaatccggccggcagatatttcagcgtcagcatggagtagatttgtgtctgctgaccagcagggacatccgggatcagcagcggagccgcccacatcggtgcaaacaggatcagcggccagaccagataaagagaggcggacaggatcatcgcgcggcgtgcctgtttgccgtccggcgaagcgataaagcgggacgcaaggttccaggtaccgccgttatagctgaggaaacagacaaacgcgaagctggcaaagaacagcgggctgtactggccgttaaaccaatcactgttaccggccggcagtctgtcccacatatccagatagttggtgccgatatcccccaggtgatactgcaccacgaagaacataatgatccccgcagcaaccccgaccaggaactggaaaaagtcattcatggtatcggcccacagcccgccgacggtgacataaatcatggccaccacgccggaaatcagcacaccgtaaatgatcggaataccggtaaagccatagaacagcacgccgatcgccgcgtatttcccggcggtatcaagcagtttcagcagaacgcccagccaggcgatcacctgctgggttttaacatcgtaacggattttcagatattcggtcggtgactgcacctgtaacgcatcacgcagccgggcccagcggggaacaatcagccacgcaccgagcagacaggcgatagtcacgttcagcgcccaccagacatacaggttaaacccggttgcataggcaagggcggcataaccggtaaacaccacgccggaatacccggatacgtgatgggaaatcccggccagccaccagggcagaccaccgcccgcaacataaaaatctttggtacctttgacacgacggtaggcatttaagccgatacctatcatgataatgaagaaaagtgagagtgttatccagtccggcgtttgcatcttattgattccttataattattttgtcatcaacatctacagtaaaaacgggggattgcgggtactgacataaaatggataatcggcagcagagaactgcttatcctgactgtacattaattacacatgctgtaaatatatttaattccactgtatgttattaattcgatctgactcacaattcaacaacaaacacggcataaaacgtgatgcacttacggagagcctcaacgagactaaataataaacagtacgatggttataattcatcacaataatattagttatggcatgatagtcttctgcggataaaggtaagtccgcgcagtattaccaaaaggacagatatgaaaaataaatcattgctgattatgctgttattaataacggtaagccatgcgtactcagatacggcattaaatgatgacagtgttgcgcaggaaataacattggcacaacagggaaacagtgatgcccagaatcagctggggatccggtatttcaatggcaccggcactgaacaggactatgcagaggcaataaaatggtttcataaagccgcggagcaggggcatgacgcagcacaaagtaacctcgggataatttatttgcacggtatgggaaccccggaaaatcacgcactggccaaagagtggcttcagaaatcagcagagcagggatatccgcaagcccaatataacctcgccgttatgtatctcaaaggggatggtactgataaggatccggtcaaagcaaaagcatggtttcagcaagccgcagagaagggctataccgaagcgcaaagtcagctcggggaaatgtatttaaacggtacgggaaccctgcaaaattataccacggccctgaaatggcttcagagtgccgctgaacaagggaatgtctctgctcagtttaaccttgcggttatgtacttcgaaggccttggtactcagcaaagctatcaggacgcattattgtggtttcagaaagccgctgaacagggaaatgctgccgctcagtttaatctgggattaatgtatcaggatggcgcaggcaccccggctgacctctcactggcagaagagtggtatctgaaatcggcgcagcagggacatgcccccgctcagagcaatttaggattgctttatcttcagaacccggaaaaacaaaataatcgcactgccgccatggaatggtttcaaaaagcagcagaacaaaattatgctaatgcgcaatataatcttggcatgatgtataaaaatggtgatgctggtgttcaggataacgtactggcaataaaatggtttctcaaagcggctgaacaaaatcacgcctctgcacaatttaatcttggtatgatgtatcagaatggtgatggcgttgaaaaaaatgaaaaagtggctcaggagtggtttcagaaagcggaacaacaaaaaaccaaatagcatcatttaatgtgtgatacatacaggataattacatcgcctgttcttgacttatcaggtaaacggctgaaaatcagtctgttcctcactcactgaaccggaaaacagatcattatggtgaaaccgtcactttcgtcagaacgtaaacagcatctgttccggcaaattctggacggatacaaaacgcaggcggtgatcacccgtaaagggcttgcgatcaccaacaagctgcgcccggcgacggtgacgcagctgatcggcgaaatgatccagagcggcattattgctgaggatactattaatcaccagcccggaccggggcgcccggaagtcggtattattccggatttccggttactgaccgccatttttatctgcattgatgcccgcaatattaccgcgtcgctggtggatatccggggtgtggttctcgctggtgtgcatcagccggttcatgatgataatgctgacagcgaaacactcctgaactgcttccggacactgatcagccgcctgctgcaaaactgccgggcggacacccgtgtacaggggattattatctcgctgccgggagttatggacgcggaacactgccactggctctacaccaaccgctggccgaaagcccgccatatggatttatcacagctggctgcggagttttccattccggtttgcctggtgaaaaacttacaggcggagctgaatgcctttgtccttgaaaataatgaactgtccgccagacgcgtgctgtatgtccactggggggaagggattggcgcggcgagctattcaaaacagcagatcaatgccaaccagcaggggctgttcggcgagctcgggcaactgacgttcggtaattcacagacgattgagcaaatgttttctctgtccgcactgcgcggtgtgctgagtgaggcgctgcccggggatttaagcaatgagcgggcagcagcaaaaacattacagcatgcggatattacggccattccgtgcctgaaaacagcagcggatatctgggggcgggtgctggcaaatatctattttattctgttcccggatgtcattattttctccggccctttcacgcacaatgaggcattattccgggaaataaccacggggttcagtcagcatgtcccggattattttgagcaaaatgtcactttcaccatcaaccacaaatcttatatgaacgaaatgcacggcgcattatccccgttctttgatgcgctggtggcagaatattgccaccagggtagttaatcagcggataacctgaacagagcggatttttttaccataaccagtcacattcttttttccgctcacttcagtatgagattcaccggtgaaattctcaccttcataaaaacggaccttccagcccggcggaatgaccactgaagaaagggtgccgctgaaatcggagcgggataaatccggaatatcttcactgatctcaatataatttcccttctgccagctttccgaataaataacaacggctttgcgcaaatctgactctctggtaattaatttactcaccgaacatttcgcatcggcttctctgcagaaaatactgccgtcaccctgtgtcatctgacagcggcgtgcggtatttttccgcgccaggtcttccgtgctgcccgcctcaatatggaaatccgtaaagggcgttaatctgcagatataaatcgtatcaggttgatggcggtaacctccgccgcgggcggagacaaccgcggaaaataatatcagtaacaatgtcagctttttcatcgtgttccttaccgtttagtgtctgaacagggtaagagagtgttcaccgccgggacagcagatatatctgataagagatccgtccggatcttcacggatattgacaattattaataccctggtaaaaatagacaaatcagagacaggcatcccatgtaacggacaaattatcaggaattccgtgagggttttaccctgataataatcataaaaaagcagataatgatgatgaacaaaacactgactgtatttacccgggaccggaaaattgccgctggcagcctggcagacgttatccggaccataaaagcgctgccggtcacaccggaagctttatttatttttgatgaccagaccggcacccggctggaaattgatttctccggtgaggccaatgccgtttatgcttcggcagtacaaacgtatccggagtttcatgacaatagcgcctcagaaaataccccggagataaaacaacgcggccggccaaaattaggtgtgatatccaaagaggtcaccttattaccgcgtcagtgggaatggctggcgtcacaacggggcggggcatcggcaactctccggcggttggtggatgaggcaaaaaaggcacccgccgccgttgaacaacagcgaaaaattattgaatccgcatataagtttttatcagaaatggccggtaatttaccggactatgacgaatgcttaagagcgcttttcgccaatgatgccgccacatttgaaaaactgacccgtacctggccgcaggatatccgtgaacacgccattaaaatggcatttaatcagtaagcacagattatgataaccgatcttaataagaaaaatgcaaagcaggaatttaaggattcaccctcagccgccggtgtttaccttatcaggaatacaataaccaatatgcggttgctgttgtcagcacaaaatgcccggggcgcattaaaccggcatcagtttgaactcagatatcatcagcatcgtaaccaccggatgcaggcagaatggaatgaatatggcgaagcggcgtttgagtttatattactgaaaaatgttaaaccggatgaaaaaaacatcaaagaggctctgagcaatatgctggatgagtataaacagcaatacgggagcagtgacagtaatacctggtattgatccgccgccgggggaacagcggtattttgtgatagcacaccttaacttgattttgcgccataacggcgaataatggggcgggtaaaattcacaaatatacgcagttgtttattccccggggtttcttcatggtcagtggtttatttatcggcatcctgttcggcgggttgctccagtcaggtcagttctgttttgtttccggattcagaaacattctttaccagcgaaatacccggtttcttaccgcactgctgattgcggtcactattcagtccgtaggtttctttgccctggaatccgccggattattacatataccggaaggaaatctgccagtcaccgcaacacttgcgggtggtcttttatttggtgcgggcatggtactggccggttgttgcggcagtggtgcgtggttccgttccggtgaaggattaaccggcacctggattgccttatttgcctttgttgttaccatggccgccgctcagaaaggcagcctgaaacattggtttgaacccttattacagcatcctgcacagccggatacgatttataaaacactggatatttccccgtggtttctggtcgcgtttttaattattctcaccgccggattactgatttatcagtattatcacccccgttatacgccaccgtcacagggccgctttaattatctgccgctgaatattaccggtatgctgatcggcattctcgggattattgcctgggttttcagtgctgaagccgggcgtaatttcggctatggcgttgccgttccttccggcaatgttattcagtatctgatcaccgggcagcagcgttattttaactggggaaccttatttgttatcggtattttcgccggttcaatggtaagtgcggttatccgcaaagaattcagattaacacttccgcctgatggtattaccgtcgttaaacgcctgatcggcgggattgtgatgggagcaggggcaacactggcaggcggctgtaccgtcacgaattcccttgtggcaaccgcttatttctcctggcagggatggatttccacattcatgattatggccggtgtctggatcaccagttattttttccgttcagggcaatgtcgtttataggatcacatatgaaaacaaaatcactctttcttctgataccgttattactgtccggttgcgaccagacggtggtaaaagagatcggcattgaagaattgtcggagaacctgaacaatccggaatatatcattatcgatacccggccggacagtttatatttcggctttaaagataaaggcgcggcccgtggcggccatattaaaggtgcgatgcagtttaccaccggctggctggattttatcgatgaaaataagttcgatacgtttgttgaagaaaaggggatttccaaagaaaaaaccctggtattttatgacagtgacccggattcactggaacgtattactgctgaatttgctgccaaaggttttcaggtcagggcatttaaatcctttatccagtacagcaattctgatctgccgatggataaatacccgaattattttctgagtgtttctcccgcctgggttcaggctgcactgaatggtgaaaaaccggaaagttataccagtgataaaaagccggtgatatttgaagtgtcctggggcgatgcggagcaatcaaaatcctatgcaacgcatattaaaggtgctttccattttaataccgactggatagaaaatgcgccggtctggaatttatccgaacctgacgttatcaaaaataatctgctgaaaaacgggatccgcaaagataccccggttgtcgtctattctgaaaatcagatggcagcattgcgggtattatgggcgctgaaatgggccggtgttgaagatgtccgtttcctgaatggcggtttaaatgtctgggcggatgcggaattaccaacggaaaccacactgaatattccggtgccggttgcggatttcggtgcggaaattccggttaatccgcaggtcactattgagatgccggcggaagccatacagggtcagaaatccggccttaaacttatcagcaaccggacatgggatgaatataccggcaaaatctccggttatgactatattccgcgtaagggtgaaccggccggggcaatatggggattcggcggtaaaaattcgaatgatatgtccgattactatgacccggacggcacattacgtaatccggaagagatttttgctttatggaaaacgcagggtattgaaccgaccgatcaggtcgcgttttactgcggtaccggctggcgggcaagtgtttcctggtttatgacccaactggcgggctgggaaaacagccggatttatgacggcggctggaatgcctggcagatggatcctacattaccggttttaaataatattcagagccaaaaaccggcagcactgaatgattatggtgaaataatcaaaaaaccgggacaatcctgtaaaagctgatttaactgaaacaccggtttccgcagaaataacggaagccggtattattggttatttaccatgggccttccggccagatgctgtctgtttttttagcagcatcatccagtgaatcgagatataagttctcaacctcggtacgggcccagggagtacggcggagaaatttcagacttgattttacgctggggtcatttttaaagcagttaatattgattaacttacccagctttgcccagccatatttttcgaccagtgcattaacctgcatttcgagagtaacgccatgcagcggatcattggatttgtgggctgtcatgaatgaatatcctgttattttgcctgaaccgggaagaataccgcaaacgccggagtatgacaattatccctcccggcagactcattccgtattacttcaggatctgcattcttccgttagtcaccttaccttcactgactaattttccggcagtatcgaattgtttaactgtaccggtaagggcaccgttttccatcgtaccttgtatatagaccccattactggcggagtcgtgataatatttgaacgggccatataaccgtccgtcacggacagttacttcactttttaaaataccgaacttaatattaaaggcagggtgatacgcataataatcctcgcaatagcataaataaaagtacgtatatatttgtaataacttaaaaatatcgttccgatattcagaatagagcggaaaaatcgcgctgactataggaaagggattactacactgaaaaacaaccggttttgctgtccggcaaggttaaaacagaataagccagacccgaatcgattgaaatatgaacataaaaaatctgagacagtaactttattgtattaaagtgaggataaaacagcaaatacagcagctaattatcgtattgaagttgaggtcgaataatagtatgaactcacgtttatacaataaaggctaaaaatgaaagatttcagcaaatataaaaaaactctcaatcaattagattattatgtctatgctttgtgtgaaataaaagaaaatctccgaattccattttacatcggcaaaggaaaaaacagccgctgtctgacacacatcagcgacgctatgtcagaagtggctgataatgctgaagatatatcaaatgagaaactgaagcggattaaagagctctacgaagaagaccgtctcggtatcgatatattgtgtcacggacttaactctgaaactgcatttatggtcgaaaccacatgtatagacctcatcgggattaaagggttaaccaataaaattaacgggaaaaagagtcccggtaatgatatttataagacacagggaaggttaaccatcgaagaagccgcttcatggtattccggtgaaccaactgaggtttcaaaagaagataaagggcttgtctttattttaaacaaactctaccggtttgatatgactgagcaggaattgttcgaagcaacccgaggtgtctggcacaatccgccacgcaatgatgaatctctgaaatatgcctatgctgtttacaacaacattgtaaaagaagtttatgaaattcatggttggattaaagccggtactcaggagtactttacaaggaagatcggccgtgacagtaatcgctgggaatttatcggcagaaaagcagagcagtctatacgcgataaatatgtcggaaagataatcaactatgaccggagttatggtacaccgttcgttaaagtgggaaacacaccgggcagtaaatgatggaacaataactaatttgtacaatatccgcgaactgacggatattgtacatcagttcacgttaccggacaggagagcagggaaaaccaatgaacgatataacacattgatattattgtatctaatcagcaccagcacctcccatatatcatttaacataatatacattatgcgaatcaatgtgtgaaatgatgaaatccggcgttctagctggctaatcgtattggttcatttaccgctcgtaaccgttctttgtctccgcccaggttattgacccgcacttgaccccaaacaaaaatatgacaacgcattgcttctataattatccgcttatttactctcatatagatgtggtcacatggttaacaaactgaatcttaactggcctgaatttttagaaaaatactggcagaaaaaacccgttgtactgaaaaatgcatttcctgattttgctgaccctatcacaccggatgagctggccggcctggctatggagccggaagttgacagccgcctggtcagctttattgataacaaatgggaagcgagccacggtccgtttgaggactacagccagttaggcgaaaaaggatggtcactgctggtacaggctgtcaaccattggcatatgccggctgcagaactggtgaaaccgttccgcgtgctgcctgagtggcgtcttgatgacctgatgatttcctactcagtgcccggcggtggtgtcggaccgcatattgataactatgatgttttcatcatccagggtatgggccgccgccgctggcgtgtgggtgacgcccttcccatgcgtcagttctgcgctcacccggcattactgcatgtcgatccgtttgaaccgattattgatgtggaaatggcgccgggcgatattctgtatattccgccgggattccctcacgatggtttcaccttcgaagataccatgaactattctgtcggctttcgcggaccgaccggacgtgatctgctgagcagctttgcagactatgcactggaacaggatctgggtggcgtcaattatggcgatcctgacctgaaagtacgtgaaaactcaggctcaatggaatcttatgaggttgaacgcctgcgtgaaatgatgattgagatgatcaacaagcccggtgatttcgaacagtggttaggccgttttgcaactaccccacgccatgagctggatattgcaccttcggaaccgccgtatcagccggaagaagtactgagtgctctgaatgcgggtgaaaaactgatacgactgagcggattgcgtgttctgcgtatcggggaacatttcttcgttaatactgaaggctggatgaccaccgaaatgaaaggtgcagaaacattgtgccggttaacagaagtcggcgtgaatgaactcggtgaagcactggagaacccggtttttgttgcggaattaaccgaatttatcaatcagggatattggtatttcgaagaataagtcaattagcctgacaagatagaacacccgctgacgggtgttttatctcagcgtttcaaaaacctctcattcactacgctcagccatgataaattggccggatgtccatccccaaatatttccttttttatgagatagttcaatgagtaagagtggaagaaactatacaaaagaaaaaataaaacagcgccatatagcaaataaaaaaagaaaacaccctattcgtctttttatcagaagttgggattttttggggtaaatcctgatgatgtccttcgtcattatttttcagaatcaacatttgaggatgttattaatggtagtagcccccgggggcttggcggattgtatctgatgcttattattccgtttatcattccgctggcagcgggatattttgtatatcagattataaattacaaataaaatctatcgctatttaatcatgtccatctgtatgatctgaaaacaaccggaatcgccggaaatccacaccatcatagttaacagacccatccggctgaaatccgtaacgtgttataaactgggaaactttccgggataacggtaataaaatggtgatactggttaagtgcatttcatcaaatgcgtggcggataatttcatcacagatgatttttcccgttccccagaaatcaggatgaagtaccagcgccaggtcagcatcatcaccttctttctgaagccctccccagcctgcaaatacatcgtcgatcacaaatgcccaagggccatatccgtttatttcccactgagcgtctttttcttctgcccagctgcggcttttttcatcatcaaaatccgggctgcccagcggcatttgctgtaaaactttcgggtgattgttcagcgcggtaatatcggccagttctatctgagtgagccgtttaaattctaagtgcatagtattccttttattttgatgctctgattgtacctgttattcagaaaaaatcagctgaataacaggtacaaccccctcttaacttacagccacattccgaaacggcggatataaatgcccttcatgatttgcgccagaccgcaatagctgaccagcgtagccgccagccacgggaaatattcccacggtaatggctcaagcccgatataacttccgattggtgaaaacggcagccagataccgatggccataacaatcccggtaaccaataataccggcagtgttgctgtgctctgaataaacgggatccgttgtgttctcagcatatgcacgaccagcgtttgtgataataaaccttccacaaaccagccggaatggaataaaacctggctgtccggactgtttgccccgaaaacaaaccataataatgcaaaggtggtgatatcaaatacagacgatgtcgggccaatccagatcataaagcgccggatattgcctgcatcccatttacggggtttacgcaggaattctttatccattttatcccacggcagcgccagctgagacatatcataaagcaggttctgaatcagtaactgaatggccagcatcggcaggaacggaataaaggcactggcgataagaacagaaaatacattaccgaagttagaactggcggtcatattcaggtatttaatgatattaccgaatgtctcgcgtcctttaatgacacccgcctccagaaccatcagatctttttccagcaggataatatccgcggattctttggcgatatccgttccactgtccacagaaattccgacgtccgcatcccgcagtgccggtgcgtcatttattccgtccccgagaaaaccaacggtatggccggcggattgtaaaattctgaccagggctgatttttgcagcggcgtcagtttgcagaaaatagtgtgtgtttgtgccacctgtttcagctcttcatcactgaggagcgccagctgatcaccactgatactcatcgaggcatccagcccgacttcacggcagatttttgccgtgacaaccgcattgtccccggtcagtacttttaccgttaccccgttatgcttcagtgctttaagggcttttgccgcactgtctttcggcggatccaggaaggtcagaattccgcataaaatcatattctgctcgctgtctgcagagagcggcaatccctgttctttgctgtccagaacccgctctgcgagcagcagcactctgaatccggtctcattataatgattaaccagtgccataataccctgttttttctcatcatccgcaggagaaatatgattgccggtccggatcagagaacagcacgccagcatctcttctgccgcacctttacagataagcaaggcggtaccatccggttttcttactgacacagacagacgtctgcggacaaaatcaaacggcagttcatcgattttctgataactgtgcagagactctgtttcggctttaccgcgcccgaaacggatgatcgcctgatccatcaggttacgtgtgccgctctggtgaaaactgttcagccacgccagtcccagtatggcttcatcggtattaccctccgtatcaagatgatgctcgaggataatattgtcctgtgtcagtgttcctgttttatccgtgcacaggatatccattgcgccaaagttttgtattgcattcaggcgtttaacgatcacttttcgccgcgacattgcaattgcgccttttgccaggttagagctgacaatcatcggcagcatttccggggttaacccgactgcgacagcaagagcaaagagtgtggcatcaaaccagtcgcctttggtaaatccgttaatcagcagaacgaccggcaccatcactaacataaagcggatcagcaggatactgacactattcaccccgcggtcgaatgacgtctgtgagcgtgtcccgacaatggatttcgccagtgagccaaaataggttttgtcaccggttgccaccacaacacccagtgccgtgccgcttgccacattggtgcccatcaggcagatattgcccgattcagtgagtgattgtccgttttccgttatcgttgcggcatctttttcatggatatctccctgggtatcatatttttccaccggaaccgattccccggtcagaatggcctggctgataaaaagatcacgggaacggagcagccgcaagtccgccggtatcatatccccggcgctcagaaccacgatatcccccggaaccagacattttaccggcagttctgcccggacagatcgtccttttttacgccggagtaccgtggcagtggtttttaccagtgatttcagggcttctgcggctttattggttctgtattcctgccagaaacgcagtaccacgctcagaaaaaccatcgttccgatgatcagtacaccggtaagatcagtgtcttcgccctgttgcagggggatcaggtaatccgtcataaagctgatgacagccagcgccagcaacacataaataaacggattatgaaatgcggaaataaactgaataaacgcgggaggtgctttgtcatgtgccaccacgttttcctgatgttctatcaggcggtcaagggcatcaatttcatccagccccagcatatcagaatgtaattctgctaatgtttcatctggtgtttttgcggcatataccgccgcagggaaagtattattatcgcgcacagccggagtgacagtgcggttaacgttgacagtcatggtacgattccttttatttcctcagataaactgagtcatttatttttcaccggactgtctgatttaacagctaaattaaataactgtcataataacggacagtccgggaagtggtatatttccgggcccgggtggtgtgtccatatattccttatcagcaaaagatagtctgtacgcttattcataaatgaatacgtactgtgaattttttaataaaaagccatgtcccttccgttttgaataaacggaatagcagaatacggtgcacaagcacggcaatttaaattgaattaactgaaaaacaatcagttaggagggaataacgccagcatatagagattcatgataaatccgtcctttcgggcctatcccgtgaaagataagcgaaattaaataaggaagtaccattataaagagaggtactgccgcagcattactgccggcagtcagaggaaaacagaattaccggcaggatcaatgtattttgataaataatctatgactgtccaattacgtgttctccgcaagaaataaacacatggagtatattcccgtaaaatcacaaagtaaatcgttttctctgaggggaaaacaatatacataatagtattatttatttaaacaacacactgatttaacagcgtatatacgataaaacagtatcccttttcactgtttataaatatccggtctgacaatctgccagatataattttcccggttgaccgggctgtaacccgatttttcatataaccacggcgctgacgatgtgaccagcataatgcgtctcagccggttcatcaccggatgtgactgacagcactccatcagccagcggctgagtccttgtttctgatattcatcgataatataaacatcacagagatacccgaatgtggccccatcggtgacaacccgtgcaaaaccgatttgttctgtaccggcaaataacccgaaacacaggctgttcaatatactttcattgaccaactcccggctgatcccttcagcccatgcggaatgcgtcagatagtcatgaattttaccgatatccagcctggtgatatccgttgttacggtatagtgccggtcatgccattcgtgaatgcttttcataacatcataaatccatcaaataggtaatggtgtctctgaccgtcatcagtgcggattccaggtcatcatacggcagtgtgctgacagccacacggatagcctgcgggatatcgcgcgtgacggcataagattccgccgggctgacggcaatattggccgctctcaggcggctgataaccgcatcgcagcgtacattttccggtaacgggatccacaaaaaatagccggccggatgtgcgatatggggtaaatcagcaaaaatccggctgacaattttttgccgggctttggcatcgcggcgctttttctgctccagtttttcggcttcgccctgctccagccactcacggacaataccggtcatcagtgctggtgtattccaggtagtgatgcggatgattttttccagctcagcaatatattccggaggcgcaacaattaatccgacccgcaggccagtggcgatatttttggaaaatccggtgacataaaatgtgatatccggcgccagttctgccagcggagccggtgctgatttctgcagaaaagcataggagccgtcttctatcagaaaaaaacggttttcccgggccaaacttatcagcttcctgcgggatgtcagatccattacccagccgagcggattatgcagtgtcggcatggtgaaatagccgcggattttccgctgacggcataattgtgccagcgctgccaaatccgggccctccggggtaaccggcaccggaaccaattcgatatgacaggtttgtgccagtgctttaaagccgggataagtcagtgcatccgctgcaatcacatcaccggggctgaacatgctcagaacaatggaagccaaaccgtgctgggctccgctgaccatgacaacagtatccgggtcaacggcagaaaaaccacgtaacttcaggtgatcagcaacaacaaccctctcctgatgccgcccggcgtgaggcagataatgcagcagactttccagatcgccgctcatggataaccggcgcagcgtgtggcgcagtaatgcggtctgttccgtgacttccggatagataaaattaaggtcatacattgccggagtgacatcacactcaataccggtaaccggtaataagctgatatctctgacaaatgttcctcgtccggtttcaccactgaccagcccctgattgatcagttcctgatacacacgtgacgctgtcactaatgacagcccttcctgagccgcaaaagcacggtgagtcggcagttgtgttccggctgccagttcaccgttacggatacgggcagcaagggtatcgacgtactgtttataacgcggcgttgccatacaaatgtatccatgacaattttttgattgtcattattatccgcattactctctgtgataacaagacgtaattaacggagtacaggatggataatgcaatgacaacggtttcccgctcaacacgcggctggatcaacggttttatcggcgtgctgattttcagcggctccctgcccgccaccaaggctggtattaccggcttcgcaccggattttctgacaaccgcccgcgcagcgattgccggcattgccgctctgctcattctggccgttctgcgccagcgtttgccagctgcaaagtatctgttgtcactgatcgttgtggcggcgggtgtcgtcgtcgggtttccgctgctgacagcccttgctcttcagtatgtcagttcggcgcactcgattgtgtatctgggattgttgccgctggcgacagcactgtttggtgtgctgcgcagcaatgagcgcccgcgcccggcgttctggtttttttctgtcctcggcagcctgtttgtgatgggatttgccttatttcagggcggtgaaagtactctgacaggtgatttgtatatggtagcggccgtgttgctgtgcggattgggttacgcggaaggtgcccgcctttcccggccactcggcagctggcaggtgatttgctgggcattggtgctttctctgccgctgatgctgattctcagtattgttttcctgccggtgacattcagcggcataccggcacaggcctggggcggactgatttacgtttcgttattcagcatgctgattggttttttcttctggtatcgcggcctggcggaaggcggtattaccggtgtcagccaactacaactgttacaaccattttttgggctggtgctttccgcgtggttactgaatgaaaccgtcagctccgtaatggttgcgtcaacctgtggtgtgattgcctgtgttgccggttcaaagcggttttcccggtgaggaaaaaccatgttgtgcccggtatctgccgggctggctatttccggaatattaatggccgtacggtgcatttattgaaagttatgcattttgtctgcgttatcctgagagctgacagagtataacaatatcccgctgaccattaattttacacggagattttatgaaactgggttctgttacagcatccccggcaccggatatttcgttttcaccggataatttagcggaatgcaggaaaacttctgatgtcagcctgatccgatactgtgaaaatctcatatttaaggacagtaacttcattcagtttttacgttttaatggtgcgatagatttaattaacagcactgattccggtcgcatactgcttaattgtattgaaacactgttgcaatttaaatcagaaaagctggtggtacatctcacatcatcagaactcgccactattcctcatcgtgtcaaagattcaggaaatggccggggtacaggcgctgatttgcattgtcattttgatctggcagatcaacggaacagcaaaggtctgagtgaaaaacaatttcacgcatctgttttgtatcatgaattagtacatgtactccattatctgcaaggtgaatgtatacacattattcctgctgattcccctgaaagtatccgttatccttattgggaggaagaagccagaaccattggcttcggtccttttacatcagaaactatctctgaaaatacttttcgtgcagaaataggtgttccgctgagaattcactggtaacccactccctttcgcgatgccagtataccggcgacaaccagatacagcgcaataaccagcggtaaaaacagtatcgaatcgctgtaaaccgccgctgtcattgccgcaccgattgccagtgaaatgcccgagataccgtcgagaaccgcaattttacggggcgaatccgccagtgtaatcaatgtatcgatacccgcaccgtaaaacatttccagcagagtgacgcccagcaccatcagtaacagaccgggaagttctgcaataccggagaaccacggaataaacaaaaaaatgcataaaccggttgccgccataagcgcggtaataataccccacttctccgtgaagtaacggtataccgggatttgccctgcgataataaccagggtattaaacaacaaaaccggtcctatcagatactcagtgccggaccggataagttccagcggcacaatgacttcaaaactgtaatacagcatggcaaaaataatgctgaccacagagatcagaacggtgtctctgccggtgagatcagaaaaatggaggtaacaaaaacgttttttcgtttcaccgggacaagaacgcagttttgctgagaagagaataccaatcatgaaaattccggtcagaatcagtaatgcgtacgtaaaaggcagtgaaaaaaagacacacagtgtaatgagtaccggtgcaacagcagcacccgtattattcagcgtcatccggactgaaaaactttcgctgatattttccgcggtggctttaatatagtattttgctgctactgaaaatacggaggtagcaataccgtttgccagcatcaccacaagacacaggtaaaatgtttgtccgataaataaaaatgacagtgacagtaatttaagtaatagtgaaaaaacaatggtttttctgctgtcaaaccggcttatcagcggaataataaaaaaataggccagtgaaaatgaccagaatttaatcgtgcctagatacagaatttctttttcactgagtgttttcccggcaaaataaagtaatgccagcggcatcaataacccggagcccagcgcattaaagaaaaagcagatattaatcgccctgcttttccgttcaaaaatcacccggtaaatctgcatcagctgaggttccagcgctgacagatagccgtgaaaatattttttcctgtttctgtcagtatggcatgttgcctgacaatatcggcggtattacgaagcttttccagattactgctcagtctgtcataatattccggctccgggataccatcactgttacggataatttcagaaaatacataacatatccgggacaatacaaacaaggcatgaaaaataccgatcatcggccggtcatcatcacgcagtggcgcggcaaagacctcatccacagggtttagtaccagcgggtcccccgcattgaggatattcagtgccgtatggccgcattcatgcgccagaatatcaatataataagcgactgaatgtgatgaatgaacataggtaaacatcattccccacatatagaaattggtaccggaacgcataaagcgggagccgtctgcggtttcctgagtcaggtatatctgatggataaaccggtcaatttcattgccggtttccggcgcacagcggcgaataatggataacgcctgtattattttttccgtttccgctgctgccagtaccggatcgtcacaatagccgaaaccaagttgtttatcgtcacggataattttcaggatcatcttttctgccaatgagtgacaggcagatgtcagtggcgagatagtcagtgataacggtgttctttttcgcatcaactgattgaggtaagttaccgcctccgcatgttcatcatcttccgcatatttaccggcgatataatgaatagcgcaattttgccacgacaacggaacctctgaatttatttcgggcaaatgataataggataataagtaattaagtgattcatagacttcatcagaaaaatactgataagcatactgatgtttataatcaggaaaggtcagatttatcatataacagtgtccgtcaggcggataagccatgccccgttttacggacatggcttatcaattagttagtgtatttattatttactgaatgaccatcctgataatggtgattttattttcagtaatttacttctgtctaattttttcattatttcacttccttattaataacagatcatatgaatggatgtactgtgcactcagattgctgttaaaccctaaaataaaattaacgattaaaaaatactttttttagtcagtgttatttttctgaatcaatatcacggaaataagcaggaataatgatgaaataaataattgccataatatgaagtataaaaaaaccacgcagtgtctttactgcgtggttctgtcaatacgaacattatccgggcattcagatcaatgacaaaaatgtctttttaaagtcatcgatgtcatgctgtgtggttgcccacgaggtgcacagacgcagacaggattttcccggttcctgcaacagcgtttcatggaaaacaaactgttttttcagcttttctgccagtgcggaaggcagaataacaaagacctggttggattccggcggtgccaggaaggtaaaaccctgctccgtaaagaatgtcgccagttgtccggccatgctgttgaggtgtttgcctaatgagaaataaaggtcgtctgtaaacagcgccaggaactgggcacccagcagccagccttttgcctgaagcgcgcccttctgtttgatactgaaccggaaatcatctttcagcgccggattattgatcaccagagcttccgccgcgatcgcaccgattttggtaccgccgatatagaacgcatctgtcagtgccgcgatatcctcaattgtcagatcactttgtgcggacattaatccggatgcgagacgggccccgtcaagatagagccataacccgtgctcatcacagaaacgacgcagtgcctgtaattctgctttgcggtaaaccgtgccgatctcggtggaattagtgatatagaccagcttcggctgtacccagtgctcatcattatgttcggcaatgaccggtttaagatgatcgggtgtcagtttgccatccggggaaaaaacagtgatgactttgtgtccggtcgcttcaattgccccggtttcatgggtggcaatatggccggtgctgacggagatcactgcctgatgcggacgcagaaaatgggaaatcgccgtcaggttagtaatcgtgccgccgttaaagaagtggatatcagcctgcggctgaccaatccgctgtttaatcagcgctgcggcatcaccgcataaagtatccgtgccataaccgtcatggcggtggcctgctgtgtcagtaatggcttttaaaacagccggatgtgcaacttcattataatcattctgaaaacggtacatatgctcctccgatagtgtgcagtaatactatgcttatacttaccggcgcacaatggcacggatcgcagttcagtccggttttaccagcccgatcacaccttcactgagggtaatttttccctgtgttttcaggcgaagcagaactttgtcagtatgacgccgcgatgtgccgagaatgctggccagcatgtcacggggaagatggatctgatggccgctgatttgtgtcagcatatagagcagattgttttcgatggaatcaaccgcattcatcagccgctgttcaccgttgataagacagcgctttgccagctggcggttaagcagcagagacaggcggtgatcctgtgacagccaggacagaaatgtagccgccggcatccgcagtacacggcagtctgacagcgcaatcacatcataacggtatgcctgccggcaaatcgcctccatctccccgaggaattcaccacggtagcagaatgtcagcccgacctgtttaccattctccgcctgcttattaacaataaactcgccgtccagaatgatatagaccgcctgagccgggtcgccctggcaaatcagattctgtccgttataaatatgcagtgtggtcacactgtttctgacaacatccggtgcatcacggagcaggctgtctgcctccggcagcagctcttcttcgctgaatttcagccataattcacggaacggggttgtattttgcatgtgccgtatctgtcaggacgggataatcagtgggtaaacgttagcatggttaacaacaggtttgaaccggtaaacaccggttctgacgggctgcggattaccggcagcccgtcagtcaggttacttcagctcgtagccgttcagatactgctgctgtctggtggtcagattatcaagtgaaacacccatatcctgtagtttcagtgccgccacttcacggtcaatttcatcactgacatcatagacttttgcttcgagatcatggctgagcagatactcggcgctaagtgcctgaagagcaaagctcatgtccataatttctgccggatgcccgtccgcacaggcaatattaaccagtgcaccacggcccagcagatagagtgtgcggccatttttcagggtataaccttcgatattctcgcgggcaattgtgacgctgtcacttaactgctgaagatcggtcagattgatttcatcctcaaagtgcccggtattactgataatggcaccctctttcatcaagctgaaatgcccggatgtcagcacgtcacagcagccggtggcggtgataaaaatatcacccagtggtgctgcggcagacatggtcatgaccgcaaaaccatccattttcgcttccagggcttttatcggatccacttccgtgacaatcacttccgcgcccagccctttcgcccgcatggcacagccttttccgcaccagccgtaaccggcgacgaccacggtttttccggcaataaccaggttggtggtgcgcataatgccgtcaaaagtggattgtccggtaccgtagcggttatcaaacaggtgtttggattgtgcaccgttaatcgacagcaccgggaaattcagtgcgccgtttttttcacgggcaactgcacgcagaacaccggtggtggtctcttcacaggcaccgatcgtgtgctttgcatattccggatacagactgtgcagttcatgcaccaggtcaccgccgtcatcaataacaatgtgcggttcacaagccagtgtctgttttacaaagttgcggtaggcttccgcatccgcgccgtggatggcaaatgtatgaataccgctgacaaccagtgcggccacaatatcgtctttggtggacatcgggttgctgccggtgactgacacttcagccccgcctgcggccagaacccgtgccagataggcggttttggcttccaggtgaatagagagcgcaatgcgttttccggcaaacggctgttcttgtatgaaacgctgttccagtgcgcgcagcagcggcatatgggcgcgaacccaggcgattttttgctcaccctgtggtgctaaggagagatctttataaatactggtaaccatggcaactcctgcatacggcttttataacgggatgagccacagtaaccggaggttgcgggggtctccagggcatttgccctgaatcagaaaaaaagacagccgggtgaaagctttgttcagcggcgcgcctgcaccatagcaatcaggccgcagacatcctgcgggacattgtccgttttcaggatctcctccggcgtcatccactgaaagtccggatgtggtacggctgtttcatccaccggacggcaccagtacaccatatcaatatgccagtgatcgccggttttcttgtcggggataaactctttcaggatcgccatcggcaatggcagcacgccggtttccggcagtggtgtgataaattgctgcgcctgtgtatcccagctgataatccggcattccagtccggtttcttcgtgaatttcacgcagtacagcatcctgcggctcttcattttcctcaatatgcccgccgggcggcagccagataccgagcttcggatggcgatggagcagaaaacggccgtggctgtcactgaccagaccggaagcggtaaaatgtttgataacagacgtcattattttttctcaggttattcaggtgatcatggtcagaaccaccggcagagtcagcaccgccaccatggtctgaaacgtgataatcccggccatcagctggctgtcaccgccgagctgacgcgataaaatataggcggtcggcgcggtcggaatagcaaaaaagatcacaaacagctgatattccagttgggttaatcccatcacggtcgctaccgcaatcgccagcaatggcataacacacaggcggacaaggctgttcaggctgattttcagtgcggaatagcggatggtcgccacctgcaatgccgccccgacacagagcagccccagcggcagactggctccggccagcagcctggcaaactggccggtgttatacggaagaccggtaccggtgacattcaggagcatcccgataatacaggagataatcagcgggtttgtcagaatgggcaacaacaggcggcgcagcgataactgctgaaattcagataacgcaaccaccgaaatgatattacacagcggaaccagtaccgcgaggacccccgccgccaccgccacaccggacggaccgtaaaaatcattgacgatggataacccgagataggtattaaagcggatcgcgccctgcagcagtacgccgaattccgccgttggtattccgcgcacacgctttaccaccgcaaatgccgcggtggccagcccgagcataattaccagtgcgattgccagtttcggcagttgcgggttatccagcggagcaacggcgaggctgttgataagcagcgccggaaataagatatagtagttcagcttttccgcgccgttccagaacccggcaccgaaaaccggccgccgcttcagaatgcagccgagcagaatcagcgcaaacagcggccataatgtcatcagaattgcgaacatcagcggaaatccggcaagaaacatattcccgcatcataacaggaacaacgggttacgcgagcagcaacgccggttttgtatcgctgatcgcgtttttacattttatctgccgcagcgcataaaacgcactacgttttgccggggttatatgttagcccccggcaggcgtaatcacctgataagtgcagtcaaatgctgctttctgaatacggtaactgtcctgcggatcctgtcgtgagcgcagcagcacatcccctttcataacccgctgtttttcaccccacggcgcaataatcacaaacggtttttcctgcatgatcaccagataatccatcggctctccctgcggccggaaacgctgccggttgccgctgtcaggcggtgtcagtgcactgccgtaacggcgggtaaacgccgtttttttcaccagaatttcttcattaccggtagcgtcacagatgttctgcaccacccaatccccggcttccgccggttttgaacgggtttcttccccttcaccccggataagggtcactacgatttcaccgggaactgccggacgggcgagtacgtctctggttttacgggcaacaccggtatggttccccgcgtccgcaaataactggctgcgatcctgaaccggcagcagatccaactctttcgccggtgcggaaaacgcaggcagcatcaggaacagcagtccggagagtatcttttgcatgataattatccgttaagctgtgaaaatccgggtgacagtgtcacgctcgcaggcggagatttatccccgccaatacgccgcagcagacgtgttgcagcgctgcgtcccacatcccgtgacggctgggtgataaaggccaccgggatgtcatacagtgcttcactgccgatatcatcaaaccccaccagggcgatttcctgagtgaaataactttcgttatccccttgtctgaccgtgttaccggtgctcagtgcggcaaaatacgcgcccagcgccgtaccggtgttgtggcagacaatcgcactgactttgggatactgatacataaattcagatacccggcggataatattctgctgtttgttatccgtttccactatccattcggtgcggaacggcagcccgtactgcaccagtgtcgagcagtaaccgccgacccgctcagcgcgggtgagtgaatcactttcaccgccgaaataggcaatctggcggtgaccgtttttgatcaggtattccgttgccattctggcggcagaggcattgtccgggcggacaacatcaataccggagaactcactggcccgggccgcgcacaccatcgggatctggtaatgatttacccgctcaaccacttcattggtgagaaatttaccgccgccgacaatcacaccgtccacgccgtaacggatcagactgtccagcgagcgggcaaacccggcagaagaattgccgcactgagtcagaaaaacctgtttgccctgtgtttccgcatattcactgacaccggcggcgacttccgcataaaacggttcggtaatatctttgacaatcaggccgattacattagagatattgtcccgcaatgtggcggcctgctgattgcggacataccccagttcttcaattgccgcgttgactttatccgcggttttccgcgagatccgcccttttccgctgagtaccagtgacaccgtggttacggagacacctgcctgctgcgccacatcgactatcgtgacttttctgagattcataacgccggatacttccttatgctcaggatactgcacgggattttacacaaaatccgataaaacgttttatctatttccgaaatatggctgtcaggtcatgtttattttttgtgatcgggcaactattataatttggtaaaacgttttatcttattttaccttcacaacaccacactgacatttacaggataccgtatgagtagccaaccaaaacaaaaagtcacgctctgggagtttttccagggactgggcaaaacctttatgctgcctgtcgcgctgctctcgttctgcgggatcatcctcggcatcggcagttccctcagcagccgggatgtactgacactgctgccgtttctggatcacaccgtcttccagttactgttcacctggatgagcaaaatcggctcatttgccttcagtttcctgccggtgatgtttgctattgccattccgctggggctggcgcgtgaaaacaagggtgtggctgcatttgccgggtttgtcggctttgcggtatttaacctcgccactaacttctacctcactgccgctgatattttaccgactaccgaccctgctatcctgaaagcccacaacatccgtgatgtgctggggattcagtcgatcgacagcgggatcctgggtgcggttatcgtcggtattattgtgtatatgctgcatgaacgcttcaataccatccgtctgccggatgccctggcgttcttcggcggtacccgttttgtgccgattatcaccaccctggtactcggcctgtgcggcctgctggttccgctgatctggccgtggtttgctatggggatcaacggattaggcaagctgattcagagcgcaggggctttcggtccgatgattttcggctccggtgagcggctgttactgccgtttggcctgcatcacatactggtggcgctgatccgctttactgaagcgggcggcaccatggaagtatgcggtaataccgttaacggcgcactgaccattttccaggcgcagctctcctgcccggaaacccagggctttgcggccagcgccacacagttcctgtctcagggtaaaatgccggcgttcctcggcggcctgccgggtgcggcattagcgatgtatcactgtgctcaccctgaaaatcgtcataaaattaagggattactgatttccggtgtggtcgcctgtgttatcggcggcacaactgagccgctggaattcctgttcctgtttgtcgcgccgttcctgtatctgatccatgcgattctgaccggtctgggttttaccgtgatggcgattaccggtgtcactatcggtaacaccgacggtaacctgattgactttgtggtcttcgggatcctccacggcatccagaccaagtggtatatggtgccggtggtggcctttatctggttcgcttcttactatgcgattttccgtttcgccattacccgcttcaatatcaaaaccccgggccgcgatactgacaccaaagaaagcgcaccggcaaccggcagttccgcaggaaaatccggctatgatgttccggccattctggcagcgctgggcggtaaagaaaacattatttcactggataactgtatcacccgtctgcggatgtccgtgcaggacatgagcaaagtggatgacgcgcagctcaaggcattacgggcgatcggggttgtccatctgaatgaacataacttacaggtagttatcggcccgcaggttcagtctgtcaaagatgaactggaaaagctgatgaaatctgcgcctgattccgctcagccggaaccgcaaaacgcctgataactgacaccgcactgcctgacagtgcggtttttctttccggagaaactatgtcctctctattttctgtcccggttgaccgccacggcacttactgcacgcaatgggattttgtgcaggatcgctttggtcaggcggatttactgccttttacaatctcagatatggatttcgtcactgcgccggtgatcctgaaagccatttcagaacgcaccgcgcacggcgtattcggctacagccgctggcagcacaacgattttctcagtgccgttgcacactggttttcctcccgttttcaggcgcagattgacactcaggcgctggtatacgggccgtcggtgatttacatggtcagtcagatgatccgcctgtggtcacagcccggtgacggagtggtggttcataccccggcgtatgatgcattttataagacgatcaccggtaatcagcgcactattgttccctgcccgctgcaaaaaacaacagacggctggtggtgtgatatggatgagctgggatccctgcttgcaaaaccggagacgcggattctgctgctgtgcagcccgcataatccgaccgggaaagtctggacccgcgaagagctgaccaccatggcagaactgtgtgaaaggcataatgtgcgggtgatcagtgatgaaattcatatggatctgtgccgtgcaccgcatcagcacacgccgtggtctgaaaccgggcgcggggaatgggcattattcacctcagcatccaagtccttcaatatcccggcactgaccggcgcttacggactgatttcagataccgcctcccgcgaagcctattttcatcagctgaaagcctgtgacgggctctcttctcctgccgtactggcggttatcgcccatatcgccgcctaccgcgaaggtgcgccgtggctggatgagctgcgtgattatctctttgctaatctggattatataaagcagcggctggatgcggaatttccgcaactgaactggcaggtaccggaatccacctatctggcgtggatagatctgaacccgctgaatattgatgataaagccctgcaacatgcattgattacacaggaaaaagtggcgatcatgccgggatatacctacggagaggaaggacgcggatttttgcgtctcaatgccggatgcccgcgtgataaactcgccgcaggcatggataaattaattcacgcgctgaaatcacgctgattctttttgcacgatccgggcgcattcgctgcgccccggttattcgtgtttgccgcccttattgcgcaaggcgcggcgtaaataggaaaacggtaagctgggacacgacttatctgcgggtctgccggtgttcaccgcttcctgtttttcatcctgaaccggcttttccggcgggatctttccggaggtggtgttttccgccatgttattccccttctttactcagagcgtcgttaaccgcttctattttccgtactgcatcattaagaatatcggcgatctgcccgagcttggtttcatccagttcactggtgaccagtttatggcgcagcagtgcccgtaaattccccagcgcctgttcgatttcatctgataacagtgaaccgcggcggaaggatttggtctcctgcaggcgctgtgcaatctgttccagaacatcggtgttctcttccagatgcattttgccttccggtgtcaggctgtagcttttacggccgttaccggtattttccgcgacaatcagctgctggtcttcgagcagggtcagtgtcggataaatcacgccaggactcggtgtatagaggccggaagtcagctgaccgatagatttgattaactcataaccgtgactcggtttctggttaagattggccagcatcataatacgcaggtcaccatgatcaagcagacggcgaagcccttttccgcgaccgcggtgacgaccgtgttcacgcgcttcgtgacaaccgtggccttcatggtgctcatggtgctcatggtgatcgccgtggcaaccatgttcatgttgtccgtcatgtccgtgatgatcaccatggcagcaatgactgcggtgttcgtcgtgaccgtgatgagcaccatggcagcaatggctgcggtgttcgccgtgaccgtgatgttcgccgtggcaacgatgcccgtcttgtccgtggcgttccccgtggcggccgccatgacccccgcggcgctgacgcccttcctgtgaatcacaggcgcggtggcgtaaagcatgaagaaacataataaattccttttgtgataaatagtgataatcagcaaaatcagagtttagatatatctgttttgccttcaggaactactatagtctcccggaataaaaagatcaaattagatatatctaaaatagcactttttgtcttttaacgggaatgattatcactattacagtacagcaggaagtgacctgcacaatcagcaaatggtgcgaaacacactgacagtgcaggtataaaggaagaaaatcagaagtcaggattaatcagaacaatttttccggttaaatcgccggactccatcagctggtgggcctgtgccgcatccgcgaggttaaaggtatagttgaccagtggcttgacctttcctgaccgcagcagcggccagactttatgcgcaagatcccgggcaatcaccgccttctcttccggtgtccgcgcccgcagtgtcgagcctgtatgcagcaggcgttttaccatcagcggcatcagattcaggttctgcggattaccgcgcatcaggccgatctggataatccgcccgcctttagccgcaacctcatagtttttgctgacataatcaccaccgataaggtcaacaaccatatttacaccctgaccgccggtcagttccggaatcacctgtgcaaaatcctcttcgcggtaattaatgacgtgatcggcgcccagttgccgggcaagctctgctttttcactgctgccgatagtggtgtataccgtggcaccaaaggctttcgccaacatgatcgccacactcccgataccggaggtgccgccgtggatcagcacactctcttcactctgcagtttgccggtctggaagacgttcgcccacacggtgaaaaagttttccggaatggccgccgcttccgtgtaactcaggttttccagcggcagcgcgatactgtcatgaaccaggcaatattccgcatatcccccgcccgcaaccagcgcacacaccttatcgccgacctggcggcgtttgcagtcttccccgacagccacaacttcacccgcgatttccagtcccggaatcggggaagcatccggcggcggcgggtaactgccctgacgctggaagacgtcaggccggttgacaccggctgcggcgactttaaccagcaggtattctccctgtaccttcggcaacggcatctcaatcgcctgtaatacttccgggccgccgtgccgggtaatatcaattgccatcatcgattcaggtaatgcatatgacatcattacttttccttaaacagtcccggttttgtaatacctgtcgttttatgacgagtcaggaaaattacggtttcagcataatgcagcatatcaaagatagcactgcaggtttatgacggtgtattatgtccggctcctgcttttttatattttttatccggtccggatgttggttttttcgttatttatttgtgactatttttaatgtatcacactactttataacgtgaaaagaacgcattattcatatttaaccggtttgttaacatactgatgagcaggaaattgacctgcattccctccctctgttattttaaaccggattattgagagtttaatcaaataattcacattatgacatcacggaaaaagcataatatgtcaatattatgcccctgttttcagcccggtatgacgatatttaaactcagaccacttaccacttttggtagtctgtgataaaattgattcaaatcaatattatttcaagagcaagcctatgatcccggaaaaacgtgtagtacgtagaattcaatcaggtggctgcgcgatccactgccaggattgcagcatcagccagctttgcatcccgttcacgctcaatgagcatgagctggatcagctcgataatatcatcgagcgcaaaaagcctatccagaaaggccaggcactgtttaaagccggagatgagctgaaatcactgtatgcaatccgctccgggaccatcaagagctacaccatcaccgaagaaggtgatgagcagatcaccggtttccatcttgccggtgacctcgtcggttttgatgccattatcaataccgagcatccgagtttcgcccaggcgctggaaacgtccatggtctgtgagattccgtatgaaactctggatgacctgtccggcaaaatgcctaacctgcgccagcagatgatgcgcctgatgagcggcgaaatcaaaggcgaccaggaaatgatcctgctgctctccaaaaagaatgcggaagagcgtctggctgcttttatttataacctgtcccgccgttttgcgcagcgcggtttctccccgcgtgaattccgcctgaccatgacccgtggcgacattggtaactatctgggtctgacggtcgaaaccatcagccgtctgctgggccgtttccagaaaagcggaatgctggcggtaaaaggtaaatatatcaccatcgaagatatggaacagctggcggcactggccggtaaagtacctgcactgccacaggattagtaattccttccccggcaacatttttggctgccgtaaaacgcatcagaccggtttatttcggtctggtgcgaatatttcctacattcctgctcccgtttggtttatctttatagatacgtatccagccccgcgaggagagatgaatgtctgaatatcagaacctcttagttgcaatagaccccaatcaggatgatcagccggcattacggcgtgcggtatatatcgtgcaacgcaatggcggacgcatcaaagctttcttacctatctatgatctgtcatacgatatgaccaccctgttgtcccccgaagaacgggatgccatgcgcaaaggcgtaattgcccagcgttgcgcgtggatcaaacagcaggcgcgttattatctggaagccggcatcgatatcgaagtgaaagtggtatggcataaccggccttatgaggcgattatcagggaagttgtcagcggtggtcatgatctgctgctgaaaatggcgcatcagaatgataagtttgagtctctgattttcaccccgctggactggcagcttctgcgcaaatgtccgtgtccggtctggatggttaaggataaagtctggccggaacagggttctgtggtggtcggtgtgaacctgtccaacgaagaatcctaccatgatgcgctgaatctcaagctggtgtcgctgacacaggatctcgcaaaacggattgtgaaagacccggcaatccatctggtcagtgcttatccggtagcgcctatcaatatcgctatcgaattaccggattttgacccgaatacttacaataacgcgctgcgcggccagcatcttatcgccatgaaagagctgcgccagcaattctccatcggcgaggagtacacccacgtttatgagggattaccggagaaagtgatcccggaagtgtgtggtgagctgaatgccggggtagtggtactgggtattatcggccggaccggtatttctgccgcgttcctcggtaataccgcagaacatgttatcgaccatctgaagtgtgatttgctggcggtgaaaccggacggctttgtttgtccgatcgataccagtgaagatgattaatcctgtctcccgcagaggccacggcttctgcgggaattttctgcgcgttctgcgataatcagaacaatggcgcacacatcccgtcaccgagcacttttttcacgttcttcttattcggtttaaattcaccgactactttattatcggaataaaccttaaattccgtggctttactgagcgcctccgtcagattggtccaggccgcagcaccggcgcggttcttggtgctgtccggtacaaaatacgcttcgtcatcgatcagaaattcaatctgcccttccacttcatgatcaccggcggaaatatcaatactgtgatcaattgaattttcataatcctccgggtccgccccgacgttacaggcaacgacaacagtcacgccggtgtcattactgatcccgtactcgataaacccctggccgaaaccggatgtccagatattcggaatggctaatgcggaggcagaaaagagaaagagtgaaacggccatcatttttttcattaatcttagccctctgagtgaaaaaaaggcgggtaacgcatttacccgccttgtgcattttatgctttttttacccggattacagtgcgcgcagaatagcgtcacagctggctttggcatcgccaaacagcatctgggtgttttctttgaagaacagcgggttctgaaccccggcataaccggtattcatcgaacgtttgaagacaatcacgttctgcgctttccacacttccagaaccggcatcccggcaatcgggctgttcggatcttccagtgccgcagggttaacggtatcgttcgcgccgatcaccagcaccacgtcggtgtctttgaaatcatcattgatttcatccatttccagcacgatatcgtaaggcacttttgcttcagccagcaggacgttcatatgtcccggcagacgaccggcaaccggatggataccaaaacggacttcaatgcccttgtcacgcagtttctgagtgatatcgtgaaccggatactgagcctgcgcaaccgccataccgtagcccggggtgataataacggaacttgcccctttgagcatctccgccacatcttccgcactgatttcacggtgctcgccctgctcttcatcgccggatgatgccgtaccgtcagtaccgaaaccgccggcaatcacactgataaaggagcggttcatcgccttacacataatgtaagacaggatcgcaccggaagaaccgaccagcgcaccggtgacaatcagcaggtcgttgctgagcataaagcccgccgccgccgccgcccatccggaataggagttcagcatggaaaccactaccggcatgtccgcaccgccgatagaggcgacgagatgccagccgaaggccagtgcaatcacggtcatcaggatcagggtgaagacctgtaagccggtgctgtcggttttgacaaaggtccataacagcaggaaggacaccaccagtgccgccaggttcagtttgtggcggttaggcagcatcagcggtttggaggataatttcccgcataatttgccgtaagcaacaatagaaccggtgaaggtcaccgcaccgataaagatgccgaggaacacttctgtcaggtgaatattgttcatcaccgccgaggtcagcgcctggttatgatccatatagctgttgaaaccgaccagaaccgctgccagacccacaaagctgtgcagaacagcaaccagctccggcatttcggtcatttcgactttacgtgccagacgaataccgattaccgcaccaatcaccatggcaacaataatccagccgatattggcagaatatggtccgaagatggtggcaaccagcgcgatagccataccggtaatacccagcaggttaccccgttgtgaggtttcatggcgggataacccggccagactgaaaataaataagattgcggcaacaatatatgccgctgtaacgactccgcccgacatattcattaccccttacgaaacattttaagcatacgctgtgtgacggtgaatccgccgaaaatattgatactggcaatcagtaccgcaataaaggagaagaatgtcacccagccgccgctgccgatttgcagcagtgcgccgacaacgataatccccgaaattgcgttggttaccgccatcagcggggtatgcagcgcatggctgacattccagaccacgtaatagccgaccacacaggagagtgcgaacacggtaaagtgggataaaaactccggcggagccacattggccagccaggagaacaggataaatgccagtgccatcaggccgtatttcagccacggtgacatcggtttttccggttttttctctgctttcacagcggccggttttgcctgtggttgtgcggatacctgaatcggcggcgcaggccaggtgatttcaccggctttaactaccgtcagaccgcggatcaccacatcgtcaaaatcaatgttgatctgcccgtctttctctttgcacatcagcttcatcaggttcaccaggttggtgccgtaaagctgggatgactgcgtggcaagacgcgccgccaggtcggtataaccgatgattttcacgccgttttccgtggtatggattttacccggtacggtcagttcacagttaccaccgttctgagccgccaggtcaacaatcacgctgcctgatttcatcgactcaaccatttctctggtgatgagtttcggtgccggtttacccggaatcagtgcagtggtgacaatgatatccacttcttttgcctgatccgcgaacagcgccatctcagccttaataaaggcctctgacatgactttcgcataaccgtcaccgctgcccgcagtttcttcgaaatcaagttcgaggaattcggcacccatacttttaacctgatcttttacctcaggacgggtatcaaaggcacggacaatggccccgaggctgcctgccgcaccgatagcggccagaccggcaacaccggcaccgataaccagcactttggcaggcggtactttaccggcagcggggatctgcccggtgaagaaacggccgaaggcgttggcggcttccacaatcgcacggtaaccggcgatattggccatcgaactcagtgcatccagcgactgggcacgtgagatacgcggtacagaatccatcgcgaagacgttaacaccctgcgccgccagtttttccagcagttgcgggttctgggcaggccagataaagctgaccagtgaactgcccgccttcatcagcggaatttcatcatcctgaggggcattcactttaaaaataaggtcagactgccaggcttcctgtgtgctgacaatatcagcaccggcttcgcggtaagcgttgtcatcaaaactggcaagatgaccggctcctgtttcaacagccacatcaaatccgagttttttcagttgtattactgttgccggcgtggcggcgacccgggtttcactggactgtcgctcttttggtacaccaatacgcataatgttcccttatataagctcaagtgttttacggatgattggtcggacatgtgcgtaaaaaaacaaccaactgcacaaattcagatcaaaagcacccttttatccgatatgtcctaataagctactgaaaaatgtgatatcgatccatctaatttgtttgccgaatgaaattaaaacggtatttatccgggcgtaaattttttttgccgataaatgactatgattgcataaatttatggtaaaaatagctgtatgattaacagtcgttagattgcacgataaattaaagcgacaacaagcacaaatacatgtcataattgtgcggccaggatataaaatttacaggttcagcacgttatgaatattaattgcgcaaggcggaaggattttgtatgaagctgaaaacaacggtcatcgcatctgcgatgtttttttcatttaccagtctgctgcccgctcaggcggcgcaggaattaacaccggaacaggccgagcaatatcagcctttcgagcggattgcagttacagggcgttttaatgccatttacgaagccgccgctgccgtttcgcgtaaagcagacaaaatgggtgccgatgctttctatatccagagcctcgatgatctgaacaacaacggtaatatgcgcgttgttgcagatgtttaccaccgggacgcaccaccggccgagaaaaaaggctaccgccagttccgtggtatcaatgaattacctgagaaagatgccgttggtcttcagccgttcgatactgtgactgtcaatggttatttcgccaacagtcctgatctgaacgatgcgattgccaaagaagcagtgaaaaaaggcgcggcttctttctttatcgtccgtaatattttcaccaacgatggcggcaaccagctggttacggcgtatgtctataaagcagatgcaccaaaacgtgtactgcagacagaacaagccctgatccctgcggattctgatgccggtcgtgcagcccttgctgccgggggcgaagctgccaaacaggttgaaatcccgggtgtggcctcctctactgacaccgccggtaacaatgtcggccgtttctttgaaacccagtcttcccgcagcggccgttataccgtgactctgccggacggcacgcaggttcaggaactgaacaaggcgtcagccgccgttatggcaccgtttgacagcatcacctttaccggttactacaccacgtcaccggaagtctcttatcaggttgctaaacgtgcggcagccaaaggggcgaaatattaccaaaacacccgccagtggcagtccagcggcggtaaagtgactatcagcgccgatttatttaaataatcaccgcctgacagttcaccggaaaaagcgtatctctgatacgctttttttatggcttttgtccggggtattaacactttcactacattcttctgctgtcgttctgataaacagtaaatatgcataatataatgcaattaatgcatgattaaacattgcatatcccgccgactctccgtacaatcagcgccaatttttgcgtattcagtcagattgattgcatgaataccctgcttaccgcatcagatttaccgggaaggtcttttggataagaaactcagtttaaccgcgctcaccgctttagtactcagctcgatggtcggcgccggtgtgtttagtcttccgcagaatatggccgaagttgccagtccggctgcacttattatcggctggtcaattaccggtgtcggtatcctctttctggctttcgccctgctgctgctttcccggctgcgtccggatctcgacggcggcatcttcacttatgctaaagacggtttcggggaactgattggtttttgctccgcctggggatactggttatgtgcggtgatcgccaacgtttcctatctggtgattgtgtttgcggccttcagcttttttacggataccccggacaatattgttttcggcgacggaaatacctggcaggccctgattggtgaatccgttctgctgtggtttgtgcattgtctggtgctgcgcggtgtacaaaccgctgccggtatcaataagctggcaacgttcgccaaactggtgccgctcggcctgtttatcgtactggccgtgatcgctttccgctgggataccttccatcttgatttcaccggtgtggacctcggcgtacctgtgtggcagcaggtgaaagataccatgctgatcaccctgtgggtgtttatcgggattgaaggtgcggttgtggtttccgcccgtgcccgccgccgtaaagatgtcggcctggccacgatgatggcagtgatttccgcactgacgatttatatcctggtcaccctgctgtcaatgggtgttgttgcccgtccggaactggcagaaatgcgcaacccgtcgatggcaacactgatggtgaacctgattggcggcagtggtgagattattattgcagcgggtctgattatttctgtctgtggtgcatatctgagctggacaattatggctgccgaagtgccgtttatcgccgcgctgcatggctctttcccgtcaccgtttaaaaaacagaacgcgaataatgcaccgtcttcctctttatggatgactaatggcgcggtacagctggcactggtgctgatctggctcagcggcagtaattacaatacgctgctgaccattgcttctgaaatgattctggtgccctatttcctggtcggtgcattcctggtaaaaaccgccctgagaatgaaaaaaccggcactgctcggcgtgggtatgattgcggcaatgtatggcttatggctgatttatgcatccggcattattaatctgatgctgtcagttgttctctatgcaccgggtattctggtatttctctatgccctgaaaaaccgtgagataaaaaccacactgcattttatcgagtggagcattattgctgcccttctgatagcggcagttcccgcactctggtatctggtgcgctgaaaatctgaaaacaggagccggtcactgaccggcttttttgtctccttccccgcatcccgccaattccttctgccgaactcaaacaaacaccgttgcttcctgcggaggattgagatgaaaacacactgtatgttgtaactaaaatgatgtattcacagaaaaaggacaaaagaaaacgggcgatgatatgcccgtttgttaatgtaatcaatgatactggataaataaacagtataccgtaaaaacggcactttacccgctgatttgttccattgcctgaataatccgcttatcagaaaccggatacggcgttcccagttgctgagcgaacagactgatacgcagctcttctatcatccagcgcacagcctccgcttccggtctgcgtttctccaccggtgataacttaccctgccactgcttccacaggttctgaacatgctcaatcttactcatgttcgccctgtcgcggttaacgtcagataccagtttttcgatgcgccgctctatcccctgcaaatagcgcaggatatccggcaggcgctgccagccgtgagccgttacaaagcccgggaagaccagcccgctcatctgtgctttgatgtctgagagcgcaaacgccatctgcatatcaatccgccctttcagacgtttactgatggcaaatgtggtggtcaggatctgctccaccagcttcgcgataccgacaacggtttcgttcagctcagcccggacaaactcctgtaactgcgcgaatttatcttcctgccagaccacgccgccgtattgtgcgatcagcttgtcgacaccacaggcgatacagtcatcaatcagatccagcactttgccgtacgggttgaaatacagtcccaatttggctttgttcggtaatttctcatgcagatatttgattggcgacggaatattcagcagcagtaagcgccgcgttcccgcctgcatcgccagctgctgctcaaattccgtttcaaagaccttaatcccgacactctgcttttcatccaccagtgccgggtaagctttcaccgcataaccaccgcgtttctgctcataacagccgggaatgtcgccgaaacgccagatatgtgcaccactttgttcgataccgtcatcgaccacatctgacagtgtctgctgcacctgctctttcaggctcagtttcaaagcttccagatcgtaaccttccgccagttttttctgcttatcccccgtgatacggaaggtgattttcagatgtggcggaatttgatccaactgccaggattcgcgatcaactgtaacaccggtcatacggcgcagttcccgctccagtgcatccagcagtgcgccctgcggttcaggtacccgctccataaatgcgcccgcatagtttggcgcaggcacaaaattacggcgtaccggtttcggcagggatttaatcagcgcaataaccagctcttcacgcagccccgggatttgccagtcaaacccttccggactgacctgattcagtaccggcagcggaatatgtacggtcacaccgtccgcttcggttccgggttcaaactgatagctcaggcggaatttcagatccccctgataccagtagttcggataatcctgcgcagttacctgattagcatcggagcggatcagcatgtttttctcataattgagaaaatccggtttctgtagccgttcccgtttccaccagttatcaaagtggcgtgacgaaataatatccggcggcagacgggtatcgtagaaactgaacagagtctcgtcatccacaaggatatcgcggcgccgggatttgtgttccagctcttccacttcgttgcgcagtttctggttttctcggaagaacgcatgacgggtcagccagtcaccttccaccagcgcatggcggataaagagttcacgacacagcgccgggtcgatattaccgtaattcaccggacgtcccgccacgaccggcagtccgtagagcgtcactttttccgtcgccattaccgcaccctgagatttctcccagtgcggctcgctgtagtgatatttcaccagatgcagtgccagcggctctatccattccggttctattttagcggcaatacgcccccataaccggctggtttccaccagctctgccaccattacccatttcggcggcttcttaaataggccggagcccgggaagacggagaaccgcgcattacgcgccccggtgaactcctgtttttccgtgtctttctgcccgacatgggacagcagaccgctcaggagcgacagatgcacacttttataatccgccggttcgctgttcaccgggatcccctgctcttttaccacctggcgcagctgggtatacacatcctgccattcgcggatccgcagatagttaagaaactcctgacgacactgcttgcgcagctgcgagttggataacaccttctgctgctctttcaggtagttccacagattcacaaaggcaataaagtcagattctttatccgcaaagcggcggtgtttttcatcggacgcctgctgtttctccagcggacgctcacggggatcctggatagaaagtgcggcggcgatcaccatggtttcccgcaccgcgccgtggttacgggcttccagcaccatccgcgccaggcgcgggtcaatcggcagtttcgccagctgacggccggtttgtgtcagatgataatgcccttcggcggaggttttaccgtcgatagcccccagctcttccagcagtttgacgccatcctggatgttgcgtttatccggcgcttccacaaacgggaaggcggcgatatcccccagcccgatcgcggtcatctgcagaataacggaggccaggttggtacgcagaatttccgggtcggtaaattccggccgtgacaggaaatcatcctcagaatagaggcggatgcagatcccgtcagagacacggccgcaacgccctttgcgctggtttgccgaagcctgcgaaatcggctctatcggcaggcgctggacttttgtccggtaactgtagcggctgacacgggcaaacccggtatcaatcacatatttgataccaggaacggtcagtgaagtttccgccacgttagtggccagcacgatacgccggccggtgtgcggctgaaaaatccggttctgttcgctgttggaaagacgggcaaacagcggcagcacttcggtatggcgcaagtctgctttgttcagggcatcggcggtttcacggatctcccgctccccgctcataaagataaggatatcccccgcgctttcccgtcccagttcatgcacggcatccagaatgccctgagtcaggtcgcgatccgaatcattctcttcccccatgaccggacgataacggatttccaccggataggtacgcccggagacctcaataatcggtgcattaccgaaatgacgggaaaaccgctccggatcaatggtcgcggaggtgatgatcaccttcagatccggacgtttcggcagaagctggcgcagatagccgaggataaaatcaatattcaggctgcgttcgtgggcttcatcgatgatgatggtgtcatactgcagcaacagcttgtcctgctgtaattctgccagcaggatcccgtctgtcatcagcttaaccagcgaattatcactgacctgatcactgaagcggactttataaccgacagccccgccaagcgggactttcagttcctcggcaatacgggaggcaacggtccgcgcagccaggcggcgcggctgggtatgaccgataaacccggtgataccgcgtcccagttccagacagattttcgggatctgcgtggttttcccggatccggtttcacccgcgatgatcaccacctgattatcgcggatcgcgttataaatcgcttcgcgcttctgcgagaccggcagattatccggataggtaatctccggccggttggcaatgcgcagctctgtgcgggtaataccgcgcagcatctcatcctgtaaccctgtcagcaccttctgctgagattcgggattacggatcttcgccacccccgccagccgtttgcggaactgatgctgctcccgcagcgatagatgggggattaactgttttaattcattaagaagggaattcaccttgctgtccttctgataggtaatatcgtgccgtctgtacggtttggctttttgtgcggcgggtctcccctctgtcattgttatcccgttttcggagtaacgcacaccgcgtgtctttattaaacttgccgtatccggccattgtcagattttttgatgttatgcgccgaatttatctgctgttctttatacagcggctttcatacactgattacgtaataaataagctgaatcacaataacaaggtttactatgcaaaaagttctcgttctgaaatccagtattcttgcggactactcacacaccaacaaaatggcggattattttatcggacaatggcggaaaaatcatgcagatgatgcgatcactgtccgtgacctgagtgctgagccggtaccggttctggataacgaaattgtttccggtatgcatggttccgcaggcggaaccttaacacagcgtcaggagtccgcaaatgcattacagactgaactgattgatgagctttttgcacacgacgttatcgtattcaccgcaccaatgtataacttcaccataccgacacagctgaaaacctatctggatttcattgcagctgccggtaagaccttccgctataccgaaaaaggtgccgaagggctggtggcgggcaaacgtgcgattgttctgactgcacgcggcggtttccaccgcgatcagacatctgacctgattgtgccgtttatgacacagttcctgggttttatcgggatcagcgatattgagtttatttatgccgaaggtgtctcgatgggtgaggattttgctgaaaaagcacagcagaatgcccgtcagtgcgttgaagcgctttccgcataaccggataacaacacaaaaacaagcagtatcatcattaatcatccttgttccgcgccgggtcatccggcgcttttttttcatctgttaatccgttaatccgttactctttcttcagccatttaccgttgataccgagcacgtattctccctgcggtgcgcgggttaccagcttctgtccggcgattttagccacttcatccgctttcatccggttggtttgcgccagttcgctgtatttttgtgtccgtgccgtattaatctctttcaccaggccgctgacatcctgtcgtgacgatgctttatccacggccgcgatataaccgctgaaggtttcgcccaccagtccctgctgtttggcctcatccagggtcagtgcaaacgcggagctgctgatcagtaatgtcagcgcggccagcccgctgttaatgaatttacgcattattcacctcaaaatatcgctgagttatttttcagcaaatcttcaacctggcggtcaattttgacattaatttcatgttcaattttgacattcatattgatatcaatcggtttatccggtgtagccacttccacccgcagacacccgttaagcgcgataatcatcagcggtaataccgcacctgctatccattttttcattctgactccgtcggaggttactcctgattctgtgaaatactcttttccagccaggcttccagattgctgccgaaacgcagactgcgccataactgaaacacattttcctcatgccggtaattcagatttaccgcccgccgtgcatccagtaccggattatagccggaaaccactgatgacatcgtcaggacacccaggttggtcagattaacatccgtccgcacccgtttcatcaccagataatccagccagttaatcgccgtacccgctgaaatattgttttcactgaccgattcaacaaactgattatccagattgagggtcagcggttcgtcgttttccacccaaccgttatgcacaatccactgcggattatcaatataaaacggtaattccccgctgatactgccttcaagggcaaactgtgtcactttcagcgtattgatcagcggaccggtattcagtttatccagttttatcaccgctgcggttttctgcggaatggtcagtgacggcatggtgacctgcccgcccagaatatccagactgacaccggacagttccagcggatacgtctcatcgtacggataatagccctgcaaatcggctttaatatccgtcacttcaaacagattctcaacgcgcgcaatccgcagcatcacaggcgttttactgccgagctgccagcggctgtccgcgagccgccacggcagcacaaaatccacgccgctcacttcgccgtctttcagccacatacccgcctgtttgaccacccagtgcccgccggcgacaaatccctgacccggtgccgcggaatacgccgcctgggcatagaaaacgccgttacgcagtgtgatccccagatcggccgggatcagcgtctgaaatgcccgcatatcctgctccggccagcgggcctcaccacgcagacgaacaccgtcccagcggctccagtaatgtatcggtccgatattttttccggctgacagtgtacctttaacagaaaaatcacgcggatcacggccatccagcgtcatatcaaaggtcgcggacggcagatagctgttatccagccggattttacgggtggtcagctgcactttaccggacagtttctcttgcccgtcaacgcgggtccagatcagcggggataacagtgtcagcgccggggcatccatcgacatcataccgtagcggataccgttgaatccggtgttcagtttgcggatacggatttcctcatccagccaggaaccggcaccggagaatgtccagtccgcattcagcagtttcatccggccatttccccagatctgccagtaccagcggccattatccggcaggaaatcccgcgcctggcctttcatctgaaagcgataacgccccagctccggattattcaccgtcacaatagcatccagcggcccggaaattccctgctgtgacagcgaggttcccgccagcggcagacgcagttcctccaccagaaaatccggactgagctgcccgcgagcccgcaccagtgccccggagcgtaaccggatcaccgggccggcaaatgtgccggtcagtaccgccggtacccgtcctgctgcccacatatcattgtgattaacctgtccggccagctcaaaaggaatatcaaactcagtcagcggaaggggtgtttccggtaactgcaataccaccgtacctttaccgcgcacaccctgcgtggtcacggagatccgtgcgcccaccagcatatccgccggtgaggagagccagtttttcagttctgcgctgatagttcccttcagtggctgttcccattcatcccagcgccattccccgtttttaatcagaatactttccgccgtggcttcccagggaatattcagcagcacggtctgcggatcagtttcactcagcgtcagaacaccctgccgcccctgccagtcaaaggcagccatcagcggctgtggccggtatgaggttgtgatttcagcctgtaatctgcctttatccggcaactccgctgtattcagcggcagtgtcagtgcaccgctgagcgcaaatttttcatcaccgacagtggcatccagttgtgacagagtcaggttcagcgccggatcaaccgccagctccgcctgtatgttctctccctgataactcaggctctgtccccggccgggtgcggttgtcaggctcagttttccccggtacatctgccagggcgcggggataacattatccgcggtcagcgtcaccggtggcagctgtgataacagcgcgccgatatcaaccggtgtactgtctgtttcttcagggccggaaggtaatttctgaaagcagtccgcatcaccggtcagtgaaccggcatcaataatccagtgaccgccgcgctgatagtgaagtgacagcttttccccgcccgccagctgacattcattactgcggagagtcgcttcttctatatagaggccacccgcacggatttttggctgagaaagtgacagtgtaactccatccggcagagaggatttcaccacggcaggcagccagcgcggaattgtcagccaggccgccgggaggataatcatcagcagaacaagcagtaccaccagcactttcagtaattttttcatagacctcagaggtgcagttccccggttacagatacatcaactaagcgttatactgtagtcagcagatttcaatcatttctgaacacaggaccgccctattttgtcagggctatccgatttagtgtagcgatttattttttagcggaggaaccccgatgaaaatcgtcagttacagtaccaaacattacgacagcaaacatatggatttgattaatcaggatccgcgctttcagtatgatatcgaatattttgattttccgctgacacaacaaaccgcaaaaaacgccgtgggtgccgatgctgtctgtatttttgttaatgatgatgcgaaccgggaagtattgcaggaactggcggatctcaatatcagaatcctcgcactgcgctgtgcgggttttaataacgtggatttagccgctgctgaagagctgggtattcaggttgtccgtgttccggcctattccccggaagctgtggctgagcatgccgtcggcatgatgctgagcctgaaccgccgtattcaccgcgcttaccagcgcacccgcgatgccaacttttctctcgagggtctgaccggctttaatatgcataaccgcacagccggggttgtcggaacaggcaaaatcggcctggccgtactgcggatattaaagggattcgggatgcgcctgctggtgtctgatccttatcctaaccagacagcactggatctgggtgcggaatatgtcgatctgaacacgctgtttgcgcagtctgatgtgatttcacttcactgtccgctgacgccggaaaaccatcatctgctgaatgaaaccgcatttgccaaaatgaaagacggcgtgatgattatcaacaccagccgcggtgcattaattgattccgctgccgccattaatgccctcaaacagcagaaaattggcgcgctgggtatggatgtatatgaaaatgaacgtgatttattctttgaagataaatcgaatgatgtgattcaggatgatgtgttccgccgtctctcttcctgccataacgtcctgtttaccggccatcaggcgtttctgacagaagaagctctgttgagtatcagcgaaaccacgctggaaaacatcactaagctctataatggcgaaatatcttgtaacattgtgttacaaaattagtaactattacacggaacattacaatttaatcccggggattttatcctgtttcccgggattctggtcataaaaaaaccaataaacataaacttaggtgatgtcattaagtttattcttaattttgcccatcccgatttttgatgctaatattcgctccgttgtttgatgagttttcctcaacaatcacagcaactgacattcccgtttatattggtcaaatttaaatgtgaatgtattccggataaaaaaaagccccgtaacggggcggacaggatatagatattgagtaaagtgtttttgttttaatgtccgcattataaaccacacttaataaacaaatcctaaataaaaagaacaaaagcaactgcccttgttttttacgacaggctatttgttatgcttctgtttaataatactgatgtaacattcaaactataaagtaagacgtagcgatcatatattatcattaaccattaactatcattcgtgatgttattaactgatgcttttctcataatattaaaacgggatactttcagttaatatcgaatacagagagtaaaaaatatgtctatgttaaaccgtttagttttagttgcaggtattgcattatcttttgttgcacacagcgcatcattccagggccagcaaggcggcgtcatcaatttctatgggtcactgacagaagcaccctgcacctataaggtatccggtaataacgtcaatgccgaatgctaccgttccggtgaaactgcaaaatataacagcagtgttcaggcggataataaacttaacggtacattaataccggataatattggtgaagtaaatatcactccggtttcatctgattcagaaaaacatattgtcaccgtaagctatcgctgattcggcaaagatatactacacagcaaatataaaaaccaaataacgagttcattaagaataacatttatcccgtattataaaaaataataagcaatatgcctcatttaaatcaaacacccccgggtgtttgattttcttatttgtgataaagaagaatcttattcccgctatcatcgttaccactctcagattcagccggtagtactcttatctgtcatatgataacgtcgcatgtaaattaagtaatattaatgataccggtaaaaggataccgcacgaatgaatcattctctgacaatgttactgggacgtttacgaaccactgcacctgcatcacaggttacttttacccgtgatgaactgaatatacttatccgggcactctccgcatacactgcaacaccggcagcctcactgattatcaccacccgggactccggtgcggtcagccgtgctattaactatggctggagtgaggaagaaaagcagctgacggaacagcaaggcgggcaatatatcccgctgttccgtcatgatatcagcggctgaactattccccggccagggcgcgcgggaacagtaagttattctccaggctgatgtgttccattaaatcatcaatgaaggtattgataccgttatacagtacccgccaggttgtgcaggcttcttccggtggtgtgacattattggtgataaatttgatcacctccacaatatcccccgcatcatcatgctctgcttccataacctgtaccggccccgccgcctgttgtcccatgccgttgcagatcatcggaaacagcacctgttcctctttcatcatatgggaggtcagctcttcatgcagtgctgtcaactgccgggccagccctttcggaacactggctttggcagcatgcacccgctccactttttccgcctgtaaaatcagttccggtaattgtgcccggtggcgatcgtgataacgggtaataataaaggcgataatgtcacccaacggggctttccgccagtcctgcgccggagcctcatctttcagggcgagtaatgcctgttcaatttcatcgatattcagggattttttctctgccgcttttgccagtgtccgttttccgccgcagcagaaatccagatcataacggcggaaaagtgccgatgcaccattcacagacagcgccagttcgcccagggttttttcacgtaatgtcatttttgttacctcagaattcagtcgtaaaccgtgataaatcagtgctgcggcaactgacgcagcagcgtaaaagcatcactgagtttgtcttccgttaccgcaaaagcatgcagatttccggcgctgtcatggcctttggccgtcataccactgcggctgatatcaatgctccactgcagatcaggatgatgaaaattcccggcgagctgtaccggcagatccggtgttttcacccggataagcatcggcggcagtgtcagttttccctctccgccggtcaggttttttgccagacaaactgcgctgagcataatcggctgcagatactgcatcactttgccgtcaatttccgcgcaatcgccgagggcataaatatccgggtcggatgtctgtaatgaactgtttgtcacaataccgcgccggacagtcagaccggccagctcagccagcgaggtatccggtttcaggccggtggcggcaatcaccacatccgcacgggtcacacaatcatggtcaaacagcgcctctgtctcattttctgttttcttcagtgactgtaactgtgtaccggtcagcacccgcacaccggatgcggacaggttatgacgcagacggctgctgagctctgcgggcatcagtgacgataaaatactggccgccatatccgccagggtaacggttttaccggcccggcagaaatccattgccagttccgtgccaatcagaccgctgccgaggatcagtacccgctgtgcattacgcagctgtgtttcgtaccgctgaaaatcctcgcggctgttaagtgtcagcatcagttcattgcctggcaccggcggacggccaggtgttgccccggtcgccagtaccagtttgtcatagtgccattgctgctgatcactgctgataagatgctgttgtgcatcaatgccgctgatccgggtatgcgggaacagcgccacattatattgctgtgcaaattcctgtgctgactgccggataagatcggccgcccgctgattcaggcttatcacatggcttaagtcaggtttgttatattcatcgatactgtccgccgcgatcaccgtcagcggtacctgtgtatcggttttacggatatttttcaccagctggcgggcagcaaagcccccgccgataattacaatacctgcgctcatgcagcctccgtcgccaggacatcaaatacatctttaccgagagagcattccgggcacaggaaattatccggcacacaggaccacggcgttcccggctccacaccctgcatcggctcacctttttccggatcataaatccactggcacacaccgcactgcatacacggccccaaatcctgagatgatacattagtgacactgtcacatgattttgcttcttcggtatcattgaccgcagctgccggggtggtcaccggttgcggcgtaagcgcttttggtgccgctgctgccggtctgctgaccgccggtaatatcccggtcgcccactgccgtgccaggtcacgtccgtactgacgacactcttcaagggtattcaggtcaggacgccattttgctttcagtgacatagtggtttcaaaaccggcatccatcagccgggtctgcacacggtcaaccgctccgccgttccagccgtagctgccgaaagccgcggcttttttattgcggaaccgcagaccggttaattcctccagcatgccggcaattttcggcatcatgacattattcatggtggaggagcccaccagcgctccttttgaacggaacacactggtgatgatgtcgttcttgtcgctgcgggcgacgttaaagtttttccccgccacatccggatccgcttcattgatcccctgtgcgattgcatcggccatcatgcgagtgttgttggacatggtgtcgtagaaaatagtgatgcggtcttcctgataatccgccgcccatttcagataccactccacgatttgggtcggattatcgcgccagaccacaccgtgtgaggtcgcgatcatatccaccggcagtccgaacccgaggatttcattaattttcggggtcaccagacggctgaacggtgtcaggatgttggcatagtaacgctggcactgctcaaacagctccgtctgatccacctcatcattaaacagccgctcgtcgcaatagtgctgaccaaaggcatcattactgaacagaatggcatctccggtcagataggtcatcatgctgtcaggccagtgcagcatcggggtttcgacaaaaatcagctgtttgccgttaccgatatccagggtatccccggttttcaccacattaaaatgccattccgggtgatggtggtgtccgttaatggaatcaatggcattttctgtacagtagatcggggtgtccgggatcgctgccatcagttcggttaatgccccggcgtgatcttcttccgcatggttaattacaatgtaatcaatatcgttcaggtcgatttgtgtctgtaaatgctgcacaaactcacggctgaatttgtgatcaaccgtatcaatcaggacatttttcccctcgcggatcagatagctgttatagctgctgccgagcagggttttgtattctgttccgtggaaatcgcggacttcccagtcacgctgtccgacccaatgcacattattttttacatgaatagccatttgatagttaccttctgtttttatgcttcgttacagagagataatcaatttacgtgccaacttttattttgttgttttataagggttttaattttcaggataaaaaatagatgtcaaaatgactatgcaattaactgtcaatatgacattgtgctgtcataatgacagcggaggaacgcatgggattttcagttgatgtacttaccggtattgctattgccttacagcgggatatcggccatcaggatcgctttcagcgtctggtctccacactgcgccgggtacttaattgtgatgcggccgcactgctgcgttatgaatcacatcagtttattccgctggcgattgacgggctgtcgccggatgttctcggccgccgcttccggctggatgcgcatcccagactggaagctatcgcccgagccggggatgtcgtccgttttcccgcagacagtcagttgcccgatccttatgacgggctgatcccggatcatgttcatctgaaagtgcacgcctgcgccggtctgccgctgtttgccggacaaaatcttatcggtgcgctgacactcgacagccttgcaccggaccagtttgatgcattcagtgatgaagaattacgcctgattgctgctctggccgccggtgcactcaataacgccctgcttatcggtcagctcgagaaccagcaactggcattcagcgcctccgccgggctggcggcagggcaatccggcggacaaaccgatattatcggcctttcaccctgcatgatgcagttaaagaaagagatagccattgtggccggtgcggatatgaatgtgctggtcagcggcgaaaccggtaccggtaaagagctggtggtgcagtccattcacgaattatccgcccgccgtgatcacccgctggtgtatcttaactgtgcggcactgccggaaaccgttgcggaaagtgaattattcgggcatgtcaaaggcgcatttaccggtgctatcagcaaccgcagcgggaaatttgaaatggcggataacggtacgctgtttctggatgagatcggtgaactgtcaccggcgttacaggccaagctgctgcgggtcttacagtatggcgatatccagcggatcggtgatgacaggccgctgcgggtgaatgtccgtgtgctggctgccaccaaccgggatctgcgggcggaagttgccgcaggccgtttccgggctgacctgttccaccggctcagcattttcccgttacaggtgccgccgctgcgggaacgccatgaagacatcctgctgctgaccggctatttctgtgaacgctaccgtcagacgtttggtttgccgcaggtggtgattagtcccgcgttacgcctggcgctgctgcactatcactggccgggtaatgtgcgggagcttgaacatgccgtgcaccgcgccattgttctggcacgcgccaccggcaacagtgaagagctgctgttacagcctcatcacttctcgccggaagagatccctgaaccggttgtcagccctgaatccgcccccgcagaggccgagcaggatctgcgcacggctactgatgcctttcagacggagcttatccgcaccgcccttacccgcagtgacggcagttgggcagcggcggcccgccgtctcggcattgatgccggaaatctgcaccgtctggcaaaacgtctggggctgaaataatccccggacgggactttttgacaaatgtcatagggtaagccgcattttctgcactatgttatgacctcaaatgaaaatgataaccattacatttatgaggtcagggataatgcagaacaaaatcacccgccgcaggctgacacactgcctcgcgctctcacttactgccggtgtctccgctgcggcagcggaacccgcaccggacacccttattgtcaccgccgcaaagcaaagccgtctcgcgccggatgccgcgcaggaaaaagaaaaactggagaacgtcgcgggcggctccaacctgattatggttgaaaaagatacccggctggcgacgctgcatgatgcactggattatcagcccggcgtgctggtgcagaatttcttcggcggtattgatcagccacggctgaatatccgcggctccggtgtgcagagtgccccgctggcacgcggtattctgctgatgcaggacgggctgccggtcaccgatgcggacggcagtttccatatcagcaccctggaaatgcgggatgcacggatgatcagtgtccggcgcggcgccaacagcctgaatccgcagagtaacagtctgggcggcgagctggatctgatttcctataccggccgtgacgaaggcggacgcctgcgctatgaatacggttcttacggccgtgaaggtttgcagacggcattcggcggcgtatcagatgacggccgtttcgacggacgcatcaattttacttatgaccatttcgacggctaccgcaaacactcctcatcacagcgcaaaaccgtgcgcggtaattttggctataccggggataattttgaaaaccgcacctctctcaactggaccgatctgcgctttgatgtcgccgggccggtctctgaagcggtactcgacagtgacccgacagaggtttacccgatggtctggctgcgggatccgcaccgcaatgtggagcagttccgtgccgccaaccgttcggactggcagatcgataatcagcgcatcagtgccggtgtctggtatatccgtacccacgataatttcaccaccccggcctattaccgtttcagtcagagccacagtgaaggtatgcaactgggctggcagatggaaaccgagccggtctcctggcgggcagcactggcggctgatcatatgagcctggaaaccgatctgatgcagaaccggcgcggcacaaagatggacaaaacaccgatcggcaagtttgacggcaaagcagacaatatttatgcctctgccggggccggtattcatctgacaccggatctgaccctgaatctggatctcaaagccacccatgcgcggcgtgatacggaaaagcgcaacagctccgtttcactggatcagagctggaccttctggaccccaaaagccggggtgatctggcgtccggcggataatcagcgctggtttgccaacgtcagcgccagtcaggagcccgcaaccttccatgaaatcattaattcctccgacggccgcctgacaaaactggatccgcagaaaggtgtgacgtttgaaatcggcggtgacggtgatattaccgaacaactgaaatggaatgtggcgctctaccgcagctttatcaaagatgaatacatcacaacttatgattcagagggaaatatcaccggcgtctttaattatgccgccaaaacccgtcatcaggggctggaagccggcattaatggtgtcattccggcgggtcccggagatgtggaatataagctggcctggacgtggaatgatttccgctttatgggcggtgagtataacggcaattatattgccgggatcccgcgtaatattgtctcggcggaagtgctgtaccggatcggcgactggcgtttcggcccgaatattcactgggcaccgaccgacatggccgtcgatcacgaaaaccatctcgatattcagaagcgcaagcactatgcggtgctcgggctgagaggcacttatcagcctgcggataactggtcgctctatatgtcaatggataacctgaccaacgagcactatgccaccacctctgtggcaaaccgttcagtcaccgacaaagacagcactctgttcccggggatgggattcagtgtcaacggcggtatcacctataatttctgatcttactgatataagaatccccgctctgcggggattcttttatttattcagaacggacgctgcgccgggatagccagttccgccagataggattcattggtgatccgcactgcgtccttatcaattccgataaacgctttctgccgccagccggaaaacaggcggctgagggtttcatagcggacacccagttttgcggctaactgcccgcgcgataacggcagcaccacacaatccgattgctgacaccgtttcagctccagcagataagccgccagccgctgctctgcggagctggaggtcagccagtcgatatggttaatattctcatacagcttcaggctgaaccgcgccagtaactgcgccataattgccggacaggcatgacacaaccgtaaaatcgcctgtttatccagcatcagcgcactgctgtctgttctcgcccgcaggctcatcgggaagcgattgtgcggcataaagacagcggcgatcgccaccagctcaccggcggtaaacataccgaatactttttcctcccccgaccaggtatgacggaaaacatcaatctgcccgctgatcatcagcggacaggcttttactgtctccccttcacgactgatcaattcccccgccgcaaactgacgatgagtgctgtctgccagtaccagcgccagatcatcctcctctgccgcctgaaacaacgggcacgaccggaggatcgccatttgctgtgcaggggcaagggtctttttgacaaatgtcatagggttttcctctcagtgcggccagaataaatgcaattataaatgataaccaatcgcattatcaatttaatcataaaataaaaggcgaataaccttatgattagtaatagatttacattattgccggtactgttttttacctgcacaacagcagcttatgccgcaaaaggtgccgtgcatttcaccgatatgtcacagcagaatattgaactcgccgcacctgcacagcggattgtggtgatccctattcctgccgcctccatgctggtcagtgttgatgaaagcagcaagcggctcgccgggatgcatcccttcgccggtgttgccgcccgcgacggtatgctcagtgtgatgtttccggatgtgctctctgtacgcagtgatgtggtggggaatgatttcgcaccgaatattgaagccctgctctcggttaacccggatctggtctggcaatggggacaccggggcgatgacattatcacgccgatgcgcagtgccggtctgacggtcgccacgctggattacggcaaagaagcctatacacaggagtggctgaccctgatggggaaaaccctcggcaaagaaaccaaaacggacgggctgattgcctggcgcaaacaggtgatcaaccagctggaaaacagtgttgccgctattccggaagaaaaacaaccgcgtgtgctctatctctctcattttaaacagagtattcagactttcggatccacatctcataacaatgcggattttgcactcgccgggggtgtcagcctcaaccgtgacctgaccgggccgcgcaccctgaatatcgagcagattctggtgtgggatccggacattatcctgctgggtaattttgaggccggactggcgcccgctgatatttataacaacccgatgctcagtgatgtgaccgcggtaaagaataaacgggtctataaactgccgattggcggctttatctgggatgcgccaaatcaggaaacgccgctttactggcagtggctggctcagatttttcatccggaaagtgcggcatttccgctgcgggaagagatccgcaaacgctatctgcaattgtacggctattctctcactgatgaagaaacagaccgcattttacaactcgacctgaaccgggaaggccgtgattatctgacactgatggggcggccgtgatgcgaaaatcccgtctgcaatggtacctgttatccgccctgttattactgaccgtcgtgcttgcactgtgtgccgggcgctatgcggtctctgtgacaacggttctgcaaatcctggcggataccctgaccggacgcagcccgtctgcggaatacagccgcaccgctgaaaatgtggtgttgtatgtccgtctgccgcgcattctgatcgccggactggccggtgccgggctggcggttgccggtgccgcattacagggcatcttccgcaacccgctggtgggcccgcagattatcggtgtttcatccggcgcggcgctgggtggtgcactggcactgctgcttttctcctctttatttatcactatcagttttgcctttctcggcggtctgctggccattgtgctggtctttttactggggcttaaccggcacggcagcagtcttctgatgctgatccttgcgggcgtgattattaacgctttttttgccgccctgatttcgctgatcacctattttgcggatccgaacaataccctgcaaaccatcgtattctggctgatgggcagttttgccaccgcaacctatctgaaagtgagcgtgttactgccggttgtcatcattgcaggcgggattatttttgccctccgcttccgcatcaatgtgctgtccctcggcggggaaaatgcacaggcgctggggctgcccgtcaccgcaacccgctggactatcctggtctgcgtcacgctgatcaccagcgccaccgtggccgtttccggcaccatcggctgggtcgggctgattattccgcatatcgcgcgactgatcagcggatatgaccaccgcgttcttctgcccgccagtgccctgaccggcgcgatttatctgatcgctgtcgataccctggcgcgcagtatgaccagtgcggagatcccgctgagtgtcatcaccgcgctgatcggggcaccgattttcgccctgctcattcactcaatgaataaaaaggtggcagacctgtgatccgtgttaatcagctcagttaccacaccggaaaacgtccgttatttgacggactgacattccgccagccgccgggcactatcgccgctattctcggcccgaacggccgcggaaaaaccaccttgctgcgcctgctgctcggcctgcaaaaaggggcaaccggcactgtgcagctcagtgcaccggcagcctatgtgccgcaactcagtggtgcgttatttaattactctgtccgcaccatggtcagcctcggcagggttcgccatctgccctggtatgcctccccgtcccggcgtgatcatgacatcaccgagcaggcaatggctgacctcggattaacctcgtttgcggacaccccatttaacctgctcagcggcggtgaaaaacagatggtgatgatcgcccgcgcactggccggtgaaccggacattctgatcctggatgaacccacttctgcgctggatctggcaaatcaggacacggttctttccgttctgaaaatgctggccgccgaacgcggcaaaaccatcctttttaccagccattatccgcagcatgccctgcatattgccgattattcactgttactgtttgacggcacacaggcgcagtttggtcagacacccgcactgctgactgaagaaaatctgggaaagctgtatcagcttccggtttctgtcgtgccggttaaccacccgcaccggcagacctgcggcgtgatcccgctgttccgctgaacccatttattacctgattaaccataaggacatttattatgagcaataacactattaccccggcagaagcattagtgattgccgacctggtcagctacaccgaacagggtatttccagccgcgttctcgccaaaaacggcggcggcaatatcactctgtttgcttttgataaaggccaggcgctctctgaacacagcgccccgtttgatgccattgtgatgattgccgaaggttcactgatcctgaccatcgccggaaaaccggtaacggcaaaacccggggatattgtccgtatgccggccaatattcctcatgccgtggacgcgccggagcgggcaaaaatgctgctggtaatgttacgtgaaccggaaaacaaacaggactgaataatggaaagcacacataccggccatgaagccggacacaaatttctggcacgtctgggtaaaaaacgcctgcgcccgggtggccgcaccgccacagaatggctgttgtcacacagcgggttacagactgacagccgggtgctggaaattgcctgcaatatgggcaccaccgccattgaaatcgcacagcgttttcagtgtcatattaccggcattgatatggataaacaggcacttgccaatgcgaggaaaaatatcctcgctaacgggttgtcacaccttatcaccgtgcaggaagctgatgcctcaaaactgccgttcccggataatcattttgatgtggtgatcaatgaagccatgctgaccatgtatgcggacaaagccaaagcccgtctgttacaggaatattacagggtactgaagcccggcggccgtctgctgacccatgatatcgcgctgacagaacgacgtgaggatgagtgtgtcacgcaggaaatgcaggctgccattcatgtcaaagcacaaccgatgctgagtgatgactggctgacactgttccgtgacgcgggtttccgtgatgtgatccgctcggaaggtgcgatgacactgatgacaccaaaaggcatgctgcacgatgaaggactttccggcaccctgaaaattatccgcaacgccctgaaaaaagagaaccgcccgcagtttttacagatgttccgccatttccggcagaatcgtgatcgcctgcgctatattgccgttgtcagtacaaaataataagcagtgaggaatgtcgtgaaggtgaaaaccaccggatttttgagtccggtggttttgcagaaaagacgaaaagtataaaccccccagccataaatttccggtgcacagttaaaaattaccgcatctgtgcgaacgcctcactacaggtattagtgaataaatcgtaatacatcaatgtttcggcgtattacttagtgttatcttttgttttttcagagctaatataaaaaacagccttatctataaggcagcaaagttctgtatacgccgattcatagctggtataacgccaggcataccaccaggattctgattctttaaatccgctatctgttatttttttacttatttctttgatattatcagagtaattttctgcgtttgtaaaatgtctgctgacaccataatagatactattactgtctttctctaccaaaacagaaaattcatcaatgcctgatgagaacaacacaccaactttggtaaatgcttctttgttttcatttcgtataattttcaaatcaggataatcgttcatcaacattttataccaacgattaaatgatttttctttttgttctgtaagaagtttatttaaacaattttgcacttcatttatattttcaatttcatcttgtattaatcttacatttaaatcagattcactttcatttaaaccaagttcttctataagaaatttatttattttcatatctgtcaccacatccttttttaaggaaaacttcagataatcaatatattgactaacgaagtgaaagagattgctatcttttttctttatattgggcaatacatcattagtaagccatggtaatatatcatcagaaaaagaggatatcgacactctgcttctgaatgagttatgatacaccgataaactatctgaaggatagatatccttatttcttctttttatgtaaattataaatatattttcttctttaatgcccaggtgctttacaatattaatatatcgtttgagttgctcttgctgatcaatggcattattgatcttattttcaataattattgccttttctttatttttgaccagaatatctatccgatatttttctgatgtgatatctgtttttttgcagtcaaaagatatatcacatttaaaacactgcaataaaaatgaagacaggaatatattttcaccgccaatattgtaatttaatatatcagccacaacctgactatgttcgttttcgtttggtttaaaaatatcaaccaggttatatctttttccattagaatttaaaaaaataattttattgtgtatatagtttattcgtcttctttcttcagaaaaacctttcgccataccagtgtatatttgtttttctaattcatgatacctgatatattttttctcaaaaaaagattgaaccatattatttccttcaatccgggttatatatcagagaaagacaggttgttttaccaacctgctcatttagcgttaaaacccgccctccggcttattcagaatatggtcttcccagttctgtaccacactttcggtgacggcaatatggcggacggtaatacctttctggtgcatcagggatttggatccgctgattaacgggtgccagggtaataacggtttgccttccatgaccaggcggtaagcacaggtcatcggcagccaggcgtcaaatgtcggcaggttttcccgcgtcagtttgatgcagtccggttcatagcggaaacggtcttcataatgacggcactggcagcttttaatatccagctgattgcaggccacatcggtgaaatagatttcatcggtgtctgcgtccatcagtttctgcaaacagcattgcccgcagccatcacacagtgattcccactcttcgtcactcatttcatcgagggttttcaccgtccagaatggttgagacatgttcttttttccttttacttcgtggctgacccgtttcagataatccgcgtggtcagcatgtgatcatttacagagattttcagcatatcgcccgataccagcggcccgacaccttccggtgtgccggtcaggataatatcccccggacgcagcgtgaaataacgggacatatagctaatcagcggtatcaccggcgtcagcatttcgcgggtgtttccctgctggcgcaactcattattaacggtcaggctcagggtgacattctgcggatccgggaattcattgaccggaataaatccggataccggtgcagagccgtcaaatgccttacttttttcccacggctgccctgccgcttttaatttcatctgcacatcgcgcagtgttaagtccagcgcgacaccaaaaccggcaatcgcccgggcgcagcgatcttcattggcctgtttcagcggagcgccgatcagaaccgccagttcggtttcgtgatgcacttcgccgaactctttcggaatggcgaccggttgacgcaggtcgcacagtgccgtttcaggtttaataaaaagaaggggttctgcggatgcctgtgatttcatctccgcaacatgctttgcataattcagccccacacataccactttcccgaccggaaaatccaggagagcgccctgccagtcacgatgctgatacatagtcttacccctttaatttattattctgatgacatcagcggatttccgcaccgacattatccgccatcagcgaaacgctgagtgcaaagaagtacgagcggttccagtgcatgatggtgataaagttctgtgtgaccagatacacccgctcctgcttatcttccggtacaactaaccacatcggggtcgattccggcagatttgcctgagcagggagtgtcacacccagggctttccactgcgccagtgttttgctctggtttttctttgttccctcaatgctgcggtcaaagcctgcgggaacagtcacttcatatccccacggcagcccttttacccagccttcggtggccagataattcgccgtggaagcaaacacatccgctttgttattccagatatccaccatgccgtcgccgtcaccgtccacggcataggtcagatagctggtcggcataaactggttttgtcccatggctccggcccaggagcctttcagctgctgatctgccgggatatgtccctggtcgataatctgcagtgctgcgataaactgtttaataaacatctcttcgcggcggccttcataggccagggttgccagggcggaaatcacatcttctttaccctgataacgaccgaaaccactttccagtccccacagggagacaatatattcctgcggcacgccgtaacgctgactgatgccggataacagcgccgcattggcatcatgctgttttactgcggcgctgacagcgcctttggtcacacggcgggccaggtaatcatccagcgtgacttttttctcaggctggtttttatcagacgttataacacgttcgataaaatgaaaattctcaaaagcgcgggtcagtgtggattctttaatcccctcctgacgcgccatcgctttcagttgttcagcataggccggaaattgttctgctgtccgtgagtcagccggaaattcccgctgtaaatctgccacggacaaccgtgctgcggccggctgctgcactgccggagcgtcagctgctaattttgctggtgctaccggtgtctgagatgcactgcatgccgtcagcgatgccgtaataatcacggcgcttaataatgtcaggcgcatagcgatatcctttctggttatttcgcggggattattattaggatttatcctgaatattcagtgtatcccggtattctgataacagatcttccaccggtggcgggaactgcagataataaccggcatctgtcagttcctgtttcactttctcaatatccgcattggccagtttatcgcggtttgcaaggttgatcagcatgctgaaaacgggcttgccgaaacttttcagcaactcttccgggacacgggaaaaatcatctttcttttcgatgaacaaataggtttgatcgcggttcggacttctgtaaattgcacacaacattggaattatcccgtttaaatcaaatcgtgacttgccagtaaatggcactaactataacatgctattgtttttgataatatcgttacccggcattgcgtcgctgcaatgcaatttatatatggctgaatagcgggccgctaattatactgagtcggacagatgtcaccatcgccaattgatcttaaaggcagtaacttcacactttcggttcttcatctgaataatgaggatcctcagattattgaacaggctgtgcgcgaaaaagtcagccaggcgccggcctttttccagaatgcccctgttgtgcttaatgtcagccagatttcatccggcgcgaacctgaaaattatctgccgtgccgtcactgacgccggtttacggattgtcgggatcagcggttgtcaggatgaaaaaatgcgccgggccgcaacccgcagcggacttccgctgctcaatgagggcaagagtgcccgtgttgctgaaccggaagcgccggagcctgaaacaccggcagtatcatccgccgcagattcaccctgccggaagacccggctgattaatgtgcctgtccgttccggccagcgcatttatgccccgaacagtgaccttatcgtgaccgccaatgtcagtgcgggcgcggaactcattgcggacggtaatattcatatttacgggctgatgcgcggacgtgtgttagccggtgcggcaggtgatacggaaagccagattttctgcacccacctgcatgcggaactgatttctatcgccggacaatattggctgagtgatcaaatcccgggcgaattcgccgggaaagcggccaaactcagtctggttaataatgaactcactatcaacaatctaatatagacctttaacaaggaataattccatggcacgcattttagttgttacttcaggtaaaggtggcgtaggcaaaaccacttccagcgcggccatagcgaccggccttgcccagaaaggaaagaaaaccgttgtgatcgattttgatatcggtctgcgtaaccttgacttaatcatggggtgtgagcgtcgcgtcgtgtatgacttcgtgaacgttattcagggcgatgccacactgaatcaggcacttatcaaagataagcggactgagaatttatttatcctgcctgcgtcgcagacccgcgataaagatgcactgacccgcgaaggcgtggagaaagtgctgaacgaattaggtgagatggactttgatttcatcatctgtgactccccggcagggattgagagcggcgcactgatggcgctctattttgctgatgaagccattattaccaccaaccctgaagtttcatctgtccgtgactctgaccgtattctcgggatcctgtcctccaaatcccgccgtgcggaacagggacaggagccgattaaagagcatctgctgcttacccgttacaatccgggccgtgtcagccgcggtgatatgctgagtatggaagatgtgctggaaatcctgtgcatcccgcttatcggtgtgattccggaagatcagtctgttctgcgttcatccaaccagggtgagccggtgattctggatcaggaatcagatgcaggtaaagcttatgacgataccgtcgcccgtattctgggtgaagatcgtcctttccgtttcattgaggaagagaaaaaaggtttcttaaaacgcttattcggggggtaaaccatggcgctgttagacttcttcctgtcgagaaaaaaaccgacagctaatattgcaaaagaacgtttgcaaatcattgttgcagagcgtcgccgcggtgaatctgaaccgaattaccttccggatctgaaacgcgatttactggcagttatctgcaagtatgttcaggtcgatccggagatgttgtctgtccagtttgagcagaaaggcgatgatatatccgttcttgaactgaacgtcacgctgcctgaaggcgatgaaggcacgaaaaaagacgagactgcaaaaaaagagtagtttcagtgactgataataacacggcggggtaacccgccgtgttttttgctgtttattccccggagacagcaccggcctcaataccggcaaccacctctgtcagtgcagtctccagcaatggtttacgccagccgttcagcagttccggctcttcggatgacgtcctgaatccccacactttattcagatactggttaatctgacgacgtgatgccagcagctccggactaaactgttctgcctcgctcagctcagtaatgcgtgcttttatcgccttaaacgttttgcggtataacggatgatcggacacattttccaccggtgccggataatcagcctcattcagtgcacggctttcttccgttaacgccagcaggcgtctgccgtgacagcggatttcctggccggtcagccccagcccgtccagctcacccagtgacgtcggcatatagcgcgccactttccacagatgttcttcacgtaccacaaaattgaccgccatatcccgctgacgcgcctgttccagccgccattgcgccagtttctgtaaacaggccagttgttgcggacgcagttgtgcggcaccgctgaaatcgcggtaagcttcagccgggtcagtctgggtaatacgacgctgcgccatcatggcgcactcttcttccgcagaagccaggtaaccggccgcacggactttttctgtcagtttttccgccagcggcagcaggtaatacacatctgccgctgcatattcacactgtttttcagtcagcggacgcgccagccagtcagtgcgggattcacttttatccagggtaacgccgagataggtttccaccagtgtggcaaacccgcaggagagcggatgtccggtaaaggcggccagcacctgggtatccaccagcggctgcggcacacatcccatgctgttgaaaaagacttcgatatcctcactgcccgcatggagatatttgatcatatccggtgcagtcagtaaggttttcagcggtgtccagtcagtgatccccagcggatcgaccagtgcgagatgctccccgtcataaagctgaaccagaccgagatgcggataataggtccgtatccggacaaattcggtgtccagagcaagataaggtttgccggtaacctgtccgcaataggcagcaaggtgtgtatcgctggtaatcaactgataattcaaaacaacttctcttagtctttgacgacgtggttaagtgatgtgatacagaataattcaacagatcagggtatttcaatctaatagtcataacagaacagataaacgccggttttaaccggcgttattattctgcggcctgatgtggtgtcatgcaaccggctgaacatccgttttgtgcttttcctcatcgcgcagttcacggcgcagaattttaccgacattggatttcggcaattcatcacggaactcaatgattttcgggactttataaccggtcagataacggcggcagtgcagacgtaaatcatcttctgtcagtgatttatctttgcgaaccacaaaaatcttcacggtttcaccggagctttcactctccacgccgatagcggcacactccagcactgccggatgcagcatgaccgcatcctcaacttcattcggatagacgttgaaaccggacactaggatcatgtcttttttgcggtccacgatgtgcagaaaaccgttttcatcaaactgcgcgatatccccggtggcgacccagccatctttcagcacttcagcagtggcatccgggcggttccagtaccctttcatcacctgcggaccacggacccacatttcacccggctgcccttcctgtacatccgtgccgtcatcatccatcaggcggatctcagtggacggtaccgggaatccgatactgccgctgtaacttttcaggttatgcgggttaccggcgaccagcggagagcattctgtcagaccatagccttccagcagatgtttgccggtcagtttttcccagttttccgccactgctttctgcaccggcataccgccgccgacagaaagattcagggtggagaaatcgagtttgtgaaattccggattgttgatccaggcattaaacagggtgtttaccccggtaatggccgtgaacgggtatttgctcagctccttaattgttccgctgacatcacgcgggttagtgataagcagattacggccgccgatttcaataaacagcaggcagtttaccgtcagggcaaatacgtgatacagcggcagtgcggtgacaatcagttctttgccgacattcagctccggaatataggccgcccgcgcctgctcaaggtttgccagcatattgcggtgagtcagcatcgcacctttagccaccccggtggtaccgccggtgtattgcagaaatgccaggtcttcacggtgaatttccggtttgacatactgcatgcggtaaccctgatggatagcacggcggaatgagatagcatccggcaggttatatttcggcaccagacgtttgatatatttgaccacaaaatccaccagcgtggctttcggacgggaaagctgatcccccatacgggtcaggatcacatggcggattggcgtgttataaacgattttttcgagggtgtgtgcaaaattggaaacaatcacaatcgcggcacagccgctgtcatttaactgatgttctaactctcttggtgtatagagggggttgacgttcaccaccaccatccctgcccgcaggatcccgaataaggctatcggatactgcagtaagttcggcatcatcagcgcgatgcgatccccttttttcagccccagtccgttttgcaggtaagcggcaaatgcgcggcttcgctcttccagtttccggtaggtcatcacctcgcccatattgataaaggcgggctggtccgcaaagcgcgataccgcattctccagcatctctgccattgaggcataggtgtcaggattgatatctgccgggacatcttccggatagtgtttaagccagactctttccaaggttttactcctgattattgctgctcatctcatgacccgccggtgttaacaaaatatttacataaataaagtatttacataaaacggcgttttcggataatttttctgtttcaggttgagagtcacatcactaatttgttttataaagccagataacaatcgaggcggcaaatgccgcctcttaatctattcactgtaacaagctgaggataatcattcctgcttatcgtcacggacgggattatacactcaaatccgcatttatgctgaactttaaggttaccatacccgcaaatccgcgcgattaaggtactaaataatcctgcaccactgccggtcccggcggataataccagccgccgccataatagccgccgccgtagtacccgttatgccagcgccacggatccggaccgtacaccggcggcggcataatcacctgccgcgactggtgccagcgctggaaaccggtgacatcaatcaccgggaaagtataaggaacatcgccgattttaccggcttttgtgccgttcatcagcccgactaccgtaacatactggtcgcggaagttatccggctccataaaactgttgatccgggcatacatccggccggtaatggttgaaccgaggaatggcgcaccggtactgttcagcggcatcaccgcgatttccagctgtgtcatatccggctgattctgcacgctgagtacccgcccgccgaaacgcgcttccatccctttgtaagcctgcggcgctttctgaacggcctgaaaatccgtcagcatcgtggtgccgctgcccttaatggattccggtactgtggcgcagccggccagcgccagtgatataatcacaacaccatacttcagactgccccgtaagcgattcatcatgatatgagctcctgtgacggatagtattcatttattgtggctgatgattgccggttcaacaattgacgcaggctattttttttacgttattcccggcccggtaatttcttccaggtcacttcgttgcgcagatacaccggctccgccgattcaggggcagacgtttccccgcggcgcagtgcattcagtgcaggcggcagcatatcctgtgcatgcggcagcgtaatctctgtcatttgtgtacggagggtcagcgtttcctgcatctgcggatacgccgcccagccggtacctgccagtccccattcgccggtgagtgcggcacagcgggtgacaaaatcagccggtttcagcaccgcttctgccagttcctgccggaaaataccctgctcatcacggacatacgccgcgcagtacacttcatccatgcgggcatcaatggcaaccagcacacgggagagcccggcagtacggaaaaccccttccgccatggtttccagtgatgagacaccgatcatcggcagctcagcgcccagcgccagaccctgcgcgatcccgacaccaatccgcacgccggtaaaactgcccggcccctgaccaaaggccagtgcatcaagatcacggagagagagattctgctgtgccagaacggcctgcaccatcggcagaatgcgctgtgtgtgttcacggggggtgacggcaaaatcggcggtgatctcaccattgttgtaaagtgcaacagaacaggcttctgttgctgtatctaaggctaaaattcggctggacatgccataactccggcaaataaataaggtttatggtaacaaaaaaatcacggtaacagtgacttttattgcgaaactgattcagtgttattccgctgtacggcgctgtgattgccgtgctgccagaaattccgcagctttggtcagtgaacgtgtccgtggcgacggcggcagacttttcaggaagatttccccgtaaggccgcataacaatccggttatcgcagatcacaatcacgccgtaatcctccgtatcacggataagccgcccgaccccctgtttaagactgatcaccgcatccgggatctgaacatcacggaacggatcgccaccgcgtacctgacaatcttccatacgggctttcagcagcgggtcatccggtgcggtaaacggcagtttgtcgatgatgacacaggtcagtgcatcaccgcgcacatccaccccttcccagaaactggcggtggccaccagcaaggcattaccggaggagataaaatcacggagcagctgtgttttactggtttccccctgcaccagcaccggcagtgtcagtgactggcggaattcggcggcgagatcacgcatcatctggtgtgaggtgcataaaaagaaacagcggccacggttatggttgatcagcgggcgcagttgttccgccagctgttttgccgcaccgtactgattcggcgacggcagaaaacgcggcacacagagcagagtctgttcctgataattaaacgggctcggcaggatcagggtttcggcgttatccagcccgaggcggcgggtaaaatggtgcagatcatcattcaccgacagtgtcgcggatgtaaatacccacgccattttctgattactcatcatttcgcggaatttgtcttccacggtcagcggtgtcagtgccagcaggaaatgacggccatagctttcaaaccagtaactgtaaccggggatggaaacatctttcagccgtttgagccggttgcggtacagggtcgcccgttcaaacgccgcatccagcatggcagagcggccgagagagagcttcatcacgtcataacagagttccagagcatcatcgagcaaggtgagcgcccgctgaaactgcggctgtgccagcagttcccgcagattaccgcgaaaaccggtatcaccgagtgccagccggaaatcctgcacactcatcgtcaggcgatccgcacatttctgtaactgtgcctggtcacgcagctcactgcggtaagctaatgtgatatcgcgggtcagatcaaataactgacggctgctgagctgctgaccgaaatactgactggcgatatccgggatctgatgcgcctcatcaaaaataatcacatccgcctcagggataagctccccgaaaccggtgtctttcaccacgcgatccgccataaacagatgatggttgaccaccaccccgtccgcttccagcgccttgcgccgggctttcagcacaaagcattctttatattgcgggcagtcgctgccgaggcagttatcgttagtactggtgatcagcggccagaccggactgtcttccggaatatcgtgacaagtggtgatatcccccagctccgtcgccgtcgcccagcgccgcgccgccactatctgtgtgagggtttccggctccatattgatatcgccgagagtctgctgccccagccgctccagacaaagatagttcgagcgccctttgagcagtgccaccctgccgtcataatccagcgcctgaataatggtggggagatcgcggttatagagctgatcctgcaacgctttggagccggtggaaataatggttttctttccggcacgcagcgcgggtaccagataggcaaaagttttaccggtcccggtcccggcttccgccaccagttgcccctgcgtttcaattatccggctgatcgccgccgacatggtgacctgggcttccctcggctgaaaaccgggaatgacacgggctaagcggccgttttttgcaaaatcgtctgacacgcgcgttctcttctgacaaaataggcactaattatgccaagggttgagcaatagcaccaccttgccgtgtaagaaactggatatatttacaggagagagaatgacaattcagcgaattgatccggaagaccgctggtctgaagcggttgtacacaacaacaccgtttattacaccagtgttccggaagatctgagtggggatattactgcccagaccaccagtaccctgcacgcgatcgataaaattctggcccgcgccggttcagataaaagcaaaatcctcgatgcgaccattttcctggcagacaaagccgattttgccggtatgaataccgcctgggatgcatgggtcgcgaaaggcagtgcgccggttcgctgcaccgtggaagctgctctgatgcacccggattataaagtcgaaatcaaagtgatcgcggcagtctgagtgttgaaaaaagctctgccggtcaggtactgagccggtaacaggcaaaggaaacgaaaagcatgcgagccatggatggcgagcctgagcgtacagggactgtattcacagcgacttttcgtttttgcccgttaacggccctctccggagcctgattatacccccggttatttcagccccggtgctttccacatcgatgtcgtcaggccggaatccaccagcgtaagctgatccgcatacaccttctgccagttctgtttggctttgtcataaacctcgcggtgtgccggatttggctgatactcatgctgccactgcaccagacgctcacccgccgtcaccatatcatcatataacccgacacccgctccggcggcgatcgcacaccccagcgccgtagcttctttgacaaccggtacccgtaccggtaccccggtaacatccgccaggatctggctccacagcttgcctttcgaaccaccaccggcgaacaccagtgaatccgctttcacgccactgaatctggcgatcagatcaagattgagggatgaaacaatcgcagcgttctcctccagtgcgcggaacagtgaggctttgttactcttttctgcatcaatggagaggttaataaaggaaggcgccgcgtgataccaggatttaaagcgcatcacatcggagaaaatcggcataataccgtgggaaccggcaggcacacgggccgccatatcttccagtaatgagtaagtgtccacgccgagacgttccgcgatgattttttcttccgcgcagaacgcatcacggaaccagcgcatcgtcaggccggtaaagaaactgatggattccgcctgtaccatccccgggatcacatgcgggttgatgcgggtattcatatccggatcggtgaccggtgccggtaaattcaccacctgctgccagaacgtgccgccgagcaccgcagtttgtcccgctctgaccacgcccagcccgaggcagcccagttgaacatccccgccgcccatcaccaccggcgtgccttctgccagaccagactctttcgcggcattcgctgtgatataacccagtacggtaccggtttctttaaccggagagagaatatccgcacgcagcccggccatttccagcaggcccggccgccagtcacgggttttcagatccagcatcccggtggtgccggcattggaaggatcaactgccagctcgccggtcagtttgcaggccagccagtcgctgatcatggtgagtgtccccgcctgccggtaaatatcaggccggtgatgtgccagccacagcagacgcggcattgcgccgagggctaaggtctggccggagcactgataaacatcatattcaaaagtgttatcgtacagctcttttaattcactgacttcatggcttgagcgcgcatccacgttggcacatgcccagatcggttcgccgttgcggtcatacagtacaatgccttcacgcattgagcaggccgccaccccggcaatcgccgaagcaggcagaccggcatttttcagtgccagcgcaatacagtgacacgccagttgccagttcaccggcagatcaaactccatcgagcccggtacatccggcagctcgttgtgacgccattccgcctgtccgaccgctacctgattgccgtgaagatcaaaaataacggctctgatactgcctgttcccgcatccagcgccatcagatatttttctgatgagccgctgcgcgtaatctgattcatgtcgccatcctcacaaattcaattggactgataccgttacaccatgaaatacagcgtgattttcgtctgcgggacagtcagtgcatcaggttaataatgtcagcatcacccgtgccgtctgctcgtctgtcaccagagagttgatatagccccccagcagtgccgccacaatcacctcggctttttcctcaccgcccgccaccccgaccaccgtcggaatatttttcagctctgcgggggtgataccgataagttcgcggtgcatctccacttcttctgtcagttccccttcgcgcccgataaagtagccaaggatatccccgaccgccccgcgccgtgccagcatcagttgctcaccactgctgatatagccggaacgcataatggtggcatcctgtttctgattcaccgcgcccaggccgacaacggcaatatccgctgcactggctgccatcagcacatcctgcacgctgcgttcctgacggaatgtcgcggctactgaggcattcgatgcccgcaatggtgcaggaataatgctgaccggacagttggcatcaagctggccgatgccggtcatgtactgcccgacgccgccggaaagtgtcaccagacggatctgctgcgaagagacaaacccgctcagatgctgcaatgtcgccattgccgcctccccgaacccgactgccagcaactggccgggcgaaagctgggacatcagcagatgtgcaccggccacgccgaggcgggtgtggatctccgggccgttcagtgccgggagtatgcgaatttgttttaacgaaaatctttttttcagaatatcttcaagttcaaggcagccttcaaaccgggagtttatctgtacccggatgacgccggactgacgtcctttttcgagcaaacgcgaaactttcagccgtgtcagaccgagcagatccccgatatctccctgcgtgagaccatcgtggtaataaaaccaggcaatacgggccaataactcttcttcattcatactaagtcctgaggcgtcatagtccatcgaagaaacggagcttaccggggctgctttcgtgttttttgaaactgttgtcatgtgaacttttgttttccgtttttacagataagcaccttttacagaaatctgccagaggtgcaggccaaaattttgaacaaattctaacgcagatctgattttttcacaaaatatggccgaaatattgtcttatttgatttttatggcttacatttatgaacaaatgtgtttataaattataaatgttcattttattgatgtttttttaatcacataacatccggcagcaatacccataacaccagaggtgccgttatgtcagagaagcaacacccgattcagccgctgctcaccgcccgcggaatagccaaacagttctccggtgtggttgtcctcaaacacatcgatttcacactgttgccgggacaggttcatgcgctgctgggcggcaacggcgcgggaaaatccacgctgatgaaaattattgcaggaattgaacaaccggatgcgggcaccctgatgctggaaggtcaggagatatcgcacctgaccccggcgaaagcccatcagctggggctgtatctggttccgcaggagccgctgctgttcccgaatctgtctgtgcaggaaaacattctgttccgtctgccgaaacatcaggcaggcaaagccaaattacagcagatgctgacatctctgcgctgcaattttgatctcagtgcgcgggcgggcagcctgaacgtggcggatcagcaactggtggagatcatgcgcgggctgatgcgtgattcccgcatccttattcttgatgaaccgacagcgtccctgactccggctgaaaccgaacgcctgtttgagcgggtacgggaattacagcagcagggtgtcgggattgtctttatttcgcataaactgccggaaatacatgccattgctgattacctgagcgtgatgcgtgacggtaatatcgcgctggccggtccggcaaaacagttttccactgatgaaatcattcaggccatcacacctgaagcgaagaaaaagccgctgtcagagacgcagaagctctggctggatctgtccgccacccgtaacagtccgcaggatgatacaccggtgctggatgtccgtaatgcgtgcggcgaaggattccgtaacatcagttttgttgtcaacccgggggaagtggtcgggctggccggtgtcgtcggcgccggccggaccgaactcgcagaaacattatacgggctgcgcccgctgatcgccggagaggtcttcctcaatggtgacaatctgcgcggtgtcagcagtgaaaaacgcctcacccgggggctggtctgtttacctgaagaccgtcaggcctccggactttttcttgatgccccgctcacctggaatatcggtgcgctggtgcataaccaccaggggctgctggtcaaccgctcgcgggatgatgcattgctcgagcgttaccgccgtgccctcaatattaaattcagtgacggacaacagacggtacgtacgctgtccggcggtaatcagcaaaagatcctgattgccaaatgcctcgaagccaatccgtcactgctgattattgatgaaccgacacgcggcgtggatgtcggcgcccgtaatgacatttatcagctgatacaaagtatcgcgcaacagaatgtggcgattttactgatctcctctgacctcgatgaagtggtggcgctggctgaccgcgtgctggtgatgcatcagggggaattttccggggaattgcagcacaacgagctgaacaccgacaccattatgcatatggcgttcggcgagcaccgcccgcagacagaaacagaaagcagcccgttacaggaggccgcatcatgctgaaatatatccagaataaccgtgaagtaacggcactgcttgctattctctgcctgtttgttttgctcggcggcatggaaacccgttacttcagtctgcaaaccgtcaccatgattttcggcagtgcgcaaatccagatgctgctggccatcggtgccaccctggtgatgctgacccgcaatattgatgtctctgtcggatccaccaccgggctgtgtgcggtgatcgtcggtatcgcgctgaatgcagggctgccgctgacagtggcgatcctgctgaccgtcgccgccggtctgctggccggattcttcaacggtatcctggtcccctggctgcggatccccgccattgttgccaccctcggtacgctcgggctgtatcgcgggattatgttgctgctcaccggcgggaaatggattgaaggtttacccgcagaactgaaagatctgtcaaaaccggtcttcctcgggctgtcgccaatcggctggtttattatcctgctgattattctgatgaccctgttcctgtcccgcaccaccgccggacgcggtttctacgccaccggcgataacttacagggcgcgcgccagttgggtgtgccggttgaccgcacccgcatcattgccttctctgtaaacggcatgatggcggcactcgccgggattgtgtttgcctcacaaatcggttttatcccgaaccagaccggtaacggccttgaaatgaaagccatcgccgcctgtgtgctgggcgggatcagcctgctcggcggcaccggtaccatcgtcggcgctatcctcggtgcctattttatgactcagattgacagtgtgctggtgctgctcagactgccggcctggtggaatgactttatcgccggctttgttttactcgcggttctggtctttgacggccgtctgcgtgtggcgctggagaaaaacctccgcgcccagcgctatgcccggttccttaatccttccgcaccgcaggaggcgaaaaaatgagcatcaccaaacgttatggctgggaaattgccctggcgctgctgattgtcctcgaaatcctgttattcggtatgggtaacccgcgcctgctggatgtcaatgtgctgctgttcagtaccagtgactttatctgtatcggtctggtggcgctgccgctgacgctggtgattgtcagcggcgggatggatatctccttcggctcccccatcggactgaccgccattgtgctcgggatcctcaatcaggccggtgtaccgatgattgccgccattccgctgactctgctgaccggcgcactgtgcggcctgattaacgccctgctgatcctgtttaccggtgttaacccgctggtgattacgctcggcactatgtatctgttcggcggctgtgccctgctgctctccggcctgtccggtgcgaccggttttgaggggatcggcggcttcccggcagccttcactgattttgctaaccttgatttactcggcattccgctgccgctgatcatttttgtcctgtgtgtgctggtgttctggttttatctgcaccgcacccatccgggccgtaatgtctttttaatcggacagaatgcccgtgtcgcgcgctacagtgctttcccggtgacacgcactatctgtctgctgtatgcgatggtcggcgtcagtgccgcactcgcctctgtcattttagtgtcctatttcggctctgcccgtgcggatctcggggcatcgttcctgatgcctgctatcaccgctgttgtgctgggtggtgccaatatttacggcggttccggatccgtattaggcaccgcgctggctgttttgctgatcggttttttacagcagggattgcagatgatcggcgtaccaaatcaggtctccagtgcactttcgggtgcgctgcttattgttgccgttgttggtcgttccgtttctttacaccgacatcacatccttggctggtgggcgcgtaaacgcaacaggcaattcgtatcagagtaaaacacgtttgttatcacagatttgacgaaatggagaaaaccatgaaacccatcatgaaaaaactggcgctcgccactgcattaagtctcgcatgtgtttcctgggcgaatgcagcagaaaaagtcgcctttattcctaaacttgtcggtgtcggcttctttaccagcggcggccagggtgctgtggaagccgggaaaaaactcggtatcgatgtcacctatgacggcccgaccgagccgagtgtgtccggtcaggtacagcttatcaacaacttcgttaaccggggctatgatgcgattattgtctccgccgtttcaccggacgggttatgtccgtcactgaaacgcgccatgcagcgcggcgtaaaagtgctgacctgggattccgacaccaacccggaatgccgctccatttatatcgaccagggtaccccgaaacagctcggcggcatcctggtggatatggcagcggatcaggtgaagaaagagaaagccaaagtcgccttcttctattccagcccgaccgtaactgaccagaaccagtgggtcaaagaagcgaaagcgaaaatcgaagccgagcatccgggctgggaagtcgtcaccacccagtatgggtataacgatgccaccaaatccttacagactgccgaaggcattcttaatgcctggagtgacctggatgtgattatcgcgccggatgccaacgccctgcctgcggcggctcaggccaaagagaacctgaaacgcaacgatgtggcggttgtcgggttcagtaccccgaacgtgatgcgcccatatgtggagcgcggcacagttaatcagttcgcgttatgggatgttgtcaaacagggcgagatttctgtcgccgtggctgatgcactgatgaaaaaaggcgaactgaatgtcggcgataagataaccatcgccggtgtcggtgaagttgaagtctccccgaacagtgttcagggctatgactacgaagcaaaaggtaacgggattgtggtgctgcctgagcgcgtaatcttcaccaaagaaaatattaacaactatgatttctgatgtagttgctgatttaaccaatggcgcgggcaccctccgcgccagtttaaccaggggagaattccatggctgatttagatgatatccgtgacggcaaagacttcgggcttaatacgccgcaaaaaaacaccctttataccctcaaaggctgcggttcgctggattggggtatgcagtcgcgtctggcccgtatttttaatccgcaggataataaaacggtcatgctggcttttgaccacggctatttccagggaccgaccaccggccttgagcggattgatattaatatcgccccgctctttgagcataccgatgtcctgatgtgtacccgcgggatcctgcgcgcacaggtgccggtcacgaccaacaaaccggtggtgctgcgggcatccggcgccaattccatcctgaccgaactctccaacgaagcggttgcggtggcaatggatgatgcggtacgcctgaatgtggcggcggttgcggctcaggtctatatcggtactgagcatgaacaccagtccatcaaaaacatcatcaaaatggtggatgcggggatgcgtgtcggtatgccggtaatggcagtgaccggggtgggtaaagatatggcgcgtgatcagcgttatttctcactcgccagccgtattgctgcggaaatgggtgccaatattatcaaaacctactttgttgaagaaggttttgagcgcatcactgccggttgtccggtaccgattgtcattgcgggcggtaaaaaactgccggaaaacgaagctctcgacatgtgtttccgcgccattgaccagggcgcatccggggtggatatgggccggaatatcttccagtccgaagacccgatcgccatgatgaaagcggtccgtgccgttgtgcatggcggtgagagtgcagcacaggcttatcagctgttcctgagcgaaaagaacaaggggtaaattttgaacgtaacattagtggaaattaatgtgaaacccggcaaagtggatgaatttattgccgtttttcgtgaaaaccatctgggatcgataaaagagcccggtaacctgcgttttgatgtgttacaggacccggaagtggaaacccgcttttatatctatgaagcctatgccgatgatgcggccgtggcggcacataagaaaaccccgcactatttacagtgcgtggaaaagctggaagacctgatgaccggcccgcgtaaaaaaacagtctttatcgggctgatgccggaagtgaaataagcatatcctgtttgacctgttaagtgaccgcacaatggcggtcacttttttttattgattattcattgtttcatttttatggatgattatttatcttatttttttatttttcccgaaaaaatcggattaataaaatataatacgcatgttcataattgcactcaaaaataacaagcatgtattttttaatctatctcatattttccttctgacataaaatcgggctcaatccattttggtcctttcatataaaggctgcctttctctcctccgcacattattttttcttcattcagaagccggtgcgtttcgcggagaatcataatattacacgactcatatttatccggcccattatggcgataaaaaaacgatctattgccgggtaaataagaccgctttcacgcctggcaaccagaaacaggatgacatcttccatcgattcattttttatcatttcattgtaatcaatcattttacatattttcctttcagaataaaatctgcctgcaggtgattttatctggtgattcttttccggacaatactgaaatgcgttactctgactttctaaaactgttgtttcaacgaatatcattaagagaatttcagaataaataatgcagattgtctgtttgtctggttgcctgaacggaataactcccttaccatcgaaataaatgaatctgaatttatggctttccggagaaatcgtgaaaaaactcacagtaacctgctcagttctgcctttagtgctgttttccgctgttttcgccctgccgtcttatgccgcagaaactgactgccagccgatgtctgaacagacccggctcaatcatatgaggatgatgggactttcttacctgaacggcccggtaaaatcatcctccatggtcaccgacagcgatcagcaggacagcgatgtcaggatattttccgccagtaatgtgacactgtcaccctgcggacagatcactcactatgatttcatccgcagaagtatgcaatacggcatgacctttgatatacaggtagccggggcggaaaccgctgatgccatcagtatggaataccgtttttcctcagaagaagtcggccggaaaaaagagcgcccgaccatcagccggattatcctgctcaaagatgcacaacaggtgattaccggctaccggacagagaattttattgagggcaacagcactatcctgaccgaaaacggcactgtggaataccgcgatggcaatatacattcagtcgtgatagacggcgaagttctcgccaaaccctacagtatgaactttgaatatgacagtgccggccggataacccgtatttacaccacgccgacccttctcagtaattaccattttacctacaatgagaaaggcggcctggataaaggaacagaaagaacggagtcgatcgggatcgtcaccggaaatgatattcagtgcacggaatgggatacctatcaaaactgtaccgcagggctctggctccggcatattaacggtgaaccggccggtgaagtgcctttccgtaccacttatgagtattacagtgataaataacagcagaagacaatcagcataatcgtattacccgattttatcgggtaatacctgttctttacttcgctgctgccggcgatgacagtacgccagaataaccagtaccagataaatggccggttccggtgtatctgtcttcgctgctaaaatatagtgcgtgataacaatgaacagcaacggatataacagattatggatccgtttccaccaccggcctgataagttgcgtatccggtcagacgacgtcactgccatcaggcacaaaattaaccagccagccacaccgagattaagataaaaacgggaaaatatctcactgaaaaagagtgccgtattttctgcacctatttcaagaaaaaaatagctggccagatgcagcgttgcccagaaaaaacaccataatccgagtaattttctcacctgatataaactgttcagcttaaaataaaaagcaatcaccggtatcactgcgataataataactaaacgaagtgccgtaataccggtgaaatgctgaatatcttttgcgggatctgcccccagcatcccgtaattaacagcataaataagccataccagcggcaatactgccgtcagatgaaaaaaaaatttaactaccgggtaacggaataatttcatcatcagaaatatctccgcagatccattcctttatataattctgccacgtcttctgcatccccgttaaacagtaatgtcggctgccgtgttgtccggcctaaccctccggagccgataaaacgttctgtagcctgtgaccagcgcggatgatcaacctgcgggtttacattggcataaaacccatattcacggggtgctgaaagattccatgtggtcggcggctcagattctgtcaggcgaattttaacaatggattttatgcctttaaaaccatatttccacggcaccaccagccggacaggtgcaccattttgtttcggcagttcttttccgtaaacaccggttgccatcagtgtcagagggtgaagtgcttcatccaggcgcaacccctcaatatacggatactgaagcccgcctccggtaaaacggctcttttgaccgggcatttgttccggggcgtacaccgtttcaaaagcaacatatttcgctttgctgttcggttccgctgataataataaatccctcagaggaaaaccgacccacggaataaccattgaccatgcttccacacagcgcattcggtaaatacgctcttcagcctgaaatttatgacggatctcatcggcatttaataccagaggccggttaacttccccttcaaccgtcagtgtccattcatccgttttcagggtatgtgcgttttcagccgggtccgatttattcaggccgaattcatagaaattattgtaaccagtcaccttatcctccggcgtcaatgccaggccggactgatacttttcaggttttgtataactgaggtcttttaagattgtttccggaactcccggcttatcatcaccggaaaaccacgaaaacagaccggcgctgactgacgggctgaccattaatccggccgtaccggcacctaataacttaagcagattcctgcgtttcatcataaaaacggattccggcgtaatctcagacgatcgtattatttttttcatgatgagtccctgtattcagcaatcacggtgataacattccggaactgttataccgcataatctgaatttaaagctgacaggacgatgacaaatttgtcatgaaaggggctgagtatccggaaaaattaaggttaccgtgttatatgacccggtacgttcaaatctgacctcacctgaatgcaattctgttattgcctgaacaatcgataaacccaacccgcttccttctgacgttctcgcattatctccgcgccagaaacgggtaaagacctgttcactgtttgcaacaacatcacctttgttcatcactgaaatgactgtgctgccatgattattttctgcacaggcaataacctcggtattttcatatgaatatttaaccgcatttgacacaacattaaccataatctgcatcagcaatactctgtcggctgataccgtcacatccgatattttattaaccagccggatatttctctcatcggcataaaatgccagtaattcataaatatcctcaaccagttcagaaacaacgatggtttcccgcttcagattaatatttttattctccgccctggcgataaacagaatgttttgtattatttttgccagtttatccagctcttctgtattgctggcaataatcgcttcatactcatccacagtgcgcgttttttgtaatgtgatttcattctgaattttaatggcattaataggagttcttaattcatgcgctaaatcatccgcaagttgtgtcagccggacaaaatcatttttcagccgtgagcgcatgatattcagtgaatcacccaaacttttcagttcatccggtaagcggctgatatccactgtctgtcccagagagtgcagatctgttttcgcggtgatccggctgagatgcgcaatatcctgcaatccccggcggataagccatatactgaagatggccatcaggagaatagcaataacggaaacaatcagactttgctgtaaatatccgcgtaaaacactgctgcgatcaaccgaacgctttgccagagtgacatataacttaccttcgggagcctgaatctcaaaattaaccacggaaaccggcatgttatcatccgtattctggtatgagattgaaggcgtttcctgattatccggataattaagtttgtcccgggtattcagggttatctccgggttggtatccacaataacgtgattatcagcatctgctatcttaataacatcctgccgcatatccatcatccgccggaaataaacaggtaacgatttaatatcaataccactgacaatcagtttagccagttggtcggcacggttaatcaggatgtcatcatcttttgaggcaagttcatttttcagagagtgataaaggatcagtgtgacaaaacctgcgtttgccaccatcagcaacataaataatgatacaattttaaatctcaatgagcgtattttcatcattcagatccgttcaggcggtatcccataccacggacagtttcaattaatttacgatcatgatcatcatctattttttttctgagccgccggacagccacatcgacaatattggtatcactctcaaaatccattccccacacctcacaggcaatcagtgttctgggcagaatctccccggaatgcagcgcaaaaaaaagcaacagtgaatattcctgacgtgtcagcgatattttcacacctccccgctgtacatcatgacgggtcagatcaatgctgagatcggcgatctcaatcactttggaagccggctgagaagtccgcagctgattccggactctcgccagtaattcggaaaatgaaaacggtttaaccagataatcattcgcgcccagttccagtccttttacccggtcggcaactgcatccctggctgtcagacaaataaccggtaccattttggcggttctcaatattttcagcacttcccagccatccataccgggcaacataatatcaagaataaccagccggtaattgttctccagagcaagatacaacccgtctctgccatctgccgtgatatcaacaataaatccggcttcctctaatccctttttaacccagctgccggtcttttcatgatcttcaatcagtaatattttcatttttataatccggaattttacctgtacatcctgcaccagtgtattttaattccggacataaaaaaacagcaggccggtgccacgcaccgaacgcggcacctctgacccgtaatctgtatttataatgacagaatccgttccgctatcagcgacattaacacgtccgcctgtacatcggtgataatcgtggtgttgatatgtggttcatcgatacggcactggttttcagtgcctttctgcacatccggtacaactgcatggctgaagccggaaagcttgcgcgattcatactcaatttcaacgtatccgtcggtgcctgaaaaaatatcagggcggactaaatacgcaatcacacagggatcgtgcaggaacggatccgattccgcatagccgcgcgccatctgtgcggcggcaacggcaatggcatttccctgctccagtaccccgcacagccccgcccggatatccgccttatgggtcacatccagccccagcatggtaatatgcgccgcgctgtcaaaaacgatatgtgccgcatgcgggtcaacatagaaattaaattcagcggctggtgtgatatttccccggcgaaatgccgcgccacccatcaggacaatatccttcacattatctctgagccttggctctttcagcatcgccattgcaatattggtcagtggtgctgtcgggcacagtgtgacttcgccggggttcgacatcacggtatcaataataaaatccaccgcatgtttttctgaataacggtaaggggatttcggtagttccacccccgccaggccgtcactgccgtgcacggctgttttgtttccccggcgggtcagcagaggacgcccgcagcctctggccagcggtatatccggccgtgatgccagcgcaaggatcctgcgggcattttcatggactttatccagctcaacattaccggcaacggttgtgacccccagcagctcaatttcaggggaagccagtgccagcagaatcgcaacagcatcatccacacccgggtcacaatccataataattttcgtcatctcacttctcctctgatcacgcatatgatgtacagaaccataatacagatttaactctgcccggaaaaaataccggccattgttgcagacaaacaactgaccagcgttgaaccggcaaccagccgaaacgtatttgcggctatcatttttccgtgttttttactgatcgcggacacacagccgataatcattcccacagagccgaaattcgcaaatgaaatcagaaatactgatataatcgtttctgttctcgggctgatatcctgtatttttatataatcaatcattgccacaaactcattggccagtacttttgtggcaataatctgcccgaaccggacactgtcttcccacggcacacccaatataaacgcaagcggtgaaaaaatataaccgagaataccctgaaacgttatccctgcaatgtgtaaaaacacatcattcagtaagctgattaatgcaataaagccgagaataataggaactatcgccaggataagtttaaaaccatcctgcatatgttcagtgataacctcaaagaaactgtgccgttcattgttcacaccggaaaagttctccggaatctcaaccggatcaccgggattaataatagaaacgataacaaacgtactgaaaaaattcaggcatacgccgataataacaaactgtggtgatatcatttgtgtatacgcacccagtatggcgatatcgactgttgataaagaacatgccgcaatcgtatacatctgtggttttgtcagattgggtatatattcttttattgatacataaactgccatcatacccaccgcaacagagctgacagcggaaaaagattcaagtttaccaactttcgctattttattaatcagatagccgatagtgatgataatcagcctgagaataccgaagtactttaagatcccgataacagcgcaaataaataccagcggcatcagtgcagcaataacaaatattacgggttttttagcagtgatatccccgaatacaaaatcgatacccttgttagcgtgatggataagatattcaatccccccggaggcagtatgaagtattgccagcccggcagatgtatgcagaagtgcataagccacagcgccttccagcaataataatacgattatcggaacacacttttgtttgatatcaccggccttaaaactgattgaggccgctgcaataaaaatcacgagaaggctgatgatgaaaataaaatacttcataaaaacctctgccctgtattatattaatcgtttgggttattcaggttatattcccttacatacaatcctttttcagtctgatcccgacgctgtttgcggatggcatggatgatgccccttttttctcaaccgccagtgatgcataggcaaccgcaaatttaatggcttcatccatacttctgccttccaccagcccggccgccagtgagcccgtaaaagcatcaccggccccgctggtatcaaccactgatgcattaatggcgctgtaatgcttcatcgttgtgccattaaaataaagcgctccgttgtcaccgagtgtcatgacgatttctttcacgcccagactgtgtattactctgatagcctgttccgcagaatgaagatcactgattttaatatctgaaataagctccgcttctgttccgttgggtgttaataaatccactgaagacaaatgagacacaatattttctgaatacggtgccggattaagaatcacatagcaaccacacatttttgccatatcaatagtaaaacgggtaatatcaatattattctccagctgagtaagaaatacctttgcagatttaagattattaatatctgacaatatttctgctttcgttatcgtggcattggcaccctgatcgataataatactattatttcctgtaagactttccaccatcaccagtgcactgccggtttttacactaatatccttaatcagggtatatgaccctgttttggtggtactgaaatatttttccgcatcagcaccgaatgaatcatcaccgaccttaacaaaaagatgaacacggttgtttatttctgatgcagcagcagcctgattagccccctttccccccggataaaaaccggttgatattgcccggattgtttcacctacagacggaaaccgttcaacttcggtaaccacatccagattaaatgatccgaggatatataataaacagttatcttcgtgtcttttttctctggttttttttacatcttcaacattaaaaaccctggtttcgttaatcgtccgttttattacatctcccgcctcaattttctgtaatttaacaccgccgtgaaatttaactgccacacctgataattgtaattcatcgatataacgtcttattgttctttcggatacatgcagcagtgcactgagttcttttacataaataacgttatttttaattaatcgctctctgataaatgcaagactgttttttttcttcatacagttcctcatttttctaagattagtgttttttcctgtttattctgcctgaaccgtcacgtttcctgtccggattcggacaatttgctgtccggttttatcagcagtaaattatttaaccggaaaataaataataaaacggaaattaatctgtatgattggtcagatgatgtatgatacgtgtttatacgtatttatcagtatgaacgaagatgaccggaaaggaaggttatttttgaccggcataaaaaaatccggaaataacacagtatttccggattctgatattacacaggatcagcacgctgatccttcactgccggtgacaatcaggcaaacttaatcatcaccatacccagcagaagcagaataatcccgctccagcctttgtaattgaggcgctggttaaacaggatccagcctgcggccactgttgccacaataccgaatgctccccacaatgcatacgcaacggaaagctcaataccgcggacggccagtgccagacagctgaacgcccccaataccgccagcagcgataaaatacccagccacagacgtttaaagccgtttgacattttcagcaggatattcgccagaatctccagtaccacggccagcagtaaaaatgcaccgtgccaccattcaaatgtcgataacatattacgcccctttcagcatctcattcagtggcgcacgaaccggtttggcagcaggctgctttttctgcacttttttggtgccgtatttaatcagggtgatacctgcgattaacagtgccagaccgcccagtttcagcggtgacagcgattcatggaaccacatcacactaaacgtggtgatgatcaggatcccgatcccttcccacagcgcataagccaccccgagggctacttttttcactgccatggataataaaatataagaagaggcaatcatgatatacatcacaatcatccccgcactgccgccggagacactcgcgtatttcatcgacaatgtaccgatcacctcggtaataatggctaagcctaaaaacatccagtaaatcatagttatttctcctgatggacaacgcatacaggttcacggcgcaaaacagactgtttgcgtgaccgggtgcgtttatcgcgaaacgaaaacgttaaatgtaacgatgtgaccaaaaacgcaggcgcgcttggttcgtcagacgaaaagagaaatagctataactcgccgtaccagtagtgttcgcttgatacgatagcggaaaggaaaagtacatgggtagaacgtcggattttaatcctgctactactgtcgctttgcatgatgtcttattcttttgtctgtccccggacagggtgacaacaatgaaagaatcctccggttattaatattcatattatttttagcacaagtaacacagttcagcaatggtgcgctgaattatttttcagtaaataattttattttttagacagttataaaaaatgaccaccttcttattcagaagatggccatatttacgcgctgctcacctgcccggctgcgggtttttatgccgccgggcggataattattccacttcgttccaggcgtggccgtcacgggccatcatggcgatagaggctatcggcccccagctgcctgcctgatacggtttcggcggttcattatccattgcccaggcgtgcataatagaatccacccacttccaggcttcctccacttcatcgcggcggacaaacagtgcctgaataccgcgcatggcttccagcagcagacgttcatacgcatccgcaatatgtgtctggttgaacgtttccgagaaactcagatccagcttggtggtttgcagacggtgtttatgatccagccccggtgctttgttcagtacttcaatatcaataccttcatccggctgcagacggatagtcagtttattcggcggcagatgctgataggtttcattgaagatattcagggacggctgtttgaaatagaccaccacttccgaacattttgacggcatccgtttcccggtacgcagatagaacggcacaccggaccagcgccagtcgtcgatatcggcgcggatagcgacaaaggtttcggtctggctgacggtattcgcgccctcttcatccagataacccggtactttttcgccgtgaacaaagccggcggtatattgcccgcgcacggttttttcacggacattcgtgatatcaatggtccgcagtgagcgcagtacttttactttctcatcacggatacggtcactggtcaggtcatccggcggtgacatggcaatcatagtcaggatttgcagcagatggctctgcaccatatcccgcatctgtccggctttatcaaagtaaccccagcgcccttcaatccccacttcttccgccaccgtgatctggacgtggtcgatggtgcggttatcccagttattaacaaacagggagttggcaaaacgcagtgccagcaggttcagtaccgtttctttaccgagataatggtcgatacggtaaatctggctctctttaaagtatttcgccacttcggtattaatcgcctgtgatgaggccagatcattacccagtggtttttccatcaccacacggctcggttctttattcagatgcgcttcgcccagccctttgcacatggcgctgaacgtacccggcggcatcgcgaaatagtaaacagcggtatttttgttttccgcaataatattggcgaggcttttgaaatgagaggtctcattcacatcaagattacaaaacagcagacgggcactgaatcgttcccagagcaccggatcaagttgctcgttaaggaacgtattgaacgcatcctcaacaaatttctggtactcctcacgggaccagtccgcacggcctgccccgataatccgcgtttccggatgaatattaccggctttttccagctgatataaagacgggagtaacttgcggcgtgcgaggtcgcctttggtaccgaaaatgactaaatcacaggcgggaaccgttgctgtcagcgccatagaaaacctctcctcgtggctgtggaattgtaattttgttacagagatagcgaataatgtactcgtttgcgcccggccagtaaacataaatgcgggttaccgcacattctgacaggtctctgtcgccggtctttctgtgtgctgttttgtaatttaattacttttttgatgcaaacttactaaaatgaaaatcagacacagctcaaactttcaaaaaaaagccggatccggggggatttaccctctcctttgcccgggcttacgtagtatattttcaaaaaacgagggtggccggtgtgtcacacagatcaatataaaaggcacagtggcatgaatattttagaccgtctccgtaacagtctggattacctgagtaaatcggaaaaaaaagttgcagagacgatcctcggcgcaccgcagatagctattcattccagtatcgccacactggccaaaatggcggatgtcagcgaaccaaccgttaaccggttctgccgccgtcttgacaccaaaggttttccggatttcaaactgctgctggcacaaagcctggcaaacggcacgccgtatgtcagccgcaatgtggatgaaaatgattccgtcgaggcatacaccggcaaaatctttgaatccgctatggccggtctggacgcggtcagaagcaccctcgatatgctgaccatcaaccgtgccgtggattgcctgacacaagcccggaaaatcgcctttttcggcctgggtgcctctgcggcggtcgcccatgacgcgatgaataaattcttccgtttcaatatcccggtgatttattccgacgatgtggtaatgcagcgcatgagttgtatcaacagcaccgaaggtgatgtggtggtcttaatttcccacaccggccggacaaaaaacctggttgaaatcgcccgtatcgcccgtgaaaatgacgccaccgtgctcgccatcacctccgaaaactcgccgctcgcggcggaagcctctctcaccatcattcttaatgtgccggaagacaccgatatttatatgccgatgatctcccgtctggcacagctgacgattattgatgtcctcgccaccggttttaccctgcgccgcggccccaaattccgcgataacctgcgccgggtcaaagaagccctgaaagactcccgaatcgataaactccgttgatttttaaccatttgtgtcaatttgacacatttcctgctgccgggtgtaatgaccatcacgaattagtaatataacggatggtaggataacgtctgactcactgttttgcgtttgctgactcgatttttattttaaatacgcgataatcagacaggagtgaatcgattttacactttcctgccgggagcgattttcccggcggggagtttttatcaacaccatttcaccttattcaggtcaacggagtaatttatgtcaatacgcctcagaagaacgaaaatcgtaacgaccctgggccccgccaccgatcgcgataacaaccttgaaaaaatcatccgtgccggtgccaatgtggttcgtatgaacttttctcacggcagcccggacgatcacgttgaacgtgcgaataaagtccgtgaaatcgctgcccgcctcggcgtgcaggtggctatcctgggtgatctccaggggccgaaaatccgtgtgtccacctttaaagacaataaagtcctgctgaatgtcggcgataaatttattctggatgcagagctgggcaaaggtgaaggcaccagtgagcacgtcgggatcgactataaaaaactgccggaagatgtggtgaccgatgacattctgttacttgatgatggccgtgtgcagctgaaagtgctggatgtcaaaggcactaaaatcatgacagaagtgaccgtcggtggtttgctttccaataataaaggtatcaacaaactcggcggcgggttatctgccgatgcgctgacagaaaaagataaagaagatatcaaaaccgcagcccgtattaatgttgattaccttgctgtctccttcccgcgcagcgccgaagatctgcactatgcccgccgtctcgcccgtgacgccggttgtgaggcgatgattgtctccaaagtcgaacgcgctgaagcagtcgccactgaccaggtgatggatgaaatcattctcgcatccgatgtggtgatggtcgcccgtggtgacctcggtgtagaaatcggtgatccggagctggttggcgtccagaaaaagctgattcgtcgcagccgtcaactgaatcgtgtcgtgatcacagcaacccagatgatggaatccatgatcactaacccgatgccgacccgtgcagaagtgatggacgtagcgaacgccgtacttgatggtaccgatgcagtaatgctctctgcagaaaccgctgctggccagtatccggcggaaaccgtggaagcaatggcgcgggtttgcctgggcgcagagaaaatgccgaatgtgaatatctccaaacaccgcctggatatgaccttcgacaatccggaagaagcaattgcgatgtccaccatgtacgcggcaaaccacctcaacggcgtgaaagcgattattgccatgaccgaatccggccgtaccgcacgtatgatgtcccgcatcagctccggcctgccgattttcgccatgtcccgccatgaaaaaaccctgaatcagtgctcactgtaccgtggtgtcaccccggtattctgcagcacccacaccgatggcctggcagcagtcaccgaagctatcagccgcctgaaagaaaaaggctatctgtgcaccggcgacctggtgatggtcacccagggcgaccagatgggcctggccggcagcaccaataccagccgtattcttgaagtgaagtgatttgctgaaacgaaaccgcctgtcggatgacgggcggtttttttgttttagctttctgtattacgactgacacctttccgcgtgtgaccgggaagcattttcggcatattttcatgcatgggccgatactgatttcagtgatgagattgtcggatcgcatccggtaaaagtgcttgtgggtgagcacgatcccacattcaatgccgggttaatgaccaaaacttatcttcggcgctatccccgcgcaactcccgggattccggaaaacgccgggcactatccgatgaacgagacacccctcgcgcttgtcagggcaatcgaatccttccttgccggaattataagcactgcggattcactgaatctccgtatgccctaatgcaagtgagtttgtaacttcactgggttcaggcttcccggtagttatcgtcccttttagccgccataaggcggctctgtattcaggctcatttttcagaatgaaaacgccagtcagctgcggttgcgagagtcacaaacggcccggccagcgtaacgttgtgatgaccgatgatttcacccgctgacaaatgttcgttatccattgttgtatgcgcatctgaaatcagcactgtcctgaatccccgttcagatgctgcccggcaggtcgtatccacacaaaattctgttttcataccggcaataaccagctctttaacacctctccggctaagctgaagctgcagatcggtatcccggaaacagctggggtactttttaacgaacacgatatcccgctcagcgttaacgttcacttcgtatatcagttgtgtcagcggactctgctccgcgaaaggggaattgtcggggcctgtgtgccgggcaaaaaaaacaggtacctgaacctgccgggctttttcaatcagaagacaaatatttgacagaacctggtttgcggaatacggggaaaccgggccatgaaaaagcccctgctgcatatcgataattaaaagtgcatatttagataaaagcatgactaatctccattcagagcgttatgaacggagagattttcttccccgtctggttttgtggggagtctgaatctgttttgtcaggagccagtcacagatacacccacaccgccggattttccggtggtggtgactatagttgctgaccagactgacttaatcattttctgaccttctcgtatttatttagtatcaggagctggagtcataaaaaacctccctttttgttgtagcaccgatcaaataccggtttcaacaaatattttgcctgaaggaagaacgaccttaattgcttttactggcttttaagttcgcatgacagaaatagtgagttttcggtaagtgattggcttgttaattcatatattattcactttgtttttttgataacactattatcttattttattgattatattctcagggttttagttttcagaaacaaggatgaattaaaaaaatattctgattccttttgtctcattaatggggagtggacagtatcatgtgattatcagaaattataatacttgtatagtacgggagcacatactattactttagtgtgtacccccttgacgcttcaaattttcagataaagaaacagcacacaaggcgttttgtttcttttactatctacttcgtaaagattttttgttcgtaattattcgtgacatcccgaattctggcaattttccatacccctgaatcctgctctaaacaggcttcaaggtgcagatgtttcccatcttcaatgcccagatatacatctacaatcttatatccctgtttgtcatgcactgcaccaatttttagtgctggtatccatgccgggtcatagtcctgggtgtaggtgaaatagtccgatgtcacaatttcctgttccggaatagcaattacactatgtaaacgattaagcgtattttcagacacataacgctgtaattccggatccctgtaatcaggtggaagggtagagaacttagagagatagtagttataaaaatttcttacctgctctgccggctgattggtcgttgccaggctacaggcggataaaagacaggcgataagaaaaatagctacacgcattagttcatcctatagattttgaatgagggttgagttcttcgatagccgggaccagggtacatagaacgctgcctgaaatctgaaatccagatgattccatcatacatggccatatgaccacttggatttccgcccggataaggttgaataaccgcgacatctccggcctgaatagttgagccttgtagtacttcactaaatcccgcccgttctaatgatattccataatcttttgcatgggccattttgtcgatcctgacgcctcctgcctctattgcttcgcgggtatattgtgcgcatcggctacctgatgtgcctctggctgcagttctcagatgtgacaccgcagcctctgtgttccaattcataatttcttccttgtattatcaattgcaaaatgatcaacccataatataacactaattacagaagcctgaagtccaatggaacgaaaacgtacgttaataacgtaactgacagattaaaaaaatataaaattactatatttgcgaactgatttacgcagatcttattaccggatttattactaaaaaagctaatagctatatataggaacaggcttagatgggaaataaagtggcatgatcgggtccatatgaaaatcaggtcttcccattcgttatttttatggaaaaaattaacagattttccactcagctaattacggcactatgtggctctcaaaagagcagtgataacattatgattttatcacgaacgccgatataatcaggcgtaaaaatcgccccgtttcagggctgtttattcgcaatttaacactataaaacaaaaggatttgtttcctacgatgtccacatcgcgaccacattcgatatttttgtaatccaatccctcttctgagaggttttattttccaagtaaacgaccattgtggcaagtaagaacttataagcaccacttggctttgagtacacagttatggcacagctctaaacctaatctgacaagcaactctgtgcagggagcggtttttttaccaaaaattaatgaattcatctcggaaaacattacaagatttattttcgccctaacatagaatttactaactttgaatattcttcggcgattgtaggatctatcggctcttttctactagtggcgtcctgtgcttcatcaaaagtatttgcttgtattttatccaactcaaagtatttttttgcatagcttcctttagaactatcctgaacgacctgataataaaccattttttttctattgacttgagctacagtgtaaatcagattttcatcccaactatcaagattaggatgaataaatttatagctacctgatcgatagtaatcacctgtttctttaaaatgctgaaattcatcattaatgaatgatacgtcttctcttttaattctcatattacatcttttacaagatactgctaggttcatcatttcaaacatttcagatgtaatctttgattttggaatgatatgttcgatatcaagtaccatattaaattcatcatctatatttcgtgaacaataacaacagcattcttcttgttttttacgtaaatgatctttaattttacttttaagagcactcagagtttcatcactccaaaaagtatggcctttcgctattgcgtaattcattaaactttgctcttcagcaagaaatgaaatattattcatggttaccccattttttatgattgacttttgtaagtaatgaatttacacctgaaaggaattctttttgagcggaatcatttgccattccttcaaattttgacaaacgatccctagccgtttgtaatgaaatttttccagcagtaaattggtctataatatctacgcatctgttagatagtgctctatttttaggcgttagtatgtcaaagtaatcaatatataattcttcagtgctgtcatcataagaatttacttcttcaaacccataaactccacgcttgtaaattaaagcttgatcactctctgatattgaagtaataattataggtgaatgagtagctataacaactatacatttgttataaccaatcgacccccttaaaaaatctaaatatttgctttgccatttgggatgcaaactattttcaggttcatcaataaatataaaagaataaccgttcacgcaaaacgcaacatgaacaagtaaagcgataaacgataactcacctgaacttgcttgacttagggggaatgtataattatttttacttaaaaacacttctatattggatattatttttgctttttttaaaagtcgctcaaaccttaataagatcaaataagaatcaaaaccaccctcgtaaaaaacgttatcattatcggtcagccagactaaaacactatagtcatgttttatctgatgaatggctttatttattgccattttaagttcatccggtattttttggtcgctactgtcaaaaaaaattgaataataatcaccagaagcatttgttgaatatctaattgcgtctttgaatttttttctaaattttaccttgataccaattttttgttcatatcctatatgatttaaaactgaaaaaatgtgacttacttttttttggctttcagttgaaagagtattctttattgcttgagcagggaaattcctacctaacttactccctatatagctataataaaggctttggggatgaacttcaaatttatcaaatagagtatttgatacagtaatagtgttgtagcctgaattatgtaggttctctgctagatcatgcagcaatcggcttttaccactcccattttttcccaccaggataaaataatcgttttgagaatttaaaagtttgtgagcattaagcatttcattatcgctaatctgattgtaagataataaatcttacattatgacctcataacattgcaattcataaaattgtagttgtcatcttcctactttaatcaccaccagtaagtgttttggatatcacatgttcgcttctcgctcaaagcaaactgtcagatttgatggtatgctgccagtaaaaaccgtcaaatcaggtctgaaccagtacatattaatagcatccccctcaattaatgggcttttttagcggaagtaaaactttggcttccgctacaagtgtttcaataatcgataacggcaaattatccgcaaaaatactgatagaaaattcatgagtcacatctgaataaaatatctctgccagttgctctacaggacatgtatccggcaaacgcagttcaagatacattccgtctctgacaacatcactccccctgataatctcatatcgtgttccattgtcttcaataaacataattctgactccctgctatatgcttcctgagaacatatccaactgattttcgccataatggcttttcggaaacgcattctccggcagaccgaatcctgtcggcagtggctgcggggctggctttgttaaataccgctcgacgctggtcagggtagtaaaagtacagccacacagtatattttgacactggtgatagctgcgtttcgtttcttcagttaccggctcgctggtgcgagtccaggatgcggcgccgcattttggacaattaaacgccattgtaaaaccttggttcgggggtttgcctgttccaattatatcacgttaaattagttgtctgaattatcaccatccaccatattgtcattatctattttcaactctaattcaagctgtgtctgaaaaccgccctcacctatctgatgcaccatccgggcaataatccatttgtgattatcaatcaccgatttaaagccgcttacggtggcaggcatttccggaaacaggtctgcccggccacgcgccagcgtgatagaaaactccgccgccccgcgttgcagtttcagccactttgccgccgccgcccgctttgccgctgtctcagttttaaaggtctgacgcatcacaaaaacgttaccctctgccccttccagatattcaccctctttactgcctgatttttctttcctttcttttttcggctttttacttttgtgattcttccgcttcacgctggtttccggttttttccgaagttgagatccaaccagttcgcctttacgccggtgtaagcgtcccggtcagccacacggaaactgtgcttatcgccgctgtcacgggtgatcacgatttccggtattggcttgccgctggctgacagcccccggttcgggatgataaacagcaggttcccgtttttaatagtggcaatggcgcccagcatttcggccatgcgtgacagaaagctgatatcgctttcattggtctggtcggcgtggtctatttcaatatcaatcagctggcggctgactgccggtgtcaggttgtagcgcccggcgatagcgctgaccaccttaccgactttgatatcgtgccagctgtattcgcgcttaacgttgaagtcctgccggaagtccgcagaccgggctgtaacaaaagaagaacgagggttaccagaatatatcagagtggataacggactcaaatttatatcagataaattggttcacttttgtaccgaaaatggtgttactctaaattagattcagctgggaaaaccacaacaaaatgggtttattgagcattttaacggcttattccgccgtgaatttttaaatgcgtatttatttgaatcactgagtcaggtgaaagaaatggccaggttctggatgcaggattacaaccggaaccagacacacgaaagtctgaataatcttccgtctgagctttaccggaagtaaatggaaaactctaatcaggactgtttcaaataagtggaagtggacagtggcagcagtccagattactcttattacaccactatcaagataataattttttccacttttttgctctatttcaggctattaacgcttcactcaccatttcggaacagatactgtcaatgcgttcgactatctcatcacagaaatttggctggtctttatattcaatccgttgaaaggaggatgcgggatctgacagaaagtgtccacacagtaaccacgctatagctaattacggcactgtgtggctctcaaaagagcactgataacattatgattttattacgaacgccgatgtaatcaggcaaaagaattgccccgtctcagggcaattctttgtgtttatagattttatacggctcttcttcgccgtctttgcgggttttcagcagtttcagaatccaggtgtattgttcaatattcgggcgcaccagggcttccacttcttcgttcatgcggcgggcgatatacgggtcgtcctgaccgtcaatatcatccatcggcgggcggacgtggatatggaactggtgatttttatgatcgtacaccggaaacagcgggacaatcgccgctttgcacactttcatcagccgcccgatagcaggcagtgtggctttataagtgctgaagaacgggacaaactcactgtgctcttcgccgtgatcctggtccggcagataatagccactgaagccattacgcacactggcgataaacggtttgataccggcctcgcgggagtgcaggcggccgccgaagtgaactcgggctttattccacaggtaatccgccaccgggtttttctggtgatggaacatgcccgccactttatttccctgcgcggcaaacaacatagccggtaaatcgatcgcccagccgtgcggcaccataaaaatgatattgcgcccttctgcctgtaatgcgtcaataatgtcctgcccgtgaacctgcgtgcgggaaatcacccgctgcggattgcgcagacacaactccgccagcatcacaaaggcgtgtggtgcactggcaaacatctcatctgtaattctttcccgctccgctttcggcatatccgggaaacagtaatatagattgattaacgcccggcggcgtccgcctttggcaaaacgtccggctatccggcccacaccggccagcatcgggtcacgtaatttaaccggcaggtagctcagaccggccagtgcacccgccgcaacccacatgccccagtatttcgggtgcaggtaatggcggtgaaatgtcgggatatagcccgctttgctgtctgtatcgttttctttatacacagagggatacccgtattaaattaagcttatttatcatgatattataaataccgtgatctattattattgattatctgaaatcagaagtacattaaaattctgtacgctgagaatgcggcaggcgggtgtctgtgcacccgccgccggaatgagaggattaatcaagtgtcagctgtggccggtactgtttgaccagcgccagatagccggtgcggtctttgccggtcagaccgccggaacgcggcagttttgctgtcagcgggttcaccgcctgttgtccgttccagacttcaaagtgcagatgcggaccggtagagcgcccggtattaccggataacccgactttatcgccgcgtttgactttctgacccggtttgaccagcagtttgcgcatgtgcatataacgggtggtgaactgacgaccgtgacggatagccacgaagttgcccgccgcaccgctgaatttcgccacaaccacttccccgtcaccgactgccagcaccggtgtgccgaccggcatcgcgaaatcgacccctttatgcggtgcaacacgcccggtaaccgggtttacacggcgcgggttaaagtgtgaggaaacacggaattgtctggcggtcgggaaacgcagaaagccccgctccagcccgtcgcctttggcatcataaaaacggccgtcttcggcgcggaatgcataataatcacgtccgttagtatgcagacgtacagccagcatctggctctgttcctgtttgccgtccagcatttcacgggaggtcagtacagtgaagcggtcgccgtttttcactttacggacatccacctgccactgtaacgctttggaaatatcacgcacttcgctgcgggtcagtcccgcttttgatgcactggcattcaggctgccgctgactttgccggtcaggcgtttagtctgccattcaccttcgcgcatctctttggtttctttgaatccgttgccgctgcggacataggtacgggtttcacggcggttcaccgcccagctcagggatttcagttcaccgtcgtcattcagctcccaggcgagggtctggccgatttgcaggttacgcaaccctttgtactgattggataataaagccacatcagaggaatctatcccgtactgtgtcaggatggcagacaggctgtcgccgctggcaacagtgtattcaagtgatgtcgggataacggtgtcagtcggggaggcttcgtcgatatcatcagactctttggcaagtccttcatccggcagctgatcactgctgtcggtgataatatcgtcagtatcggtatcagtgtccgtgccggttcctgcctgcgtgccggaggtgtcagcaggtggcgcaaaatcagtttcaatatattgttcgttatcagcattccgctcatgatatacagcaaacgggtgccagacagcgacacccagtgttgcggcagttaacatccccagcatcatgcgatgcgctttgggtaactggttgtataccagaacggcggattttgccagttgctgcaattgcacgcgttctgttccttatttattgctccaggcaggatgcgtactgtgctgataaccgtgacaggaagttggtataaccgtcccgatccactgcaattccgctgcccagcgggtcaaggacgcccatcttcgcgttcgtccctttggccaccgctttaatgactgccggcctgaactgcggctcagcaaacacacacaaggcgttttgctcagccagctttaatttgatgttattgagtgtctgcgcacccggctgaatttcagggttgaccgtaaaatgccccgaaggcgaaaggtcaaaacgtttttcaaaataaccataggcgtcatgaaaaacaaaatacccgtgtgtttttaccggtgccagctgctgagcaatattcttctcagtttcagtaagttgtccattgaatttacgcaggtttacgtccagcacagattttttatccggataactcaccaggagtttattatacactgcctgagcggtctgccgggcaatatccggcgacatccacaggtgcatattgtactcaccgtggtggtgatgcccgtcctcatcgtggtcgtcatcttcatcgtttttcagcagaaaaggtttaacagactcaagttcgctgataacgatctgtttttgctccggaacagctgaaagcggcttttgcaggaaggtttccagctccggcccgacccagacaaccaaatccgctgaacggatttttttcaggtcagacggtttgagtgcataatcatgcggcgaagcaccatccggcagtaaaatctgtgtgtccgtgacgccatctgcaaccgcagcggcgattaacccgacaggacgtactgatgttaacacatctgcgctggcggtttgtgcggtcagactcaaaaatgtggcaataaacgctgtttttattccgtgccgtgactggtgctgcataatggaaactccgtgacatgattgcgataatgttatattataacgtttcattcattctgcaagataataatttgtcatgtcaacacttatcgcggtaaatgatgtttctgtcgcttttggtgccaatacggtacttgaggacatttcatttacattatcccccgggaaaatcatcacccttctcgggccgaacggcgcgggaaaatccacgattgtccgcgtggtactcggccttaccgaaccaacgtccggcaccgtcacccgcacaccgggtctgactgtcggctatgttccgcaaaaactctatctcgacccgacaatgccgctgacggtggcccgttttctgcgtctgaagcgcggtgtcagcaagggcgagtgtctcgcggcgcttgagcgggtcaatgccgcgcatctgaccggaaaaccgatgcaacggctgtccggcggcgaaatgcagcgtgtgctgctggcgcgtgccctgctcgcccggccgcagttgctggtgctggatgaaccgactcagggtgtggatgttaacggccaggtcgcgctgtatgacctgatcacccggctgcgtgatgaactgaactgcgcggtgctgatggtttctcacgatctgcatctggtgatggcaaaaaccgataccgtgctgtgtatcaaccggcatatctgctgctccggcgagccggatgtggtggccgcccatccggagtttaccgccatgttcggtacccgggccgccacacagatcggcgtgtaccgtcatcatcataatcacagccatgaaaacggcagtgcagtgttatccccttctgcaccctgctgcgggaatcacgccccggcagatgcctctgtaaaatccgccccggagtgccgccatgattgaattattgttaccgggctggctcgccggaattttactggcgatcgcggccggtccgctcggctcttttgtggtctggcggcggatgtcctatttcggagatacgctggcgcacgcttcgctgctcggggtcgcctttggcctgctgctgaatgtcagtccgttttatgccgtgattgccgtgacactgattctggctatgctgctggtctggctggaacgccgtccgcaactggcggtggatactctgctgggtattatggcgcacagtgcgctgtctctcggtctggtggtggtcagtctgatgtcgaatgtgcgggtggatctgatggcgtatctgttcggtgacctgctctcagtgacctatgaagatttactgccgattgccgtgggtgtgactattgtgaccggtttgctgatgtggcagtggcgcaatctgctctctctgaccatcagtccggaactggcgtttgttgacggtatcaaccccggcagactgcggatgatgctgatgctggtcaccgcactgaccatcggccttgccatgaaatttgtcggggcgctgattatcacgtctctgctgattattcctgccgccgcagcccgccgttttgcgcggacaccggaacagatggctgcaggtgcggttgtcaccgggatgatttccatcaccggcggattagccttctccgccttctatgacaccccggcgggaccatccgtggtgctgtgcgccgcctgctgctttattctcagcctgctggtgaaaccacataattaattgtctgtaccacaaaaaagccctgttctttcagggctttttactttcagctaaactgtgttattacgctgtttctgattttgtccgcactttcggtttcaccggattcacactcagcaccagcttgtcgagaaatgtgatcagtttttcattcatttcactgtagctgtgtctgcggatagcgcttggtgtatcaacaaaacggaatccggcggcagatttcagatcactttcgccgttgaggataagatactccaccacatcgcgggtcagttccatatggcactggaagccgtaaacacgtttggtgtattcaataatctgacgcggacaaccggcgctgaaagcgataatctgcgcgccttcggttaatcccggcatatcgtaatgccagtggcccacacccagcgaatcgccgaaatgagaaaacagctggctgcgttttccggcgttggtcatatgaatggtgaatttgccgaactctttttccggactttgtgtatacggcgcgcctaatgcttcgccgataagctgtgccccgagacagaccccgatgacaactttatttgaattgatggcattggcaataaacgtctgctcttttttggaatcaaaataagggcattgcgccgtggtggtttccgggttttgcggcccgcccatgacaatcaggaaatcaattccgcggatactgtcaggtaacttgtcaccttcatacagacgggtgaacgtgacatcgtaattgttcttccttgcccaatactcgtaagcgcccggtgcttcaaaatagtcatgaatgataaaatgaacacgcatagtcagttccttttccctttaacgaaatcctcctttttacattacagggttcagataatgcatgccaatttttaaatgtcgaaaaacaaccaattacagggaaatcctcccggattattccccaaaaagccatttaattatcatatgaacaaaaaggtaaacatattatgtttaccctcaggtttgacatccgggttcttaatcgtttccgctgtgatcaataccaaagtgacgataggcatgtgcggtagcaagacgtccgcgcggtgtccgctgaataaagccctgctggattaagaaaggctcgatgacatcctcaatggtttcccgctcttcgccgatggccgccgccaggttatccagcccgaccgggccgcccataaatttatcaataatggtgaccagcaacttgcgatccaggtaatcaaacccggcggaatccacattcagcatatccagagcctgaccggcaatcagcccgtcaataccgccgtcacctttcacctgggcaaaatcccgcaccctgcgcagcagacggttggtgatacgtggtgtaccgcgtgagcgcatggcaatctggcgggctccgtcatccgagatatccagccccatataacgggcactgcggctgacaatatgctgcaaatcgtccgtattataaaattccagccgctgcactatcccgaaacgatcccgcagcggtgatgtcagagagcctgcacgggtggtggcaccgatcagggtaaacggcggcaggtcgattttaatggaacgggcagcaggcccttccccgatcatgatatccagttggtaatcttccattgccggatagagaatttcctccaccaccggagagaggcggtggatttcatcgataaacaacacatcgtgaggttcgaggttggtcagcatggccgccagatcaccggctttttccagcaccggtccggaggtggtgcgcagattaacgcccatttcattggcgacaatattcgccagtgtggtttttcccagtcccggcgggccgaaaatcagcagatgatcgagggcatccccgcgctgacgggcagcctcgataaagatttccatctgtgaacagacctgcggctgacccacatactccgccagtaatttcggccggatagcgcgatccaccacctcatcatccggcagcgtttccgccgtaatcagtctgtcagcttcaatcatgacctgtcaccccgttgtgtcatcatcgtttctattattacagcgcggcgcgcagtgcttcgcggatcagtgtttcgctgtctgaaccggctttggagactttcgctatcatgcggctggcttcctgcggtttatagccgagggaaatcagtgcctcaatggcttcagattccgcatctgcctggctgttgcccgcctgctgactggccggaagcgacatttccgcatcacggaacaggtcgccgttaagccctttgaagcgatctttcatttccaccaccagacgttcggcggttttcttgcccacacccggcagtttaattaactgtgccacagctccctgctcaatcgccgccacaaactgctgcgcagacatacctgagaggatcgccagtgccagtttcggcccgacaccattcactttgattaattcacggaacagcgcgcgttcctgcttatcattaaagccgtacagtaactgtgcatcttcccgcacaataaactgggtgaacagaatggcttcctgaccggcatccggcagttcatagaaacaggtcatcggcatatggacttcatagcccacaccattggtttccagtaatacgacaggcggctgtttttccagcacaatacctcttaagcgaccgatcacgcgcgtctcctttatgattgcggcagagcctgtttatagcataaaaaaagctggacgtatatccagccatcagaaaatcacgggtatctgcgacaccggttactctttcagccgtccgcgtgccatcaccagacgcggctgccccatctgcaccaggttctggttaaagtgacagtgagtaatagcaatcgccagcgcatccgccgcatccgcctgcggtgccgccgagagtttcagtattgagcgcaccatatgctgtacctgggctttttccgccgccccggtaccggtgaccgtttgtttcacctgacgcgccgcatattcaaataccggcagattattattcaccgccgccagaatcgccacaccacgggcctgtcccagcttcagggcggaatcggcatttttggccataaagacctgttcgatagcaaaacaatccggctgatactgggtgatgatttcactgacaccggcgtaaattttgcccaggcgggacgggagatcatccacctgtgtacggatacagccgctgccgatatacagcagacgccgtccctgctggcggataacaccataaccggtcacccgcgagccggggtcaataccgagaataattgccataggtggaccgtattgtcacaacaggaaaaaaggaagaaaacagagggatgcgcacagcggcgcatcctctgcggagtgagtgacggaaattacagcagtgctgcaacttcgtctgagatatcgccgttgtggtagacttcctgcacatcgtcagagtcttccagcatatcgataaggcgcatcagttttggtgcggtttccgcatccagatccgctttggtggacgggatcatcgagacttcggcagattcagctttgaaaccggctgcatccatcgcgtctttgacatcacccagaatttcccaggcggtgtaaacgtcgatagcgccatcgtcaaaggtttcaacgtcttcagcaccggcttcgagcgccgcatccatcaccgcatcctcatccagacccggtgcataggaaatgatacctttgcgggtaaacagataagcgacggagccatcggttcccagattaccgccggttttggtgaacgcgtggcgcacatcagaaaccgtacgtttacggttatccgtcagacattccaccatcacagcagtaccgcccgggccgtagccttcgtatacgatggactccatgttatcgttttcatcattacccgccccgcgtgcaatcgcacggttcagggtatcgcgggtcatgttgtttgctaacgctttatccactgccgcacgcagacgtgggttagatgcaggatcaggaccaccaatgcgcgacgccgtgactaattcacgaatgattttcgtgaaaattttaccgcgcttcgcatcttgcgcggccttgcggtgtttggtgttggcccatttactatgacctgccattctctaatctccagattaagtcttacgacgttcattcatttaaatccgctgtcactgcggaagaacgcactgacgaacgaattcttcaattgcttccccattactgggtgagatagttttcgcggcggcatccgctgccggtaaccactcatacgccagatgctccgttaagggaaccgctttcggcgcgggtaagcataacacaaaccagtgttccgtattgtgcgtcacgtccggtgcataccggtgacggaaatgcggaaaaatggtatagcggacggtgcgctgacaatccgtcagccgcagtccctccgcaaggatatcaataccggtttcttcttttacttcccgcaatgcggcatcgcggggagtttctcccggttccagactgccggtgacggactgccagaaagcagggtcgtcacggcgctgtaacatcagaacacgccccgtttcctgctcacagataaccaccagcacagattcagggcgtttaaaagccatcagattcagtcactctctttctgagtaactgcaatcgccagctctttcagtgcatcgtcattcgcgaagctcggtgcatctgtcatcagacaggcggcagccgtggttttcgggaacgcgataacgtcacggatgttttcggtaccggtcagcagcatcaccagacggtcgagaccaaaggccagacccgcatgcggtggtgtgccgtattgtaacgcatcgagcaggaagccgaatttgcggcgctgttcttccggggtgatcccgaggatgccgaataccgtctgctgcatttcattacggtggatacggacagagccgccgcccacttcgtagccgttgataaccatatcgtaggcattggcgatcgcgtcttccggcgcgtttttcagctcttccggtgacatatcacgcggtgaggtgaacggatggtgcatcgcggtcagaccgccttcaccgtcgtcttcaaacatcgggaagtcgatcacccacagcggacgccagctgttcaggtcggtcaggttcaggtcacggccggttttcagacgcagcgcgcccattgcatcggttacggtgcctttcgcgcccgcgccgaagaaaatgatgtcgccggtctgtgcgtcagtgcgctccagaatggcttcaacggtttccgcggtcaggaatttggcgaccggcgactgaacaccctcaatacccacagagcgatcgttcactttcatccacgccaggcctttcgcgccgtagatgccgacaaatttgccgtattcatcaatctgtttacgggtcatttccgcgccgccggtgacacacagtgccacaacacggcctttcggatcatttgccgcatcagcaaatacagagaactcagaatttttcaccagatcggcgatgtcagtcagttccagcgggttacgtaaatccggtttatcagaaccgaaacggcgcatcgcttccgcaaatgtcatcaccgggaaatcacccagttcaacattgatgatttcattccacagtgagcggatcatacgctccatggtcgcacggacctggtccgcagtcatgaaagaggtttccacatcgatctgggtgaattccggctgacggtcagcacgtaaatcttcatcacggaaacatttgacaatctgatagtaacggtcaaaaccggacatcatcagaagctgtttgaacagctgcggagactgcggcagtgcgtagaatttgcctttgtggacacggctcggcaccaggtagtcacgggcaccttccggtgtggctttggtcagcatcggggtttcgatatcgaggaacccttcggtatccataaagcggcggacaaacccggtgatgcgtgcgcgggttttcaggcggttcgccatttcgctgcggcgcaggtcaagatagcggtatttcagacgcatctcttcggtgttttcgtggttgctgtcgagcggtaacggctcggagcggttaaaaatggtcaggccatctgcatgcacttccacactgccggtcgccatctctttattaatttgattttcaggtcgcgcgcggacagttccggtaatctgaatacagaattcattccgtaattcagaagctttggcaaatgcttctttttggtcgggatcgaagaaaacctgaacgatgccttcacggtcacgcatatcgataaaaatcaaacccccgagatcacgacgacggtttacccaaccactaagggttactttttgatcgatgtgagcactgttgagctgcccacaataattagtacgcatacgatatccttttgtccgctattgtgcgtttctgcaaaattttggcatggttctttatgaagaaatgtcaaaaaggcgatcattatagtggaaaatttctgatgagataagtgcaaacagcacatctgccgcagagaatttagccactaattgataattttcaaataattcagtatgcattaatattaaggattgtgttacccgctgctttgaggtttatcattcttttgctgtttcaattggccatggagtaaaaaatggttagttccctttatattgtactgggtgcgctgttaatcattaaactatcactcgatgtgattaaactgcggacactttaccgcgttgcttatggtgacggcggattttacgagttacagacggcgattcgtgtgcagggcaatgcggttgagtatatccccgttgcactcctgctgttactggtgatggagcagaacggcgcccaggtgtggatggtccatgtctgcggggttattctgattgccggccggctgtttcactcttacggattaaaacaccgcgagaaccgctggcggcgtaccggaatggcggccaccttcaccgccatgatcctgatggtgctggcgaatatctggtatctgccgtggcagcagattttttcgccgtacatgtaaccgctcacgccgggacataacactttctgcgccgggtcacctctgttagaatgcgcgcatctttttgtattgcagatctgtgttatgtccaaagaaattccgaatccgccgcaggatactctgttcgcggcaccgattgcccgtcttggtgactggacgtttgatgagaaagtcgcggatgtgtttcccgatatgatcaaacgctcaattccgggctactccaatattattgctatgattggcatgctggccggtcgttttgtcacgcccggcagtcaggtttatgatctcggctgttcccgcgccgccgccaccctgtccatccgcccgaatatcgcggataaacccggctgccggatcatcgccgtggataattccgcgccgatggtggaacacgcccgccgccatgtggaaagttataaatccccggtaccggttgaagtaaccgaaggcgatatccgccatattgcgattgagaatgcttcgatggtggttctcaattttaccctgcaattcctggcaccggatgaccgcgccgcactgctgaaaaaaatctatcagggcctgctgccgggcggcgtgctggtgttatcggaaaaattcagttttgaggatgagcagatcggcgatttgctgttcagcatgcaccacgatttcaaacgcgccaacggctacagtgagctggaaatcagccagaaacgcaccatgctggaagatgtcatgctgaccgacagtgtggaaacccacaaatcacggctgaaagcagccggttttgaacattgtgaagtctggttccagtgctttaacttcgggtcattactggcagtgaaagagaataaccatgattgatttcggcaatttttatcagttaattgcaaaaaatgagcgcctgagccactggctggaaacattgcccgcgcagattgcaaaatggaataaagaatccctgcacggctattatccgggctgggtgaagaccattgaaaatctgccggacatgacacctgatactctcgatctgaaaaccggggttaccgcgcagcgtacacagccgctgactgacggggaaacccgccgtattaacaacattctgcgcaacctgatgccgtggcgcaaaggcccgttctcactctacggcgtggagattgataccgaatggcgctccgatctgaagtgggatcgcgttctgccgcatctgtccccgcttgccgggcgcactattctggatgtcggctgcggcagcggttatcacatgtggcgcatggctggcgaaggcgcggaactggtggtcggtgtcgatccgacccagcttttcctctgccagtttgaagccgtacgcaagctgctcggcaatgaccagcgcgtgcatctgctgccgctgggtattcaggaactgcccgcacttcaggcttttgataccgtgttctccatgggtgtgctttatcaccgccgctccccgctcgaccacctctggcagctgaaagatcagctggtatccggcggcgaactggtactggaaagtattgttgtcgaaggtgatgaacatcagtgcctgatcccgggtgaacgctacgcgcagatgagcaacgtctactttattccgtcagccaaaatgctggctgtctggctggaaaaatgcggcttcatcaatatcaggatcgtggatgagtctgtcaccaccacagaagagcaacgccgcacggagtggatgatcaatgaatccctcgccgattttcttaatccggatgatccgtcactgacggttgaaggctatccggcaccgcgccgtgcggttctgatcgccgaaaaaccatagttatcagtaatacgtatataccctgctatttgcagggtatatacctccgaaaaactgactgttctctccccgggtattcggctactctgcctgtcatattatgacgaataaaggccactccggatcatgaaatatcgcctgtccgcactgtatcttccgcttctgttgtctgcctctgcggcctctgccgctgtgttaacggataataatcatcaggtttttatcgacccggaaactctgcgcatagcagtggcggataccactgtcagccggggaacagaaaaacagccggtcagtgacttaacggaatatccccgccgtgtcagctggttctggccggacagagatatgaatgtcaccgctgtcctgaatgataccgacctgaccctgacattcaccaccaatcagccgcagaattttcagtggttcaccctgccggataacaccgtttccgccctctatatgccgctgggcgaagggcgtcatattccgctgaataatgaacagtggcgtcactatatggtcactgaacaggacaatatcgataccaatcaggatttgcagttaccgctctggagtcagcagcaggatcgggtctacagctggatattactcagcccgttccataaccgtctgcactttgaggagaaacagcagcgcctgcagatgagcgcggtacatcagtttaaccgctttaatcagcagcagccgtttaccgttcttctgcacaccggtgatacccctctggacggcgcactgcgctaccgccgctggctgcaggataataagcagttcacctcactggaagaaaaatttgcacagatcccggacggtaaaaaactgattggtgccacccatatctatttatggggaaaaagtattatcgatcagcaggatattactgactggccgggactgttacgttatctgcaatcccctgccggtaacgggttatggcaggcaatggagcctcagagccgtgatgcctttacagccctgaacggcaaaacaccggaaaaatggcagcagccgtttctggccgatgctctcaaccaggcactgaagaaaattacaccactgagccgcaccccggatgacagtgactttatggctgcacagaaaacacaggcgcaggcgatccgttctgccgtaaaacagcagctgagtccgttcctggcaccggaggccagttggggtcaggggttatcccttcctcttttaaccgcactgaccggggcaaaactggataagctctggctgggtactgataactggacagccacctggtaccagccgcaggcggtcagctatgccaaagagcacggttatcttatcgccagctatgattcctacgacaccgccattccggcaggaaaaaatacggaatggctgacggcacagatcccgtcagaattacgcgaaaaatgcgcgattgtgaccggaacaggcagaaaactgccgggattcggcggggatggttattacctgaatccgggctgcatgcaggatttttcagaaacacgcatgactgaactggtgcaactgaccggcatcaacagtctgtttcttgacgtggacggcaccggcatggtgtctgatgattataatccggcgtcacccacaagtgcggatgctatggcagcagcgagaaataaccgcttacggtcggtggcagaaaacatccgtatcccgctgggttcggaagacggtaatgccgtgaccgcgcaatatctgatgtttgcccacggtaccgaaacccgcggcttcggctggagtgatgcggatattcaccgcaacaaacagtcctcttactatctgggagcctggtggccggaaaatgaaccggcgatcttttttaaaccggggaaactgaaagatatctacctgaccacggaatttgatccgcgctggcggctgccgctgtatcaggctgtatttcatgatgcggtgatcaccacgcatcactggacgctggataacctgaaattcccggcggttaccaccacacgggaactgctgagccagctgtataacacgccgccgctctataacctcagccgtaatacggtacagaaacgtcttccggcgatgataaagtcggacagtattttccgcccgctgcatcagcagttgtggaataaagccctgaccggcttccgctggctggacagtgacggcctggtacaacagactcagttcagtgacggctctgtcatcaccgtaaattttgctgatcatgccattgccggttatccgccgcgctcactcagtgcgataccggcagagggaaagcccgttaacgccaccttctgacagcaaaacgccctcatactgagggcgttttcgatttaaccggaagtgaaccggatcagtgcacgaccatactgtgcagatccagtacccctttcatcgcctcgacggtgtccccgtccacacaggtatgggaaaactcatcagcttcgctgtcactgcccatcgccacgccgactttgcggtagcgcatagtggacggcttggttttggatgctgagctgtgcacttcctgaaggccgatatcaaggaacttctgaatatccgccagccgcacaccggcaccggccataatcaccggccccctgctggcttcctgtaactctttgagcagcggcagccccagctccgcactcagctgctggccggatgtcagaatacggctcacacccaggtcggtcagctgctgtaatgccagcatcggattcgcacacatatcaaaggctctgtggaaagtgaccgccatgtcgcccgacagtttacacagcatcttcatccgcggcagatcaacatgcccgtcctcatccagaataccggtgaccaccccgggaaaacccaggtcgcggattttggcgatatcattcttcataaccgcaaattccgaggctgtatagcaaaagtcaccgctgcgcggacggaggatcgggtgaaccgggatccgcaaccggtcgatagtctgtttcagcatgccccagctcggggtcagcccgccctctgacggcgcggcacacagttcaatccggtcagcgccggctttttccgcagtgagggcacattccacgctgtaacaacaaatttccagtttcgccattgattagcctcatcacttaatttcgcaggtaaatatctctcgtaaacgattcagtcatcctgatatacactattacatgtaatttagattaatgaattgttaaatatcacaagatgcgaaatatccggccgattcgcacagggaaatgtcagaattgcaggttaccgctcactttcgacaatctcctgcaatgtaaacggatgaaacttaatggtgatattttcccggctgacggccagtgtcgggttcggcagccgttcctgttcgccgcgcggatggctgccttttgtcgtcactccggccggtaacggcgacggcagcagtgcggcagcccgctctgtcagggtctgcgggtcacccggcaataccagctcgatatgttcccagccctggtgtgcatactgtttacctttcgggaacggcagttccaccaccggaatctgccagtgcagcagtgtcagcggctcatgcagcaaaaacagataaatcgggcggccgttaatctgattatccgataacacggtgccgcattcgcggaatccggccagccactgttccgccagtgccgtatcgtgagcccgcagagagatgtgatccgcctgatagtgcgtgagatcaagctgcaaatctgccgcgaactgcgctatttttccggcaaacaccggcagctctgccatcagaccggcaagggatgctgtctgtacgctgtttttcattatgatcccctgtgagaattcatccgcaaaggcgcagatagtagcatgagaccctgtttttgtggtataaaaccagccaaatttcacgacaacatcccgtccggacgagcccgctcctccgccgctgtttccggggtgtcattttgttctttaaattaaggtaaaccggtgaatattcaggcaattctttcagataagatccaacaggctcttatcagcgcaggggcaccacttgattgtgatgctatcgttaagcagtccgccaaagcgcagtttggtgattaccaggccaatggtgtgatggctgccgcgaaaaaaatgggtatgccgccccgacagctcgctgagaaagtgattgaactgctggatcttgacggaattgcggaaaaaacggaaatcgccggtcccggttttatcaatatttttctctcccctgactggctgaccgctcagctggaaaccgcgctggctgacgacaaactgggcctgactccggttgagccgatgaccatcgccatcgactactccgccccgaacgtggccaaacagatgcacgtcggtcatctgcgctccaccatcatcggtgatgcggcagcacgtacccaggagtatctgggtcataaagtgatccgctgtaaccacgtcggtgactggggaacacagttcggcatgcttatcgcgtatctcgaaaaaatgcagaatgaagatgccggggatatggcactggctgacctggaagccttctaccgcgaagcgaaaaagcattacgacgaagacgaagtatttgctgagcgcgcgcgcggctatgtggttaaattacagggcggtgatgaatactgccgtaccatgtggcgtaagctggtggatatcactatgcagcagaaccaggaaacctataaccgtctgaatgtcaccctgaccgaagacgatgtcatgggtgaaagcctgtacaacgacatgctgccgggcattgtcagtgatctgatgaaccgcggtatcgccgaagagagcgaaggcgcgattgtcgtctatcttgatgaattcaaaaataaagaaggcgaaccgatgggggttattatccgcaagaaagatggcggatatctctacaccaccaccgatattgcctgtgcaaaataccgtcatgacgtactgcatgcagaccgcgtcctttattacattgattcccgccagcaccagcatctgatgcaggcgtggacgattgtccgcaaagccggttatatcccggagagcatgacactggaacaccacatgttcggtatgatgctcggcaaagacggcaagccgttcaaaacccgcgccggcggcactatccgcctgtccgacctgctggatgaagctgttgaacgtgcagagaaactgatccgtgagaaaaacagcgatatgccggaagatgagctgaaacagctggccgaagtcgtcggtatcggcgcggtgaaatacgcggatctgtcaaaaagccgtaccaccgactatatcttcgactgggacaacatgctggcctttgaaggtaacaccgcaccgtatatgcagtatgcctatacccgtgtggcatccgtcttcaaacgtgcggatattgatgcggacagtctgacacaacctattatcctgactgacgaccgcgagcgccagctggcagcgcgtctgttacagtttgaagaaaccattactgctgttgcccgcgaaggtctgccgcatatgatgtgcagctacctgtacgacctggcgggtctgttctccggtttctacgagcattgccctattctggcagcggaaagcgaagaactgcgccagagccgtctgaaactggcgctgctgacacagaaaaccctgaaagccggtctggataccctgggtatcggtactgtcgagaagatgtaatcccggcattaccggcgattatttctgcaaaaaaggaaccttatggttccttttttattgccttctgaatctgctacagcaatacccggcaccctgctgactgtaatttttctgccaccggcggaatgacggagaaattattccagcgcaggtccagtttgcgcagctgcgttaatgctgccaggctgtccggcagcgtactcagctgattcgcacgtaaatccagatataacagagatgataattcgccggtattttccggcagggctttaagggcattgaaacgcagattcagtgtattgagttgttgtaaccggcttatttccggcgaaataaacgccacccggttattattcagatcaagaatttccagcgctgccacagctgcaatctcatccggaacagcggttattttattattcatcagatgcatttcgcgggtatttttcagcccgctgacagcagaagacagttccgttatccggttattataaaggcggatttcttccatcttttccatttcagaaaaccatgccggtattgccgccaggtgattatccgttgcattaaaataacgaagatttttcagtccggaaaatgacgacggtaaactgctgtatccgttttcactgagataaagatagtgcagctgatgtaattcaccaatttccggcggaacatccgcaataaaattatgtcccagatccagcatttcacaggcagtcagctgtgcaatatccggcggaatataagccagctgattacaggagagattcagtacccgcaatgacgtacagtggcgcagtgcagccggatattccgtgagctgattgttataggcactgataacctgccgggtatacggcggcgtgataaacgcatcaattgacgcatatccgccgttatccaggttcagttcagcatcagaaacagtgtgttggtgcagcataaaaacgctccggcatccgcagtgacagtcagtattgttatcatagtaacactggattcacggtatcgtgtatatcactatgccggaagatcatcttaatgtattgtggcatgaacattgtgtttcactgctgaaggccgcctttccgcagacaattttttatcttgcaacgcagtctcaggtaatattgtcacaactgaatgacggtgaggcataccgtttattccgtgacaacgatgatactatccgcacacgaaaataccgctgatttccggaaagaaaaaagcctgatggattatcatcaggctccgtaccgtatattatccgtctgttacttcgttattatactgcttttctgcagttttctggcttttgccgattgcagttgcatggcaataaacagcaataccaccagtaccacagacaatatcagcagcaacccgtagaatccgttccactgatagccctcaatcacttttgacagcggataaccggcggctgatgccccgatatacgcaaataagctgacaaaaccggttgacgcaccggaggcatatttgtgtgagttttctgcagcggccatcgcaatcaggaattgcggcccgaaaataaagaaaccggtcataaagaacagcgcggagaacacatatttactgtcaatcggaaccgcccataaacacaccgctgagatgataatacccagggtataaatcacgttcatctgtgagcggttgcccttgaataataagtccgatccccagccggccacaatagcaccaaagaaaccaccgatttcaaacatcattaccgtggcattcgcagttaacagatcataatggtgcgtttcaatcagatacaagttaccccagtcgttaatcccggtgcggatgacataaatcaccgcatatgaaagcgccagtacccagataattttatttttaaaaatatactctttgagaatagcccagcgtgataaaccgagtccctgctcttcatgggcaatttccacctggtcattgcgccactcaccaacagtcggcaaccccattgaacgcggacggtcacgcagtaaaaaacagagcagcagaccgacaacaatcgcaattacccccggaataatcatcccgtaacgccagcctaaccacaatgccacactccctgacaggataggaataatagcaccgccgatattatgggatgtattccagattgaccaccagaaaccacgctcattacgggaataccaggtattcagtattttagaacatggcggccagccccagccctgaaagaaggcattaatcatccataaggcaataaataccggaatagaagatgtcaggccaaacaaaatatttaccacaccggtcataataaggcctaaccccataaaccagcgcgggttagaacggtcaccgataataccggaaaggaacttggatgccccgtacgttaaatagaaggccgtcccgaccatcccgatatctgctttggttattcccaggtcagccagcatttccggcatgacgaagttaaaactctttctggtgaaataaaagacagcatacccgatataactgacgatcatcagatgcaaacgccagtaacggtatgttttgtcgatttcatttttactcatggtaaccggtttatccggcgattcagaaaatatagccattacgttctccgtactgcaattatcagtagtgattagtttttatatgtcattatcatgagtcgttatcagtaaataacaccctgtttctcaacagagcgcactgttttattacaggcgggaaacgaaaggcgtgacgatattcaagttatgcggtaaacacggtaatcggcctgaattatgacgctgtacagtgaaatatgatttcctgttattttgtgtcacttatgacacatatcagataatgatattattattttattattggtattatttttatctgctgacgttgcatctgatgatacattaactgatattttatggtgcagaatttaatctttgagctgaatcgataaaccaatgaaacgaaatttattttttgcaatgataatcagtaagatacaaaagcataatctaaaatcagcgattcaataacgttaatatattaattgttcgggcgggaaatacaaaaacggggctgttatcagccccgtcagaataagataaaaacagtttataagctgcgctgtgcaaagtcccgcagacggaaaccaagcgcatacagtgcggcaaaataggcaccggcaccggcaatcaccacacccatcaggcgcagcatgcgcatcagcatattgccctgtgaccattccggcatcagatacatcatacccaccagtaccgcggccataaacagcattgcgatcaccagtttgaggaagaattttccccagcccggcagtggtgtgaagatattctgtttacgcagttgccagtaaagcagcgaggcgttgaaacaggccgcgataccaatcgacagcgccagaccggcatgtttaaacggcccgataaaggccaggttcatcagctgtgtcaggagcagcgtggcaatcgcgattttcaccggtgttttgatgttctggcgggaatagaatcccggtgccagtactttaatcacaatcatccccatcagaccgacacagtaggcaatcagtgcctgttgtgtcatcagggcatcaaaggcggtgaagtttttgtactggaacagactgactgtcagtgcttccgccagaatcgcgagcgccaccgcacacggcagagccagcaggaaacagaggcgtaatccccagtccatcagtttgcggtattcggtggaatcccctttggtaaaactttttgccagtgacggcagcagaatcgtccccagcgccaccccgagcacaccggacggcagctccatcaggcggtcggcgtaatacatccaggaaaccgaaccggacaccaggaatgaggcaaaaatggtgttgataatcagtgaaatctggctgaccgataccccgaggatcgccggccccatcagtttcattacccgccagaccccgctgttacggaaagagactctcggcagcaccagcatgccgatttttttcaggtgcgggagctgataggcaatctgtaataccccccccgccagcacagcccacgccagcgccatgatcggcggatcaaaatacggggcggcaaacagcgcaaagccaatcatactgacattcagcagggtcggcgcaaatgcagggacggaaaaacggttccaggtattggggatcccccccgccagtgaggcgatggagatcagaaagatatacggaaaggtgactttcagcagattggcggtcagcgtaaatttatccgggtcatcggtaaaacccggtgcggtgacataaataatccacggcgcggccagcattccgagcacggtgaccaccgccagaatcagtgtcagcatcccggagacataggcgataaaagtgcgggtcgcttcctcgccctgctgggttttgtattccgataaaatcggcacaaaggcctgggagaatgccccttcggcaaaaatacgccgcagcaggttcggcagtttaaaggcgacaaagaaggcatcggcagctaccgatgccccgaaaatccgggcgataatggcatcacggataaagccgagtacacgcgagaacatcgtcatcgagctgacggcggcgagagatttcaataaattcatgctgagtgtgctggtcagataacaaaggcggaaatagtatcacgataacgcaggcggaacagaaaaacccgccgttatcgtggcttaacccagtccggggtggtcagtgcggtcagaacatggtcacgccaccggccgttaatcatcagataatcttttgcgtaaccctctttttcaaacccgagccgggcaaggagttgtccgctgcgctgattatgcggcatatagtttgccataatgcggtgcatgccctgctgacgctgcatatagcgcagtgtcggctccagggcttcctgcatataatgctgtccctgccacttttcacccagtgaatagccgagaaaacaggcgtaaaacacgccgcggatgacattactgtagttcgccacccccatcacctcattttcagcctgatccagcagcagaaaatgaaaagcggtgccctgacggtgcatatccgtcatcagttgcaggcgggatgaccagccggaaggatgatagtggctgcggtcgcggagaggctcccagggtttcagaaatgcttcgttttcacagtaatattcactgatgcggtacgcgtcccgctcgtgcgccagccggaccaccattctgtccgtgttaaaacgcagctgcggcgtattcgcgcggtagccgaacaacataattcctctctcagaaggccgtagtcagggtgtgtttaaccacgttccgtcgataaaaaaatatcatcctgaattctctgttatcagacgctgaataagcagagaatagaaggtgtaatcatctcccttttttctattcctttcaatatttaatgtggtgctgaatgtcacttgtcagacaagcccggacgctgggtaagtactggttgctggtggataacctgctggttgttctcggcttctttgtggtcttcccgctgatctccatccgttttgttgaacaactcggctgggcggggattgtggtcgggtttgccctggggctgcgccagcttgtccagcaggggctggggatattcggcggtgcgattgctgaccgcttcggcgccaagccgatgatcgtcatcggtatgtttctccgtgccggcggtttcgccctgatggcaatggcggatgaaccgtggatcctctggctctcctgtattctctctgctatcggcggtaccctgtttgacccgccgcgcaccgcactggtgatcaaactgacccgcccgtatgaacgcggccgtttctattccctgctgctgatgcaggacagcgccggggcggtactcggggcgctgctcggcagctggctgctgatttatgattttcatctggtctgctgggtgggtgcggcaatctttatcatcaccgcactgtgtaatgcctggctgctgcccgcttaccgtatctccaccacccgcaccccggtcagagagggactgacccgcgtactgagtgacaaacgcttctcccgctatgtgctgacactgaccggttactttatcctctccgtgcaggtgatgctgatgttcccgattatcgtcaacgaactggcgggcacaccggcggcggtgaaatggatgtatgccattgaggccgcgttatcactgactctgctctatccgctggcccgctggagtgaaaaacacttccggctggaaacccgcctgatggccgggttgttcctgatgagcctgagtatgttcccggtcgcgctgacacattcactgcatgtattgttcgcgattatctgtttgttctatttaggttcggtgattgccgaaccggcgcgggaaacgctcagtgcgtcactggcggatccgcgcgcacgcggcagttacatgggcttcagccgcctggggctggcattcggcggtgccatcggttataccggcggcggctggctgtatgatctgggtaaagaaatgcaattacctgaacttccctggtttttactcggtacaatcgggctgattacactgatagcactttaccgccagtttaacccgaagaagataagccctgccgtattaaattgatccggatattttggatttgccgcagcacaggttagtatcgggtggtatacaacaggagataccgatgagattattcctttttaccgcggcactggtcgcagcaacagttttaaccggctgcgataaattaaccgaaatcagtgtcagtgaagagaccattaacagtgcggtggcagagaatatccgtctgaacaaacagattggtatggatggtgtggcagatgcggattttaccctggaaaaactgctcaccgaaattggccgtgaagagccgggcaaagtaaaactgacggcaatcggttcgctgaagctggtttcgctgttcggttcacgggatttcaccatctcgatgtccctcagcgccgcaccgtattttgatgccaccagcgggtcaatctatatgcgggatgttgaaattaccaattacacgctggatccggacaaatgggataccctgatttccgcgctgatcccttatctcaaccatacactgagcacctttttcaatatcaccccggtgtatgtactgaatggcgataatacggccgaagcggctgcgaagaagtttgccaagggcattgaaattcggccgggccggatcgttatcccgttaaccgaataatttcgattaaaatttttaattgtgatagtaaattattaatttactaaattatgataccgttccttaactatcccgccgggaacggtatcaccttcccgtcttgcagaagaatatgacgaaaattcaatgcatacgaaaagataccaggttatcccattctgacgcatccgcagtacgcttcctgtaaaacagagcgaaatactgatttttctgctgtgacagataaaattaatttgtgattgagcgcttttttctgaatctgcaggattcttttttgatgatatatttcacaattcataaacatttctaacacacctcttatctctttcagtaacatcagaaaataactattccggataaggatcatctgatgctgacactgattggactgctgatcatcatttctattgtcgttctgctgatgacaggaaaaaccagccctgtaattgccatgtctgttattcccctgctcggcgctttgctggcaggctattctctgcctgaaatcactgaattctttgattacggcatcaaaaaagtagccagtgtcgcagtgatgttcctgttcgccattctgtttttcagcattatgaaagatctgcatatcttcaatccgtttatccgcctgatgatcggactgacacggggaaatgtggtgattgtggcgatggttactgcgctggtggcagccgttgtgcatctcgacggttccggtgcggcaacctttctgattattatcccggcgtttctgcctatctaccggcgtctgggtatgagcccgtatctgatgctgctgctgatgtgtatgagtatgggggtgatgaatatggtaccgtggggcggtccgctcggccgcgcctctgctgtgaccggtatttccggctcagtgctgtggcagccgctgatcccggtacaaatcatcggtattaccgcatccgtgctggttgccgcactgtttggtctgcgggaaaaacgccgtatcgcccgggcggcacaatacggcaccacaccgtatgagcaggattcgcttcttgaattgtatgatgaggcagataatgaacacggtacagaaaaaccacagcgttttctgattaatatctcgctgatcctgctggcgatcctcagcctggctctgggttggctcgcggcaccgtatatctttatgctggcgctctccgccgctctcattgtcaattacccgaaaccgaaagatcaggtagcagtgattaaccatcatgccccgcaggcgttatctatggcagcaattatcctttccgccggggtattcctggggattatggataaaggcggtatgctggagtccgtcgcgaaggatctgctgctgattattccgggacacttggcggagcagttccacattattatcgggatgattggtgtgccgctggatatctttaccagtaccgatgcctattactttgccctgctgccgattgtccgtgatgtggtggcatccgccggtattccgcctgcagatgtggtgtatgcgatggctatcggtaacaacgccggtacctttgtcagcccgttctcaccggctgtctggctggcggtggggattgccggggcggatatgggacggcacctgcgctactccttcttctggatctggctgttcagctttatcaccctggcggcaggctggttcctcgggctgttctgaaccggatacaaaaagcccggtcatctgaccgggcctgaaaagcaatatgtgacaacgtcacacattaatcatcgttttcgtcttcttctgcatcttctgtcagctcttcatacagcgcggacagtgcttcacgggtcaggatagccagggtgcggtaaaaaccgtgctgtgcatgagattcgactttcccgagaaatgcatcgctccacggcagcagataatccgcaaacagcgccgtctgcgcactgacttcatcttcctgtgcctgatcttccagccaggatgccgccagcagcagagacccgaaactgtctgttaccgcatcagtcagcggcataccgcgctcactgagaaactgacggacttcactttccggctcaccggtatagtccgaccggtgctgagccaccgcctcgtcagcaaacaactgctgataatccgctgccagttccgcactgtcacaatgctcagccagccgtgtcagcagtgcatcctgctccagcggccagtgggctttcaactgcccctgcttaatcatcgtcagaaccggtgccagtacgggatcagccggagcacggttaaacagtgttccgagcaggcggcagaccagtgaaaattcattcatacttcaaatccttattaactgagttgccgctattgtccggattgtccttattgctgtaaagaattaataccccagttccatattcaccacgccctgcggtgcttcgccccgctcaatccgctcaatattagcaacgatggctttcattgcctctgacggaatggtaaatgcagcaatgtgcggcgtgacatccacccgcgggtgggtccagaacgggtgcatttccggcagcggttcggtggcgaacacatccaggctggcaccggcaatctgtccgtcatcaatggcttccagtaaatcgttatccaccagatgcgaaccgcgcgccaggttaatcaggtaagaactctgcggcagcttactgaacagtgactggttgaggatccccctggtctgcggtgtgtccggcagaaggttgatcagcaggcggctgtgacttaagaattcatccagttgatcgttgccgtggaaactggtcacgccggggatttgtttaggtgtccggctccagccgtgaactttaaacccgaattctgccagcttttccgccacggaacggccgagaacaccggttcccagcacgccgatttcgaattcatcaaatgtgaaagcaggctgggctttccagatacgctgctcctgctggcgtttataaatgtccatcttgcggaagtaccacagcgccttggcaaccgcgtactcctgcatctgcgcccccatcccggtatcttcaaggcggatcaccggcacccctgcaggcagtgtgcccggatttgcctgttcctgtttcagaatggcatccaccccggcgcccagcgcaaagacccctttcatggtggtccgcccggccagacattcacgcggcggtaaccacaccagggcataatccgccggctggttatcacccggaacccatttgcggatatccgcctgcggcaggggttttttcatgccgttgatccacagctcagaatcaaaaaaaggatggtagaaaatgatattcatgcggcgctcctctgtttttttaccagcctgataggattacgcaaagaattcaagccccggacagattttcgtatcgttaaaatgttgttattgttaactgacctgcatatttttccggcagatgattttccgccggaaaaaaatcagtggttatttttcaggcagccggtacgctgttttcagcggatttgctatgttaatcaccaatatgctgtttttttggttaaacaaacgaaaaaacacattttttttcatggcgtgtattgacgggttacgtcgcttcccctatagtagcgccccgttgcagcgagatatcaacgcaacgaacagtaccccggtgagatgtccgagtggctgaaggagcacgcctggaaagtgtgtatgcgcgaaagtgcatcgagggttcgaatccctctctcaccgccatattaagagaagagcctgctgagcaatcagcaggcttttttcgtttctgccttttctttttttgtgctgctatccgctccggcggcagaatatcctgttttattacaccttaacttcttcatatttttgattttattttaatatccgctattgtatacagcgtcatttgatgtatctcagctaaatctctccctgttttgcgtagactaatgcgcgttggcgtctccctatttttttcatatgactcagaggtgacagttgtccggaaatgaaaatttcaacatttaaaggattatctctttttactgcattaattgactcgtgctggaaacagccttactccgtttcccgtctgataaaagataccattgcaggtatcaccgtcgggattattgctatccccctggccatggcactggctatcggcagtggtgtggcaccgcaatatggcctgtatacggccgctatcgccggtattgtgattgcggtgaccggtggctcccgtttcagtgtctccgggccgaccgccgcgtttgtggtgatcctctaccccgtttcccagcagttcgggctcggcgggctactgatagccaccctgatgtccgggattatcctgctggcaatgggtctggcgcgtttcggtaaactcattgaatatattccgatttccgtggtgctcggcttcacctcggggattgcgatcactatcgccaccatgcaggtgaaagactttttcggtctgaccatggcgcatgtaccggaaaactacgttgataaggtgattgcccttgtcagagccatgccgaccatcaatctgtcggataccctgattggcgtgaccacactgctggtgctgatctactggccgaaactgaaattgcgcctgccgggacaccttcccgctgtgattgccgggatgctggtgatgctggtgctgtcgctgttcggcatggaagcggccaccatcggctcccgtttcagttataccctggcggacggtacacagggcgcggggatcccgccgattctgccgcagtttatcctgccgtggaatttaccgaccccggacggcaaagagtttgtgttcagctgggccaccattaccgccctgatgccggcggctttctcgatggcaatgctcggcgcgattgaatcgctgctctgtgcagtggtgctcgacggaatgaccggtaaaaaacataactccaacggcgaattgctgggtcagggactgggtaatatcaccgcaccattcttcggcggcattaccgccactgctgctatcgcccgttcggcggccaacgtacgtgccggtgccacatcaccggtctctgccattattcactctctgctggtgctgctgactctgctgatcctggcaccgctgctttcttatctgccgctggccgcgatgtccgccctgctgctgatggtggcgtggaatatgagtgaagcggctaaagtcattgaacttatccgccgcgcaccgaaagatgacattatcgtgctgctgctgtgcctgagcctcactgtgctgtttgacatggtcattgctatcagtgtcgggattgtgctggcctcactgctgtttatgcgccgtatcgccaatatgacacgcctgagtgagtcttcctataccgatcacgacaaagggcttctggtggtccgggttaacggtccgctgttctttgccgctgctgagcggatttttgatgatctgaaagtcaaaagcgcgggatatcacaccattgtgatgcagtgggatgcagtaccggtactcgatgcgggcggattaaaagccttccgccgttttattgacgaagccggtgtggatacacacatcgtggtcaccgatattccgttccagccgctgaaaaccctggcgcgggcacggattgtaccggttgagaataaaatcagtttttatccgtcagtcagtaaagcactgattgaactgggactgatggatggtgtgacatcagaagcatgataacctctgtaatcaggctataatgaacagagcggcgggcataatgtccgccgtttctttatctgtcaccggagaaaaatcatggccgtattccgtcttccctttcttaactggctgattatcaacgccgttgcagccatctggctgtatgccaaagatgcactggtgattcagttcagcggctggagcggtattttagccatattgatcgggctggaaagtctcggctggtttggtgcgtcactggtgtattcccgccgccataacaccacaccgaacccgctcggcgaagcgacccatctcatcaccggcggaccgttccgtctgtcacgcaatccggtctacctcgcgctgaccaccgcctgtatcggctttgccctgctgacccactcttactattttcttatcggcggccttattttctggctgatcaccgatctgttcagcatcccgcaggaagaaaaattccttgccggaaaatttaaacaggaatggacggcctattgccagcagacacggcgctggctgtaattcacgctcagattgcgctgccctggccgccgtttgccagcagatactgccacagaccgttcatgccgagccatcggttgctgcaccagtccggtgccagtaaggtcggacgccgtgcgctggcgcagatgcggtgataaatgacatccggcggtgtgtggcggatcatctccccggcggtggcgacatactcttcgagggaaatggtgggcaagcgccccgcccgccaggcttttgccatgatgctgccttccacaatatgcagcggatgcagtttgatgccttcaacgccggtctccagcacacgctcaagtgtgatgagattatcggctgcggtttttcccggcagaccggggatcagatgacaacacactttcagcccgcgctcacgggcggcccgggtggtggcctgataacaggcgaaatcatgaccacggttgatgcgtttcagggttttatcatgggcggtctgtaatcccagttccagccatacctcatagccctgcagctgatagctctgcaacagatccagcaccgcctccggcacacaatccggccgcgtaccgacacacaatcccaccacatcggcctgtgtcagtgcggattcatacatctctcgcagcagttcaacttccgcgtaggtactggtataagcctggaaataggcaagataacgtttggcgcgggtgattttgccggattgctgactcagctgatcctcaatggaatcatactgtgcattttcatccgcaaaagaagccacattacagaaggtacaaccgccgcgcccgagggtgccgtcgcggttagggcagctgaagccgccgtggagggtgattttatggattttttcgccataacggcgctgaagatcagcgccgaacatgttaacgactgtgtgaagctgcatcggaaattattcggtatccagctcagggaagcttttcaccagatcgtcgatggctttaacctgctgcaggaacggctccagttttgccagcggcagcgcggaaggaccatcacaacgggcattatccggatccggatgcgcttccaggaacagaccggccaggccgacagccatcccggcgcgtgccagttcagccacctgaccacggcggccgccggatgcggcaccaaacgggtcacggcattgcagggagtgtgtaacatcgaaaatcaccgggcaaccgccggacgctttttccatcactttaaagcccagcatatccacaaccagattgtcataaccgaagtttgcaccgcgatcacataagatgatctggtcattgccgccttcacggaatttttccgcgatattaccaacctgccccgggctgataaactgcggttttttgatgttaatgaccgcaccggttttcgccatggcttccaccaggtcagtctgacgcgccaggaaggccggtaactggatcacatccaccacgtccgccaccggctgtgcctgccaggattcgtgaacgtctgtaataattttcacaccgaaggtttttttcagctcttcaaaaatcttcatcccttcctcaaggcccggaccacggtaagaactgatggaagagcggtttgccttgtcaaaagaggctttgaagacgtacggaatattcagcttctgcgtgacagtcacgtaatgttcgcagattttcatcgccagatcgcgggattcaaggacgttcatgccgccgaacagaacaaacggcagcgcgttgccgacacgaatatccccgatagatacgactttctgttgcatggtataaccttttggcagaggcaattaaattgcgtttatgaaaatatgtaaaacgatatccgtttatcagtgcagaacgatatgctgctgttcgtaagtgtggatctgcatttttatcatttcagataccggatcctgcggacattgctcaataaaatagttcagatcggaaactgcaatatggctgcagtccagctgggcataaatcagcccgcgatcacggatttcatacgggtcatccggatcaaataataaaatggtttcgctgactttcagtgcctgctccatttttttctcttccatcagtgcgactttaatactgtcgaggtatttgcgcaccacatggctgttttcggcttcttcgaggtcatccccggtcagatgatgcgccgggctgaccgtgcctttaatccagacatccagcgtgtgctgatccagcagatcgccgttaatcgggttgataaacagggtttcatcatcgagatccgcccgcagaatcagctgggtcgggaaaaccaccggcacaaccggcaaaccgatggcctgtgcaatatgcaggaacaggatgccgagtgataccggcgagccgcgctgagtacgcagcacattatccagccacagggtgtcagacagcgaataaacgccgctggcgccactgaactgccatttgtggtgaaagagtgtgatcagggtctgtaaacaggtatgttcgtcggaatacggcgggaggcgtttacgggtctgacggataagttc

SEQ ID NO: 21 - DNA, 179417 bp, unknown
  Altogen 322075 strain
  misc_feature (28480)..(28480): n is a, c, g, or t
  misc_feature (29856)..(29890): n is a, c, g, or t
  misc_feature (29928)..(29979): n is a, c, g, or t
  misc_feature (61746)..(61749): n is a, c, g, or t
  misc_feature (72431)..(72465): n is a, c, g, or t
  misc_feature (72509)..(72605): n is a, c, g, or t
  misc_feature (72652)..(72683): n is a, c, g, or t
  misc_feature (77219)..(77244): n is a, c, g, or t
  misc_feature (83443)..(83443): n is a, c, g, or t
  misc_feature (134852)..(134959): n is a, c, g, or t
  misc_feature (147562)..(147649): n is a, c, g, or t
  misc_feature (153164)..(153164): n is a, c, g, or t
  misc_feature (177185)..(177313): n is a, c, g, or t
ggctcggctggagatactgccccagggtcagcatggtcacgccgtgacggcgcaggtcgcgcatcacatcgaggatctcttcattggtttcgcctaagccgaccatcaggccggatttggtcgggatctccggatgggcttctttaaagcgctccagcagtttcagtgaccactcatagttagcgcccgggcgcacctgacggtaaatacgcggtacgttttccaggttgtggttgaagacatccggcggagtggcggtcaggatctccagcgctttatccatacggccgcggaagtccggcactaaggtctcaattttaatcgccgggctgtggtcgcggatagcggtgatacagtcagcaaagtgctgtgcgccgccgtcacgcaggtcatcacggtcaacagaggtgatcaccacataacgcagtcccatatctttgatggtctgaccgagtttctgcggctcgttggcatccggtgcattcggacggccgtgggcaacgtcacagaacgggcagcggcgggtgcagatagccccgaggatcataaacgtggcggtaccgtggttaaagcattcgctcaggttcgggcaggaggcttcctcacagacagaatgcaggccgttacggcgcattgcatctttgatccctttgattttgtgggaatcagccggaagtttgattttcatccagcttggtttgcgtaatcgttcggtcgtctctgataccaggtttttgaccgggataagcgccattttatcggcatcacggtatttgataccgcgttccatctgaattggtttactcatgtttatgtcatttccggttagattcatcggatagtgattgatgagtgccgtggtgacggcctgtctgctgaatgtaacgaagtcatcaatcttttaaaaatctttttaaaaatgttaaaaaaattataacactattctgcggcaagttggaatcctaattgccggcagaattgtgcggtcagcacgggctgaacatccgcaagggtaataccgggaacaaaatcagccatttgtgtcatggctagaccggcatagccacacggattaatgcggtgaaaaggctcgagatccatattgatattgagcgccaggccgtggaatgagcggccgttgcggatccgcagaccgagtgaacagattttatttcccgccacataaacaccgggggcatccgggcgcgggtaagcgtcaatattccattgtttcagggtctcaaccactgaattttccagcgcggataccagttcgcgtacaccgattttgtcgcgtttgagatcaatcatcacatacatgacctgctgtcccgggccgtggtaggttacctggccgccgcgatcggactggatcaccgggatatcaccgggggcgaggacatgttcggcttttcctgcctgaccctgggtaaaaacgcgctcatgctcaaccagccagatctcgttgccggtttccgccgtacgctgttcggtaaattggtgcatggcttcagagacaggatgataaggccgcaggcccagctgacgtaaaatgatggtgttattttgcaaaatggtatcttcagttcggtatgccgggccagcagtataacgcgcacggcaaatgcgtaccagtgatgcgcataaaatgttcagagggataaaaaaagccgcccggaaaggcggcctgaaatgatgaagaaatgacggtgttacaacaccattctgacgcgctctaacgcgcctaattcttcgtacagattctcgatctgctcaatgtgtgtcgcgtcaatggtgacagaaacggaatggtaggttcctttgctgcttggtttgattgacggactgtagtcacccggcgcgtggcgctgaatcacttccagaacatcattcactaattccggttcagcggcacccatcactttgtaggtaaatgagcaggggaactctaacagttcattgagtttggttttcatgggtgctccttaataaagcaaaacttcagatgaactaaatatggggatagttcatctgatttcaagtctcagccgaaccagcggtggaacagcaggcggatatagtcgatcagacggctgaagaagttcccttccggtaccgcttccgtcacgaccagcggacgggtttcaatgatctggttgtcgagctggaaattaatggtgccgaccacctggttttttgccagcggcgcatgcagctccggatcggtcaggacaaaaccggctttcagatctttcaggcggccgcgcggaatggtgatataaacatcattttccacccctaactgcactttgtctttatcaccgaaccagacgatttcagatgccagcgggttatctttctgcatcggtttgaccgtttcaaagaaacggaagccccaggtgagcagtttcttgctttccgcattacgggctttggccgatttggtgcccatcaccacggagatcagacgcatatccccttcggtggcggaagcgaccaggttataacccgcgccgttggtgtggccggttttaattccgtccgcattcaggcttttatcacccagcaggtcgttacggttttgctgggtaatattattataggtgaatgagcgctctttatagatagcatattcattcggcacgtcgcggatcattgcctgaccaatcagcgccatatcccgcgcactgctgtactggccgtcggcatcgaggccgtgaacggttttaaagtgggtatttttcagaccaagctgtgccacatactggttcatctggccgacaaacgtgtcctgatcaccggcaacaaactcggccatcgccacacaggcatcgttaccggactgcaggttgataccgcgagtgagatccgccacgctgacgcgctcgcccggcttgaggaacatcagcgaggagccgcggaataccgggttaccggtcgcccaggcgttttccccgatagtgaccatggtgtccggcgtgaatttaccggtgttcattgcctggccgatgacatagctggtcatcattttggtcagactggcaggatcacggcggacatccgcatttttctccgccagcactttgccggagtggtaatccatcagaatataggattccgcttcaatatccggaacaggcgggatggtggtattaagattcggaacatcagcggcagaagctgcggcgctcagtgccagggtcagaccgaaagcggccaggcgcccggcgcggtgttgataagtcgttgcgtatttcatgagtgttaaaacaacattgatgatgccggtgaaaaagaaacgctatcatagcaaaactgctatgacagcgcgtagtgttatcactgcctgtttttaaggtgcaaggataaatgaattcatattcagctgctgctgaaggcgttcctgtacttcggcggcccgttcacggctggtaaacggccccagctggacacggaacatatcaccggaggattctgtcataccgggcacacccagtttgtcgctgagctctttctgccactgtgatgcgcgttcttcacttgccacggcacccacctggacacggtaaccgctgacggcggcctgttgcggcgcaggtgcagcggtgttttcagtttgggtttctgccggtgctgcgggctgtttcacggtcgggatcagtgcggactccggctgcggctgtgccataacagggcggctgttgatcggcaccaccggggtggtgttggtcaccggcgtaccgagagcgctggttttgcccagttccgggcggcccggcagggcatagctctgtttggcgaccacggtacctacagtcccggaaccgctcagcgagccgtcttccgcaaccacaatcgggtcaattttaattttggtattcggcagcaggttcaggcgatccgccacagcacgggaaagcccgatctgtttgcccggcatatacgggccgcgatcgttaatccgcacaaccatcatgcggttattcgccatattggtgatccgcgcatagccggggattggcagcgtcgggtgggacgcagtcagttcggcactgttgatgatttcgccggtagcagtccggttgccgttctgagcctggccgtaaatccaggcatatccctgctgactgaagttttccggatcacggacaatctgatactgctgaccattacggacgtaatcattattcgcgcccggatgcagcggctcataggccggtacggcgccgagaatctcttttgccgggcccggcggcggtgtctgtttgaccggcggctgcacggacgggcaccctgccagcaacgcggccatcgctgtgaccgcaatccattgtaaacgcatgaaaacctcgtaatgtattataagctttttgacagcatcttacggtgtgtatgaattgacatgacaataccaaaccctgccattaatacaatcagggcggagccgccgtaactcatcatcggcagcggcacaccgaccaccggcaggatcccgctgaccataccgatattcacaaacacatagacaaagaagatgagcatcagaccgcccaccatcacccgtccgaaggtattctgggcacgggcggcaatcatcagcccgcgcatgatgatcagcagatagagtaccagcaggaaaatcacacccaccagccccagctcttccgcgaggacggcaaagataaagtcagtatgacgttccggcaggaattccagctgagattgtgtgcccagcatccagccttttccggccagtccgccggagccgatggcaatttttgactgaataatatgataaccggcaccgagcgggtcggtttccggatcgagcagcatcatcacgcggccgcgctggtaatcgtgcatcaggaaaaaccagagcagcggaataaaggcggcgagcagcagcagggctatcccgataagacgccagctcatcccggccaggaacagcacaaaaataccggaggcggccaccaggatggatgtcccgagatcgggctgtgcggcgaccagcagggtcggtacaacgaccagcagcagggcgatggcggtatttttcagggtcggcggacactggtcgcggttcataaagcgtgccaccatcagcggaaccgcaattttggcaatctcggacggctggaaacggacaatccccagatccagccagcgctgtgcgcctttactgatctgcccgaagacatccacaaagaccagaaggatgacacagacaatatagaggtgcggtgcccaggtttcatacacgcggggcgggatctgcgccagaatcagcataatgacgataccggagaaaatctgcccgaggcggcgttccatcatctccggatccagcccgctggcactccacagcacaaatgcactgtaaaccagcaggatcagcagcagcaccagcaacgggaagtcgatgtgcatgcgggtcatcagggatactttgcgcggattatcagtcatgggcattactctgtttcactgccgggcggtgatggcggagcatccggcagtaccgtgttgttatcacccagcaggacgtggtcaaggatctggcggaccagagtaccgactgccgggcctgcaccgccgttttccagaataatggtcaccgccactttcgggttatcgtacggtgcgtaggcaatcattaatttatggtcgcgcaggcgttccgccagtttgctggcgttataagtttcatagctgaacacctgtgctgtaccggatttggcggccgctttgtacggcgtaccggcaaagaatttgcggccggtgccgttcggtgcgttggccacaccgaacatcccggacttggccagttcccagtaaccggaatggatatcaccgatagcaatatattctttctgctcatacggcaacataccgccgccttctttggtaccgagcagcaggtgcggtgttttcaccacaccatcattgatcagggtattaagggcttttgacatctggataggagttgatgtccagtatccctggccgatcccgaccgggatggtatcgccctgataccactgtttcttatagcgccgctgtttccattcacgggtcggcatcacgccgttgtactcttccatcaggtcgataccggaatattcgccgtaaccgaagcgggtcatccaggcggacaggcggtcgatccccatgtcatacgccacctgatagaagaaggtatctgccgattcaataatcgatttcaccacgttcagattaccgtgaccatagcgtttccagtcacggtaacgtttttctgagccgggcaactgccaccagccggggtcaaaaatcgtggtgttacgggtgatcactttttcgctgagtgccgccacagagataaacggtttcactgtggatgccggcggatagagcccctgggtggtacggttgatcagcgggcgatccgggttattgagcaggccccggtaatccgggccggaaatgccgttcacaaacaggttcgggtcataactcgggttggacaccagagccagaatctcgccgttgcgcggatcactcaccacgacagccgcccggctggtggtcagcagtttttcgatatacatctgtaattcgagatcaatcgtcagatagatatctttcccggcctgtggtgcctgctcgtgtaactggcggatcacgcggccgcggctgttgacttccacttcctcatagccggttttgccgtgcaggacggattcataatagcgctcaatacccagcttaccgatatcatgagtggcggcatagttcggcaacagaccgtctttatccaggcgctcgacatctttatcgttaatttttgccacataaccaataacatgggtcagggcggagccgtaaggatagaaacggcgctgatagcctttgatttccagtcccgggaagcggtactgatttacagaaaaccgcgccacctgaatctggttgagcggggttttcagcggaattgaggtaaagcggcgcgaacggcggcgctctttttcataattcgcgatgtcttcatcggtcagatcgacaatctcgcgcagctcattcagtacatcaggcaggtcagtgaccttttccggcacgatttcgagctgataaatggttctgttttccgccagcagggtacctttgcggtcataaatcagaccccggctcggcggaatagggaccagtttgatccggttatcattggaacgggtctgataatcttcatggcggttaatctggagatgatagagattcaccaccagtacggcagataaaataacaataccgataaatgcaaccaccgcacggcggataaacagggcggattccgcgctgtaatcgcggaagtccatccgttgcttgtgttttttcttatcgccgtcaggcgcgttcagaccgggcactgcggttattccctgtgatacggatgattggcagtaatactccaggcgcggtacagactctcggccaccagcacacgcaccagcgggtgcggcagggtcagcggggagagagaccagctctgctctgcggctgctttacaggcaggcgaaagaccttccgggccgccgataagcaggctgatgttgcgtccgtcctgcttccagcgttccagttgcccggccagctgcggggtatcccagcgtgcgccgggaatatccagtgtgacaatccggttgcctttgcccgccgccgccagcattaactcaccttctttttccagaatccgtttgatgtccgcgttttttccccgctttccggccgggatttcggtcagttcaaacggcatatctttcggaaaacgatggagataatcctgaaatccggtttcgacccagtcaggcattttggtgccgacggcaatgagctgtaacttcaacactcagctccagagtttctctaattcatacatacggcggctttcatcctgcatcacatgcacgatagcttcaccgaggtcgacaacaatccagtcggaaatgccctgaccttccacgccgagcggcatcataccggcctgacggcagtcagtgacgaggttatcggccacggacgccagatggcggctggatgtgccggtacagataatcatgtggtcggtaatactggatttaccgcgtacatcaatagtaataatgtcctgtgctttggagtcttcgagcttatcaataataaactcaagtaattctgtgccttgcaaaaggttcaccttatattccggataaatagataacagaacacatccccgtcagtcgtaccgctgtggcagttccggcgcggggttgctgtgtgccgggggataatcgctattttacgttacagagggcaattttgcgaggctcaccctgcgttgccgccggcaccgcaagaataacagcgaacagggggaatacaaagcagtaaagattaaagaaatatcaggaaatgtgcggacagggaaaacagaaacagtgcactttgtactatagtcactccgtaacagataaaaaggcggaaaatatgacatatcagcgacaaccggaaagtgatgatgaggatgctctgtggcggcagagggcgcggcaggaactgactcaggcactgaatccgccgctcagtgcgggcatgctgatccgtctgcacagccgttacaaatacgcgctgatggcgtattcaccacagttatataaaagcagcggccggctgttgtcacaggcgggaacactctccccggcggaactggcggaaacggcggcgatctggcagcaggcgctgcttaccgcattttcacaacccgcgacccgcgccaatatgaccaatgcactgatgcatatgcagggctattttaaacgtttgctgagcccggcagaaaagcagcagatgagtgcggcaattgaggcttaccgaaccggcaccggctctgcggaagcggtgaagcatctgctgcttaccactgcccgtcactgtcagacagattatctgtgtgatcaggcaattctgcagccggtaacagcggctcagtcacattccgggtgcagcagtgtgtagcgatcgcccatattttcatagccccagtcacacatcagcagcagaatcgggatcagggaacggcctttttctgtaatggtgtattccacgcggggcggcacttcggcaaaaaccgtccgggtcagcagcccgtccgcttccatctcgcgtaattgattagttaatgttttttgtgaaatattgacaatataagcccgtatttctccgaaacgctgaacggttttttctgataataaatttaatattaacggtttatatttcccgccgataaccgacagcgtaacctctatttcactgaccactacaattttctttattttatcgtccattagttaccttcaggttactttgtgaaataaatctgccttcttgatatatgtaaagcaaggaataaaatcatgcaactttatttatattctcaaggtaaatgcaatgaaaaaattagtggttattaccggcgccagttccggtatcggtgaatctgtggcaaaacggatgagtcaggccggacatccggtcttattactggcacgccgcagtcagattaccgaagggtttcatctgccggacagcctgtgccgcagcgtggatgtgaccgatcttgcggcaatgaaagccgctatagcggaagcagaaagcctgtatggcaaaacagatttattaattaactgtgcgggcgttatgctgctggataatccgtatgatcaggattatgcagaatggcagcaaatggtggatgtgaatatcaatggtgttctgaccgggattaatattgtattgcacgatatggtttcacgtcaggaaggaaccattattaatatcagttcaattgccggacgaaaaacattcccgagccatgcagtctattgcggaactaaatttgccgttcatgcgataacggaaaatatccgtgaagaagtggcatcagcgaatgtccgtttaattaccattgcgccgggtgtggtggaaacgccgttattaagtcataccaccaatgaggaaattaagcagaattaccagacctggaaaaaagagattcagtcaggtctggatccggaaaaaatcgcagattgtattcagtttgcttatcagcaaccgcaggatgtgtgcatccgtgagattgtgattgccaaaacccggcaggcagggtgagtcagcggtacagtccctgtgccagaatgtagtcctgaacggcgggggccaactgatcgctgcagtcctcgccgtttttcagccgttcgcggatattggtggcagaaatcggaaacagaggggtatcagccaggaaaatataaccgcacggtcgtttgtgcaggctttccggcgtggtgaccagatgctgcacaaaccagtcggccagccgttcggacggaaaatcgagtgaataccccggccgtttgcagaccaggatatggcacagggtcaggatcttgttccattcatgccaggtatcaatcgtgagcagggaatcctgaccgatgataaaagccagcggccgccgtgaaccaatctcagcccggtactgacgcaatgtttccaccgtataggagagggcatcgcggcgcagttcgcggtcgtccaccaggaacagcggatcgccgttaacagccagttgtgccatcatcagccgctgttttgcatctgctttcggctgcggacggtgcggcgggacattgttcggcagtaaaatcacctgttccagaccggcttccgatgccatggctttcacagtattgatgtgcgcctggtggatcgggtcaaatgtgccgccgtacagcgccagaatccggttatccgcgttgttcgtcatagaggatctgtcctgtctgtgctttaccgctcaggagcagtgtcagtgtcagtaagtcatcacttacggattgtccgtaatcctgcttgaggcggatttcaatacgggtgatcagggatatcgccacctgcagggtatgcgcatcaaggcgatccagtgcttcggttatcataccccggcggttctgccagatacggtgcttgtcaaacagggtgcgcagtggctggtttcggctttcgcgctgtaatgtcagtaactgcatcacttcccgctggacggtgcgcagcaggatcaccggctcgttatcttccgccagcagctgagtcaggatgtgacaggcgcgtttgctttttccggccagcagggcatctacccagtgatacggggtaaagtgtgccgcatcattcaccgctgcttccactcggggcagggtgagcttgccatcgggatagatcagcgccagccgggagagtgcctgtgacagcgccagcaggttgccctcatagcaatagcagagcaggcggacggcctgttcatccggttgcagctgtaacagcgctgcccgcgcggcaacccactgcggcagccggttcagctccggggtcatgcaggcgatatacacaccatcctgtgccagtgctttaaaccaggcactgttttcctgggctttggtcagcttatgaccgcgcagtatcagcagcagatccggatgtaattgcccggccagccggagaagctgttcgcccatcgcggcattggggccgttttccggcagatacagggtgagtgtctgccgtccggcaaacagactgagtgaccggcagacagaaaaaatcgcatcccagtcagtatgttgttcaagtgaaaaggtgaagtgctcgtcaaatccctgttcctgcgccgcatggcggatagcatcccgggattcctggagcagtaacggctcgttcccccagaggaggtaacgttcacgcagccccgaacggagctgcgtgatgagttgctcaggtgaaacttttatcatgccttcggtgcgacaatctcagccgcttcggcattttcagcctgtttctgctgttcggacggctgaataatcagcagtttacgaaccagacgggcggctgcctgctcacgcatttcctggcggatcatatctttttccgcatcttttgcgagtgcttccagcgggttatcgaagaatgaacggtcaacgcggacattgatcggataaaccgatccgttcggcataatgacctgggcattcaggtaataaaccagttctttctcagcagctttaccgtcctggaaaatcgatactgtctcttccgaaccttcggaagaactggtgatcttcagaaccgggatggtggcatcgccaccttcaataatctgaacgttattcagcagcagttgctggcggatagcacgggtctgttcgccatacggatcaccggtgctgatttgcagtttctgcagttcaggcgggatttgcgtggtgccgcgcagatggaagccgcagcctgcggtgaccagcaccgcaagcccgagcaacagcgtaataatgcgatgtcgcacgatatctccttaaattaacccacgaccaggttcagtaatttacccggcacataaataactttgcgaacactcacaccttcgaggtatttcgccacattcgcttcctgtgaggccagcgccatgaccgcatcctgctccgcatcggcggcaacggtgatacggccgcggactttaccgttgatctggataacaatcagtttggtatcgtcaatcatcgcttcttcgctggcgaccggccactgtgcatcatccacatccgtttcatgacccagcgctttccacagggtgaaaccggcgtgcgggataatcggagacagcatacggataaccgcatccagcgcttcctgcatcagtgcgcgatcctgctctgtttcctgaggtgcgcgctgcagttcattgagcagttccataatcgccgcgatggcggtgttgaactgcttacggcggcctgcgtcatcgctgactttggcaatggttttgtgcagtgagcggcgcagatctttctgttccggtgtcaggctgctgatatccagcggcgcggttttgcctttctgaacatgctcatacaccagacgccatacacggcggataaagcggttcgcgccttccacgccggattcctgccactccagggtcagttccggtggtgccgcaaacatcataaacagacgaacggtatccgcgccgtatttttccaccataatctgcggatcaacgccgttgttcttcgattttgacattttgctcatgccggtgtgaaccagctcgcggccttctttatctgttgccttgatgatacggtttttatcatcacgctcaagaatggcatcttccggagacacccacacgcggtggccgtcagtgtcggtgtaatagaaggaatcggccagtaccatgccctgacacagcaggtttttcgccggttcatttgagttcaccagaccggcatcacgcatcagtttgtggaagaagcggaaatacatcaggtgcataattgcgtgttcgataccgccgatatactgatcgaccggcagccagtagttggccgcagccgggtccagcatgcctttgtcatagtccgggcagcagtaacgggcgtaataccaggaggattccataaaggtatcgaaggtatcggtttcacgcagcgcaggctgaccgttgatggtggtttttgcccactccggatcggctttaatcgggctggtgatgccgtccatgaccacatcttccggcaggataaccggtaactgatcttccggaaccggaaccacggtgccgtcttccagggttgccatcgggattggtgcgccccagtaacgctgacgggaaactccccagtcgcgcagacggtagttgactttgcgctcaccgacgccgagtgccaccagtttgtctgcaatcgcgttaaaaccggcggtgtaatccagaccatcgaactcaccggaattgaacagggtgtttttgccggtcattgcggcttcactgatatcaggcgcattgccatcttcgcccagaatgaccggtttgattggtaaaccgtatttggtggcaaattcccagtcacgctgatcgtgcgccggaacggccataacggcaccggtaccgtattccatcagaacgaagttagcgacccagaccgcgactttttcgccggtcagcgggtgaatggcaaacataccggttgccacgccttttttctccatcgtggccatttcagcttcggccactttggtattacggcactcgtcgataaaggttttcagttcaggattgttctgcgcagcctgctgtgccagcggatgacccgccgccaccgccagataagtgacacccataaaggtatccgggcgggtagtgtagacactcagtttttcggtgctgtccgcgacatcaaaggtgatttccacaccttcggaacggccgatccagttgcgctgcatggttttgacctgctccggccagtcttccagcgtatccagatcattgaggagttcttcggcataagcggtgattttgataaaccactgcgggatctctttgcgctcaaccggggtatcacaacgccagcagcagccgtcgataacctgctcgttggcaagcaccgtcaggtcatgcggacaccagttcacggcggaggtcttcttatatgccagacctttttcatacagtttggtgaagaaccattgttcccagcggtaatattccggtgtacaggtggtgacttcgcgatcccagtcgtaggcgaaacccagctttttcagctgttgtttcatgtattcgatattggcataggtccacggtgccggtgcagtgttattttttaccgcagcaccttccgcaggcagaccgaacgcatcccagccgattggctgtaagacgtttttacccagcatgcgctggtaacgtgacatcacatcacccagggtgtagttacgcacgtggcccatgtgtagtcgtcctgaagggtatggcagcatagacaggcagtagtattttttttttctgttatcttcagtcactttaaatgtttgtttttcctgccagtgactctggacttgttgctctatgtcttcgggacgatattgttcttgcatggcaccggtattcctgtggtgatgaactgccggacacggactgacgaccagaccgggcggacagcatgaaaatattgggtttcgttaatttctgacccgttagcatagccgatatgcccctgagggaacaacagttaagggcgtaaagggatgaaaaaagcaggggaatgacaaagagaagaagaaaggccggtctgtgaccggccggtcagaacatcagtgcagaattttggcaagaaaatctttggcacgatcggatttcgggttggcaaagaagtcgtcttttttgctgtcctcgacgatttttccctcatccatgaaaatcacgcggtccgccactttacgggcaaagcccatttcgtgggtgaccaccatcattgtcatgccttcgtgtgccagttcaaccataacgtccagtacttcgttgatcatttccggatcgagggcggatgtcggttcatcaaacagcatggcgacaggatccatacacagggcgcgggcaatagccacacgctgctgctgcccgccggacagctgggacgggaatttatccgcatgagcagacagtccgacacgctccagcagtttcagccctttttcttttgctgccgctttatcgcgccccagcacttttacctgtgccagggtcaggttttccacaatggagaggtgcgggaacagctcaaagtgctggaaaaccatgccgactttggagcgcagtttcgccaggttggtgcgtttgtcattcacctgaatatcattgacgaaaatctcaccctgctgcaccggctcaaggccgttaacggtttttatcagcgtggatttaccggagccggacgggccgcacaccacaaccacttccccttttttgacttcagtcgagcagtcggttaagacacggaactgaccgtaccatttggagatatttttcagggagatcatgacacagtccttctcttgagataattaaccagcattgacgcaccaaagctgataacaaaataaaccgcacccgcaaacagcaccatttcgatttgtgttccgtcacgttcgccgatattgctggcggtgcggaagaaatcggtcaggctgagcacatacaccagcgaggtatcctggaacaggacgattccctgggtcagcagcagcgggatcatcgcgcggaatgcctgcggcagaaccaccagacgcatggtctgcattttggtcataccgagggcgagtgaggcggatgtttgtccccgtgacacactctgaatcccggcgcggataatttcagcataatacgcagcttcaaacagggaaaacgctaccatagctgagatcagacggatatctgtttttggtgatatgccaagaacattttggactaagttaggcacaatcagatagaaccacaacagcaccattaccagcggaacggagcggaaggcgttcacatagagagcagccagccagcttacaatctttatggatgacaggcgcatcatagccagtatcgtgccccacaggatgccgataacaatcgctgtcactgtgattttcgccgtaataaccagcccctgtaacaggaacggcatacccggcatcaccgaactccagtcaaattcgtacatcagtggcctcctgtcccgggcagacgcacccgtttttccagtaaatgcatggccagcataataataacgttgatgccgacataggcgagggtgatcgcagtaaaggactcataggctctggcggagtaatccagtaacttcccggcctgcgcggccatatcgaccagcccgatagtggaggcaatcgcggagtttttcaccagattgagcatttccgatgtcatcggcggaataatcacgcggtaggcattcggcagcagcacataacggtaagtctgcggcagtgtcagtcccatcgccagcccggcggctttctggccgcgcggcagtgactgaatggcggcacgtacctgttcggtcatacgggcggcggtaaacagccccagacagagggtggaggaaataaagaactggatattcgggtcgagatccattttaaaccagtcgcgcagggacgacggcaggaactccgggatcaccagataccaggtgaagaactggacgatcagcggcacattacggaaaatttccacataaatggtgccgagcgaggaaagaaacttattcggcaccgtacggagaataccgaacagggatcccaccagaaaggcgataatccaggcacagattgacagcagcacagtgaccttcaggccggacaggatccagccgaggtaagtggtgttgccgaagggggcgggctgaaaaaagatgccccagtcccagttagctgacatagcgcggctcccggtaaaagaacgaactccctgtataagacggataaccagtggttaccggacagacagtgtgtttgcatgcaacggactgtggtttatcgtccgcgcccgcgtcagttgtgaacgcgggcgcggcgggcttagttatatcctcagtccggacggcgcagccggtcaggctgtcagccgccgtggcggttattcaaaggccttgtcattcggcgctttgaacagccctttcatttcttcggataattcaaagttcaggttgaggttcttaggcggaatcggctgtttgaaccagcgggtataggatttttcagcttcaccggaggtttgcgcatcagaaacggttttatcgatcagcgctttgaactgcggatcatctttgcgcagcatacagccgtaggcttcttcggattgcggcgtgccgacaatcacccagttatccggttttttcgctttggcgcgctcaccggccagcagggcatcatccatcataaaggcgaccgcacggccggactccagggtgcggaaggcatccccgtgatctttggcgctgataatgcgcatcttcatctgcttctcatcattgagtttgttgagcagcatttcagacgtggtaccggatgtgaccaccacgtttttcccggcgagatcggcaaagtctttgatgccggaatctttaccggtcagcagacgggtaccgaccacaaaaatggtgttggagaaggcggcctgttgctggcgggccaggttgttggtggtggagccgcactcgaaatcgaatgtgccgttttgtaacagcgggatacggttctgagaggtcaccgggatcagtttgacctgtaaatccggtttattcagggtctttttcactgcatcaacaatatggttggagtaatcctgggaatagccgaccaccttttgctggttatcataataagagaaaggaacagaggattcgcggtgaccgacaacaatcacgccgctgtcattgatttttttcagtgtaccggtcagctcttcagcagaaaccgccgcactggcaagcgcggctccggtgaccagtacagacaaaactaacttgcgcataaacaactccttttcgggaaacggtataaggacgtgtgttgctcttgtgtttgtattgttaaaaatagaacataattgttaattaatggaggttaatttgttttaaatcgggagatccctctcactctgtcagataaagatgtgcaagttacacccggaacgcgtgttcacattaaattatggtattttgaattggtttggttttatatgctggttatggtgtgtttattaacctgttaatggtgctttttactgcttagtgcggtgcttttatggccgggaagtgctattgtgtcataatccgctgttgtaacaattctgctgtgcggcggtaacatcatattgcggttaaatgtgtaaagttatggttatccggttgtctgaaatcgcaggctgtgtaagataggcggtaactatcggggagcgggctatgctgaagcaacgcaggcagggttatctgctgctgtttttcacattattctttatcctgttgtgtctgacacaacggatgtctggtgcgccgcgcatcagtctgagcccgtctgcggatttcactaccccggtgctgctcagtgatacggaaaccggcagcgccaatcccggtggtacctgtgatatcagcgccaagtcgctgagtaccgtgccgcagttcccggcagaacctctcttttttgcccttcttttcttcgtcatgacctcggtgatagttcctgtccgttaccgttcgcgctcgtggcgtcagcatatcccgccgatgcggctgcgcaggcatctccatttctgtgtgatgagggattagcaaccggcaatctgtgtattgtcgggttttttgcttaattcggagatgaaaaaaattatgcgttctgtattaacagcgtttgtgctgtttttgttcacgctgaccactgtgcatgcggctgataccggctggaccgaaatgccgcataatgatcacgcccgtgtcagagtcacatcagatcagtggaaagacggaaaactgcgtctgctgctggcggttgaattacaacccggctggaaaacctactggcagtcaccgggcgaggggggcgttgcccctgaactgacatggcaggagacctccgctgacacacagtggttctggcccgcacctcagcgttttgacgtcgccgggctctccactcagggctacggcggcagtgtggtgttcccgctggaagtcacggcggctcaggcgctgccggcgctcagcggaacactgaccttatccacatgcagtaatgtctgtatcctgaccgattatccggtgtcactggatacctcagaacccgcgccggaagattttgaccgtcagtatgtgatggcgatgcagcaggtgccgcagaccggcggtgatatcaccatcggcggcagccgggtaaacggcggaacgctgacgatggcactgcaccgcccgggcggctggcaggatccgcagctgttttttaatgcggataaagaaaccatttttgcggcaccgtcatttacgatttccggggataatctcactgcgtccgttaaagtaacggatgactggggggaaatgccgtcagatctgaacggaaaaccgctgtcggtcgttgtgacagacggcccggcagcgcaggcgctcaccacggtgatcggcagcgggccggatattgcggccgaatccggcagtgatacctcctttattatgttgctgctgtttgcattgctgggcgggctgatcctcaacgttatgccgtgtgttctgccggtgctggcgatgaaactcggcgctgtgctgtatgtggaaaaccgtgagcggcggatgatccgcacccagttcctggtctcctcctccggtattatggtctccttctggatcctcgcggcgctggtgtcggtattacgcctgacacaaagtgcggtcggctggggtattcagttccagaacccgtggttcctcggctttatggtggtggtaaccttgctgttcagtgccaatctgttcggtgttttctccatccgcctgagcagtaatgcaaccacaaaactggcgacagcgggcggcaaaggaatgcgcggccactttatggaaggtatgtttgccacgctgctggcaaccccctgtactgcgccgttcctcggcaccgccgttgcgtttgcgctggtggctccgtattcacagctgtggatgatctttaccgcgctggggctgggaatgagtctgccgtggctgctgatcgctgcgtttccgggaattgcccgggcgctgccgaaaccgggccgctggatgaacggtctgcgtctggtgctgggcgccatgatgtttattacggcactgtggctgattagtctgctgatcccgcataccgggccggaaacggctgcggtgatggtgggggtggtgctgctggtacttgcgctgctggctttccgccgtaccggtattaagcggggatctgcggcgctggtggcactgctggtggcaggaggtgtctgggccggtatcaatatgacggatgaccggcagcagagcctggtccgtgatcaggtggactggcagccgctgacggaagaggcggtgaacaccgcgctttctcaggggaaacgggtttttgtggatgtgaccgccgaatggtgcgtgacctgcaaagcaaacaaatacaatgtattattacgcgatgatgttcaggacgcactccgtgaaccggatgttgtcgcactgcgcggggactggaccaaaccgtcaccggatattaatgcgtttttacagaagcgcgggcatctggcagtaccgtttaatcagatttacggccccgctttacctgatggtgaaatcttgtcaccattgctggataaagaaacactcttacatctgttaaatcagtcacaaggaattgaaccatgaaaaaaacactcgcggctttaatgattgctccgcttatctttacagccacagctcatgcggccgcttttaccgctgaccaggaagcgcaggtgcgtgaattggttcgtgacacgctgatcaaaaatccggaaattctggaagaagcgattatggcgcttcagcagaaacagaccgaaaaacagaccgcacagatgaaagatgctgttaaagccaatgctgacgcgctgtttaatgataaatatacgccgcgtatcggttcaaaatcaccgaaactgaccatcgtgtctttcaccgattacaactgcccgtactgcaaacgttttgatccgcagctggaagcgatggtgaaaaaataccctgacgtggcagttgtcttcaaactgctgccgttcaaaggggaaagttccctgaatgccagccgtgccgcactttctgtatgggaaagcaagccggaagcatttgcaccgctgcataaccgactgatgcagaagaaaaccgcactgactcaggatgacatcaacagcgcactgaaaaccgccaaagccggtgatgtgaaagtcactgataacagtatgaataccatgcgtatgaatatgatgctggcagagcagttaggtgttcagggaacccctgcaacgctgattggtgacgtgatgctgccgggtgccgtggatgaagcacaactggatgccatcattaaggaacagctggctaaggttaaataatgcggttactgcgcagatggggaaaggaatttctcctgctgctggtgattttatttattgcgtcacaggcgatggactactggcgcaaaccgcaggcaccggatctaaacacggtgccttcgctgacactgacagacggcacaccggtgtccattgcgcagatgagtgcggaaaaaccgttactggtctacttctgggcatcctggtgcgggatctgcaaactgacctcgccgtcagtcagcgaactgtctgagtctggctacaatgtggtgacggttgctatccgctccggtgaggatgaccggctgggggaagggagggcagcaaaaggttactattttccggtgattaatgatccggatggccgtatctctcagctctggggtgtgaatgtcacgccgacttttgtgatttatcacaaaggggagatagtcagttataccagcggctggaccagtcagttaggtatgatggcgcggctgtggctgggggaataatcagtctgaaatgaaaaatcccgcggtgagtaatcacggcgggatttttttatctgcggaattttttcttatcagcgaaaatgcaaaccgcgttcagtggtttttctgcgttttatcagtgccagaccgaggaagacaacggtggctccccagaccggccaggtccccatacggtaatacggtgtgaaaccggacgcagaggtcacagtggcactcagggtagcctgtgtgaactgtggtaattgcgcggtgacagagccgtccggtgcaataatagcggtaataccgttgttggtggcgcgcagcagcggacgtcccagctccagcgcacgcatccgtgccatctggaaatgctgccacgggccgatggagcggccgaaccaggcatcattggaggcagtcagcagcacaccggttttgtcggtcatattgcggcgcacctgctccccgaggatcacttcatagcaaatctcggcggtcagtgtcattttcccggcggtcagcggcggctggatataacccccgcggctgaaagcggacatcggcaggttaaagaacggcgccagcggacgcagtaaatcttccagcggcacaaactccccgaacggcactaagtgatgtttgtaatagcggtttttatcccggctgtcgtattcactcttattacccagcacaatcagggtgttgtaaacatcatattctttgccgtccgctttcggaactgcatccaccacaccggtgatcagctgtgcgccgctgagtgtcagcaggccgttgagctgatccaggaacgcagactgactggcggcaaaatccggaatagcggattccggccagataatcagggtatcagggcggaagtacgggcggctctctttgaggtagatacccagcgttttatccagcataccctgttcccatttcagggactgggcgatattcccctgtaccagcgcgacctgggtcgggtcgttgttcatctgataccactggtagttgcgggcgagccacggtgcgaacagcagcaccagcgccgggatcagcggacggatacggcgctgtgagagtgaaagggcaatcagcccgcttatcaccatcagcaggaaagtgatggcattcacacccaggactggtgccagtgcacgcatcgggccgtcaatctgggtatagccgaattccagccacgggaagccggtcagtacccagccgcgtaaaaattcagtgagctgccagagtgccggggcggcaatcaccagacgccagacagtggcgtgcgggaagcacttggccagcaggccggcaaacagcatcggatagagcgccagataggcagccagcaggacaacaaggaacaggttggcaatttccggcataccgccgaaatccgcgatactgacatacacccagtttacgccgctgccgaataaacccagcccccaggcgaaaccgatagcacaagcctgtttgccagtccggttgagagtcagcagcagcagggcggccagagcgggcagcgagaaataccagagatcaaaaggcgaaaaggccagcgttccgccggccccgaaaatcagtgccagcagcagacgcggccactggcgtaaaccatgaggtgattttatcatgtcagattatcttcatctaaagacgggattggagcatcgtccggaatcttaacatgtaactggataattttacgactgtcagccatcgcaactttgaactggtagttgtcaatctcaatggtttcaccacgggtcggcagatggccgaaggcctgcatcaccagcccgccgacggtatcgacctcttcatcactgaagcgggtgccgaatgcgtcgttaaaatcttctatctgggtgagggcgcggacagaataggagtgcagactgagctgacggatatccacgtcatcctcatcatcgtactcatcctcaatttcgccgacaattaactccagaatgtcctcgatagtgacaagtccggagaccccgccgaattcatcgatcacaatcgccatatgatagcgctgggagcggaactccttaagcagacggtcaacacgcttactttccggcacaacaaccgcctggcgcagcactttatcaatactgaactcttcggaatcactgcgcataaacggcagcaaatcttttgccatcagcagaccttcaatgtgatctttgtcttcgctgatcaccggaaagcgggagtgggcagagtcaataatgacatccaggcactcgtcgagtgtctgattgcgcttgagagtcacaatttgtgaacgcgggatcatgatatcgcggacacgctgatcagaaatatccatcaccccttcgagcatgtcgcgggtgtcaggatcgatcagtgcattttgttcggaatcacggatgacctcaacgaggtcttcacggcttttgggctcgccgtggaacagttgctggcgcagcagagaaaagaaaccctttttctggttcggtgtatcactacccgatggatggtcgtcgctcatggcggtttttttacattccccgatttaatgaaagatgccgtattatgtagcataaaaacggcatcgctgactacgctttttctgtgatatacggatcagaatagcctaatttttttaagatttccgtttccaggccttccatctcttctgcttcatcgtcttcgatgtggtcataacccagcagatgcaggcagccgtggatgaccatatgtgcccagtgttcttcttcggttttttcctgttcggcggcttcgcgctccaccacctgacggcagataatcaaatccccgagcagcggcagttcaatttccggcggtacttcgaacgggaaggagagcacgttggtcggtttatccatgccgcggtaagtcaggttcagctcgtggctttccgcttcatccaccaggcggatggtaacttcgctctcttcctgaaacataggcagcacgccgtcaatccagcgctgaaactgagcttcagagggcagattgtctgtattttcacaggcgatttgtaaatcaagaaccggattactcatgagattgttcctgctgtgcctgcgcgcgttcggcatcacgctgctgtttcagcatctgtttgcgtttctgttctgcggcttcccacgcttcataggcaataaccacttttgccacgataggatgacgcaccacgtcttcactgtggaagaagttaaagctcagttccggtacatccgccagcacttcaatggcgtgacgcagaccggatttattgccgttcggcaggtcaatctgggtgatatccccggtgataaccgctttggagttaaagccgatacgggtcaggaacattttcatctgttcgatggtggtgttctggctctcatcgagaataataaaggcgtcgttcagggtccggccgcgcatataggccagcggtgcgacttcaatcacgttacgctcaatcagcttttccactttttcaaagccgagcatttcaaacagcgcgtcgtacagcgggcgcagatacggatcgactttctgactgaggtcgccgggcaggaaaccgagtttctcaccagcctcaacggcagggcgggtcagcaggatgcggcggatttcctgacgctccagggcatccacagctgcagcgaccgccagataggttttcccggtcccggcagggccgataccgaaggtgatatcgtggtcgagaatgtgggcgatatactgtgcctggttcggcgtacgtggtttaaccacaccgcgtttggttttgatattgacggatttgccgtagtccggcacatgttcgtcactctgttccagtacacggctctctgccacggccaggtgaacctgctccgggtcgatatcgcggatcacaccgcgtaccggggcggtttccacatagagctggcgcaggatagccgcagcggctttgacgcagtgcggtttgccggtcagccggaagcggttgtcgcggcggctgatttcggtgccgaggcggcgctcaagcagtttgatgttatcatcgaagggaccgcagaggctttgcagacgctgattttcggcgggttcgaggaaaatttcctgtgttgctacctgtgaaggtgatatataggtctctgtcactgaatctctctgtgtattctcacgcgcaggtcattctgcgcgtgatcgttagttagtgtacggatggctgatagatgccgacacccagttcgtcttctttacgggtgcgggcaatcacggattccggggtttcgtgaacgcgcaggttcatctgatcttctgtccggatcacgcggccgcgcagtgagttggtgtagacatcggtaatttcaacatccacaaatttgccgatcatgtccggggtgccctcaaagttcaccacacggttgttttcggtgcgtccggataattccataacgtctttgcgggacgggccttccaccaggattcgctgcgtggtaccgagcatctggcggctgtagctcatcgcctgctggttaatccgctgctgtaacaggtagagacgctgttttttctcttcttcggtcacatcatcaggcagatcagccgccggggtacccggacgcggggagtagatgaaactgaagctcatatcgaaattcacttccgcaatcagctgcatggttttttcgaagtcgtcattggtttctcccgggaagccgacgataaagtcagagctgatcaggatgtccggacgggctttgcgcagtttgcggatgatggatttgtattccagcgcggtatgggcgcgtttcatctgggtcagaatacggtctgagccgctctgtaccggcagatgcaggaagctgaccagctccggggtatcttcatacacggcgataatatcatccgtgaattcaatcggatggctggtggtaaagcggatgcggtcgataccgtcaatcgcggccaccaggcggatcagttcggcaaaactgcagatgctgccgtcaaacgccgggccgcggtaagcattcacgttctgacccagcaggttcacttcacgcacaccctgagcggctaactgtgcgatttcaaacagcacatcatcacacggacggctgacttcctcaccacgggtgtaaggcaccacgcagaaggtgcagtatttattacagccttccatgatagaaacaaaggcggacgggccttcggcgcgcggttccggcaggcggtcaaatttttcgatttccgggaagctgatgtccacaatcgggctgcggtcgcctctgagtttgttgatcatctccggcaggcggtgcagtgtctgcgggccgaagacaatgtccacggccggggcgcggcggcggataaaatccccttcctgggaggccacacagcccccgacaccgataataatgtccggattcacatccttgaggtttttccagcggccgagctggtggaacactttttcctgcgctttttcacggatagaacaggtattaagcaggagaatatcggcttcatcggcattgtctgttaaagtatagccgtgggtgctttccagcaggtcagccattttggatgaatcgtactcattcatctgacagccccaggtttttatgtacagttttttactcgtcgacattttctcaatccgctgttttcagtgaaacaatacccgcaacactgaaaagcattgtgtgtattcaatcaggttttgatgtaaccaatggtcgatattgtagtcatttgacacaccagtgaccagacccggcagcacggatcttcacctttcccggtgaatttacggcaattgaacaaaaaatcaacgtattagaataggtatgtcatggataacccgttaacacattctgaagtcaccgttatcggcggggggatgattggggccgccacagccctgggactggcnaatgattggtgccgccacagccctgggactggctcaggccggttttcgtgtcactgtggctgagttacaggcaccggcaccgttcgatgctcagagccgccctgacgtgcggatttccgccatcagccgcgcgtctgctgagttactggagagcctcggggtatgggagcgtgtccgtgccatgcgttgtgtgccgtaccgcaccctggaaacctatgaggaaccggggtcagaagtgacctttaccgcagagagcctcgggttacctgagctggggtatatggtggaaaacccggtgctgcagcgggcattgtgggagatgatcaccgctcatgagctgatcacctgtctgtgcccggcgcggctgcagagtatgacaaagcaatccggtgaatggttactgacatttgataacggcgacgtaatcagttcccgtctggttatcggcgcggacggcgcaaaatcacaggtcagaacgctggccggtatcggcagccgcggctggcagtatcgtcagtcctgtatgctgatcaccgttgataccggacgtgagcagcaggatatcacctggcagcagtttttcccgtccggtccgcgtgcgtttctgccgctgtttgactcttatgcctcgctggtctggtatgactcaccggcgcggatccgccagctcagtaaactaccgctgccgcaactgcaggcggaaatccgcgcatcattccctgagcgcctcggggacgtcacgccgctggcctgcggctctttcccgctggtgcgacatcatgccgcccgttatgtacaggacggtctggcgctgatcggcgatgcggcgcataccatcaatccgctggccgggcagggagtaaacctcggttaccgtgatgcggataccctgctgaataccctgattgcggcgcgggagtgctgtgaggactggggcagcgaatctgttctcagacgttatgagcgccgccgccgtccggataacctgctgatgcaggccgggatggatgcgttttatctcactttcagtaataccctaccgggattacagccgttgcgtaacctggcactgacggtggcacaacgtgcaacaccgctgaaaaaactggcgctgaaatatgcgctgggggtataacccgttggttttccggccggtcaggtaacagcggacagcgggtaaaagaaacgaaaagcgtaaagcgccatggatggcgcgaatcgagcggacagggatgtgtttacagcgtcttttcgtttttacccgctggcagcagaagcacgaaataacagaataatggttttatccggattcagaaaagcaaaaagcccgtcagagacgggctttcagaatttggctggggtaccaggattcgaannnnnnnnnnnnnnnnnnnnnnnnnnnnnnnnnnnaaagatagtggctgcaaaagatggtggctacgacgggnnnnnnnnnnnnnnnnnnnnnnnnnnnnnnnnnnnnnnnnnnnnnnnnnnnnactgctttaacaaagccgcttttcagaatatggctggggtacctggattcgaaccagggcatgccaggatcaaaacctggtgccttaccgcttggcgataccccacctgaaaaacgaggcttatcatacttcatttttccactcagtggaagatggctggggtaccaggattcgaacctgggaataccaggatcaaaacctggtgccttaccgcttggcgataccccatccggaaatataataaacaacaacgaatgtcacgagaaatggtgcgggaggcgagacttgaactcgcacaccttgcggcgccagaacctaaatctggtgcgtctaccaatttcgccactcccgcaaaaaagatggtggctacgacgggattcgaacctgtgaccccaacattatgagtgttgtgctctaaccaactgagctacgtagccatcttttttttgcgtgaccttcatcggcgttgcggggcgcattatgcggattacagccaaaagcgtcaactgctttttgcagatattttgatgaaatccgtttgtttgcctgcataataatcactttgaagataaacagtacaaaaaacaggataaaatcacggagttgacgcatttatccggtggcggattattccgccatatccggtttattttccagaacatgcagcagcagttcaccgtacagcatcgcccgttttatcagggcaaatgccccgatagcggagttcggcggcagctgtgaaatcaccaccggcagatcctcacggaaatttttcagggactgcgtatttatgcagctttgcagggcagggagcagtacattttcagcggcggttatctcaccggcaatcaccactttttgcgggttaaacaggtttattgtgatggcaatggcttttccgagggaattaccgacctgttttatcacttctgccgcaagagcatccccccggttagcggcacggcagatggcgcggatggagcagttatccggtgtcagttcactctcaaacccctgagccagctggtgttttacccgggtttcaatggcggcatccgacgcgaccgtttccagacagccgaagtttccgcagtggcagcgttcaccgagcggatctatctgaatatggcctatttcgccgagattaccacgccggttcagcaggatctgattgttgataatgatccccgccccggctccccggtgaatacgcaccagcagagaatccgcgcaatcgcgggtggcaccgaaatagtgttcggccagtgcaaggctgcggatatcatgcccggcatagcacggcagtttaaaatggtgatgaagattttcagtcagcggccagtcactgacagcaatgtgcggcatatagcgcacaataccgcgatccggatcgaccagtccgggcagaatcaccgcaatggcgatgagctcgcggatacggcgctggtgcgtttgtctgaagttgtcgatcagcgcaatgagtttagcttccgcatctgcctgagaggtggcttccaggggacaggtctcttcttcgagagcccgtccgctgagatcaaacagtgcgatagtggcatcatggcggccgagacgcacgccgatagtctgaaaggcgcggtgctcggaaataatggagatagcgcggcgtccgccggtggatgcctgctgatccacctcttttatcaggccgcgctcaagaagctgacgggtaattttggtcacgctggcgggtgccagctgactttgttcggcaatctgaatgcgtgaaatcgggccggaacggtctatcaggcggtaaaccaccgccccgttcagctgtttgactaaatcaatattacctatctgcggaattccgttacccatcggcgtcttttactcatgatgtatggaccacattcccgttaacgattgtcatacagacagaaaaatcagcggtgaaggcggtcaggttggcaatactgccggatttaatacttcccagtctgtcctgaacaccaattgcccgtgccggatagagtgtggccatgcgcagggtttcatccagcggaataccgacatgctgaacacagtttgccactgcgcggatcatggtgagtgaggaaccactcagtgtgccgttttcgtccacacataaaccatcacgataatatatcgttttgccggcaaagataaaatgatccagtccgctggttttcggatcaagccccgccggtgcggtggcatcggtgaccaggatcagcttgtcacgcttgagagctttactgttgcggatgttcggccaggaaacatgcaggccgtcagcaataatccctgcgtatatttcagaggtatcataaatcgcgccaatcagtcccggctggcggccggagatgtacggcatggcattaaacaggtgtgtggagagggtaatgccgttttcaaacccggcacgggactcttcatagctcgcattggagtgcccggaggagaccacaattccggcatccgtcagtttgcggataacagagggttccaccatttccggtgccagggtgagtttggttatcacatctgcgttgtcacacaggaaatcaatcatcgcggcatccggcttgcggatatagtccggattgtgcgtgcctttcttcaccgggttgatgtaaggcccttccagatgcagccccagcgcctgatttttatggtttttcagataatcacgcatggtgctgacactcagtttcatcagcgaatcggggcttgtgatcagtgtcggcaggaagctggtgcagccggtgcgctcattggctttctgcataatatccagggtgcggacagtgatatcgtcctcattgtcattaaactgtacgccgccgcagccgttgacctgcaaatcaataaatcccggggagagaatggcaccgcccagatcacgggtgtcaattccgtccggtaactcactgaccggacacacactgtggattaattcgccgtcaataatgaccgcgtggttttccagacgatcgtgaccggtataaataatggcattggttaatgcgtacataacgcctcctgggggagagaatacttatttaaagataagacaacacaacaaaaaccgcccggataaagggcggtcagcatcggttattcagcatcaaattgttcgataatgtcagattcaaggtgacagaaatacttcagggttttcactttcagctcaagtgtggccggttcatcacataccacaatggctttcgggtggatctgcacacaggtaatcgtccacatatgattcaccgagccttcaaccgcctgctgtaccgccattgccttgttatggccggtggcgaggatcagcagttctttggcatccatcagtgtgccgacacccacagtgagcgcatatttcggtactttattgatgtcattatcaaagaaacgggagttggcgatacgggtttccggtgtcagcgttttgacacgggtgcgcgaggtcagggatgagcccggttcgttaaaggcaatgtgaccgtcattaccgacgccgcccataaacagctgcacgccgccgtaagctttcatcttcgcttcatagcgttcacattccgcatcggtatccggggcattaccattgagcaggttgatgttttctgccgggatatcaatgtgattaaagaaattctcatgcataaatgagtgatagctctgcggatgggattccggcaggccgatatactcatccatattaaaagtcaccacatgacggaaactgacttttccggcctgatgcagggcgatcagcgccttgtaggtggccagcggggtgccgccggtcggcagtcccagaacaaacggtcgttctgccgtcgggcggaacgcattgattttgtcagcgatgtactgtgcggaccactgaccgacatcctgcgctttcgcaagagggattaaacgcatatcgattctacctcgttaagttataccgggttatcggcccggtatctgctgtgctgtctcaggaagatccttcctgtctcatctatagcatgaatacccggaatttattagtcacgggagagaatacagccgccggaaaagatattttttatcttaaaataagttttgtgtgactgccagcattttaaccagccggtgacgaatattggtgacaataatcacaaatcacagctatttaatttgcgaagcgaaataaactttttagactgatacgtatagttggcagtaaaataagtgttacgcaatccggtgagtaatcagaccggttgttacaaattcagatgtacacaaaaaggcagccggtcatggctgtgataataatgctgtaaaacaaaaaagccgttcgtcagggcggcaagggggagtgagtgggtatactgaactatctgcagcggattggccgggcactgatggtgcctgtcgccacattgccggctgcggcaattctgatgggggtcggttactggatcgacccgacgggctggggtgcggacaacgtggttgctgcgttcctgattaaatccggtgcggctatcattgacaacatgtcaatgctgtttgctatcggtatcgcttacgggatgtcaaaagacaaagacggtgcggcagcactgaccggttttgtcagctttatggtggtgaccaccctgtgttccaccgcgacagtcggtatgattcaggggatccctccggaagcggttccggcggcgttcggtaagatcaacaaccagtttatcggtattctggtcggtgttatttccgccgaactgtataaccgttacagcggtgttgagctgccgatggcattgtcattcttcagcggccgccgtctggtgcctatcctggcatcattcgtgatgatcctggtggctgcggtgctgatgtatgtctggccggtcatttatgatgcactggtttccttcggtaagagcattaaagacctgggcgcgtggggcgcggggatttacggcttctttaaccgtctattaattcctgtcggtctgcaccacgcactgaactccgtgttctggtttaacgtggcggatatcaacgatattcctaacttcctggccggtcagcaatccattgatgccggtacggcgattccgggtatcaccggccgttatcaggctggtttcttcccgatcatgatgtttggtatcccgggtgccgcgctggcaatttatcactgcgccaaaccggaaaacaaagcaaaagtggccggtattatgatcgccggtgcatttgccgcgttcttcaccggtatcaccgagccgattgaattctcctttatgttcgtggcaccggtgctgtatgtcatccatgccttcctgaccggtatctccctgtttatcgctgcaaccatgcagtggatttccggtttcggcttcagtgcggggctggtggatatggcgttgtcttcacgcaacccgctggcaaccaactggtatatgctgatcctgcagggcctggtcttcttcgcgctgtactatgtggtgttccgctttgttatcaccaaattcaacctgttaaccccgggccgtgaagcggcgatggcaaccaacgataccgttgatggttacagtgagaatgtcagcactgataacaaaaaagatgagaaaaaatccatcagcagcgaagcacgtcagtatatcgcggctatcggcggttcagataacctgaccggtattgatgcctgtatcacccgcctgcgtctgactgttaaagactccgcgcaggtgaatgatgcttatgcgaaacaaatcggtgcttccggcgttatccgtctgaataaagagagtgtgcaggtgattgtcggcacccgtgccgagctgatcgccaacgcaatgcgtgacgtgctgaaagaaggcccggttgcggcagctcaggctgcggcggcggctccggaagcagtgaaagccaaagcacagggcgacggtaacgtggtactgacgctggtggcaccattcgacggtgaagtggttgatttatccgctgtaccggatgaagcatttgccggccgtgttgtcggtgacggtattgccatcaaaccggaaagcgacaccgtatatgccccggcggcaggtactgtggtgaaaattttcgataccaaccatgcattctgcctggaaaccgataatggtgcggaaattattgttcacatgggtattgataccgtgaatctgaacggtaacggctttacccgcctgattgaagaaggcgcacaggttgctgccggtgatgcggtgctgaaactggatctggcgtatctgaacgagcatgccaaatccatgataagcccggtaatcatcagtaatatcgatgattatgatcgcgtggagattgttgccaaaggtctggttaaggcaaacgaatctgagctgtatcatgtcattaaataagtgattgcggttatgataataacgggaggcagctgcttcccgtttttttatctgttttttgcgcgaaggcatctgcccggctgatatttctgtgctcaggtggttgtatatgagcgcatcatatcggatgataagaggttattaacgcgcatattgcattgaggaattatgacaatgaacgaggctgatgcccgcccgacaaactttattcgtcagattattgacgaagacctggcttccggaaaacataccacggttcacacgcgcttcccgcctgagccgaacggttacctgcatattggtcatgcgaaatcaatctgcctgaatttcggcattgcacaagactatcaggggcaatgcaatctgcgttttgatgacaccaacccggttaaagaagacgtggaatacgttaattccattgaaaacgatgtcaaatggctcggttttcagtggagcggcaatgtatgctactcctccgactatttcgacacgctgtacaactacgccgttgagctgatcaacaaaggcctggcgtatgtctgcgaattaagtccggaagagatccgtgaataccgcggcaccttaaaagagccgggccggaacagcccgtaccgcgaccgtactccggaagagaacctcgcgctgtttgaaaaaatgcgtgacggcggctttgaggaaggtaaagcgtgtctgcgtgccaaaatcgatatggcatcctcctttatggtgatgcgtgatccggtcatttaccgtattaagtttgcgactcaccatcagtccggtgacaaatggtgcatctacccgatgtacgatttcacccactgtatttctgatgcgctggaagggatcacccattcactctgtacgctggaattccaggacaaccgccgcctgtatgactgggtgctggataacatcactattgactgccatccgcgtcagtatgagttctcccgcctgaatcttgaatacactgtgatgtccaagcggaagctgaatcagctggtaacagagaaatttgttgaaggctgggatgacccgcgcatgctgaccatttccggtctgcgccgtcgtggttataccgctgcctctatccgcgagttctgccgccgtatcggcgtcaccaaacaggataacaacgtcgaaatggcggctctggaatcctgtatccgtgatgacctgaacgaaagcgcaccacgcgccatggcggttatcgacccggtgaaagtcgtgattgaaaacatgccggaaggcgatgtgatggtcaccatgccgaatcatccgaacaaaccggagatgggcagccgcgaagtgccgttcagccgtgaaatctggattgaccgtgcggacttccgtgaagaagcgaacaagcagtacaagcgtctggtgctgaataaagaagtgcgcctgcgtaatgcgtttgtgattaaagctgagcgtgcggaaaaagacagcgaaggcaatatcaccactatctactgcacctatgatccggaaaccctgaataaagatccggctgacggacgtaaagtgaagggcgttatccactgggtcagcgtgaaacacgcagtaccggcggaaatccgtctgtatgaccgtctgttcagtgtaccgaacccgggcgcagaggatgatttcctgtcgacgcttaacccggattctctggtgatccgtcagggttttgtggagccgtctctggttgccgctgacagcagcaaaccgtatcagtttgagcgtgaagggtacttctgtgctgatgccaaattatcctcagcggataaattagtctttaaccggactgtcggcctgcgtgatacctgggcaaaaattgaaagtaaataacagataacacagtgttactgttataaaaaagccgttcacaggaacggcttttttgtgtgcatttgtcctgaaaaacggcaacaaaaaaggcgcaatacgcgcctttcatacaaaatggtcaacggtgagaattattttttctcgtcgtggataccttcatcagaacggcagtcaccatccgcacagtggccgtacaggtacaggctgtggttggtgagtttaataccgtggcgttccgcgatatttttctgacgtgattcaatggattcatcactgaactcaatcactttaccgcaatccaggcagatcaggtgatcgtggtggtgttgctgggtcagttcgaaaacggatttgccgccctcaaagttatgacgggtgacaataccggcgtcatcaaactggttcagaacgcggtagacagttgcgagtccaatctcttcaccgatatcgatcagttttttgtagagatcttccgcactgacgtgatggcactccggatcctgcaacacttccagaatcttcaggcggggaagtgtgactttcagtcctgcatttttcaatgctttattgttatcggtcatgcggatttagtcctatattgtcgctggtgagcgcacactcaggaaaacgctcaacggctgaacacaatgtccggctatcaaaaggtgtcaggtgcgattcgcctgaccgatgccggaccggataaataatatcattacataaataagcagaattatcattcgcaatttaagggaaaaccttaaattgccagaatctcgtcgagactcatttcttcacggatctgctcaacccattttgccacgcgttcgttagtcagctccggctggcgatcttcatcaatagccaggccgataaagtgactgtcgtccgccaggccttttgactcttcaaagtggtagccttctgtcggccagtggcccacaatggtcgcgccgcgcggttcaatgatgtcacggatggtgcccatggcgtcacagaaatactctgcgtaatcctcctggtcaccacaaccgaagatagccacaattttaccgttaaaatcaatttcttccagtgtcgggaagaaatcatcccagtcacactgtgcttcgccgtaataccaggtcgggatacccagcagtaagaaatcaaacccttcgatgtcctctttgctgcacttggcaacatcccggacttcagcaacgtcatcgccgagtaatttctgaatcattttagcgatattttctgtgttaccggtgtcactaccaaaaaatatacctgcgattgccataaataagcctctcaaccgaaaatctctgtgcctgcaaaaggacgccgcagcgacaacaagcagaaattataactatttcatcttaataaatactattctgacgaaaacagtatttgaagtctgtcaaatttgtgtggtgtgtcgtctcacaatttggtgcataaatctgaacgctgaaggtaatcaagcagaatttgctcgataagctcgccccggttcacgttttcttcgtatgccagctggttcagggcatcgacaatatccgcattcagtttgagctcaacgcggcgtaatccgttaactttgtcacgccgcagctgattgcgtttgttaatccgcaactgctcatcacgggagagcgggtttgttttcggtcgtccgggccggcgttcgtcagcgaacaaatccagcgtggtacgatccgtttgttctttggccataattttactacgaaaaggcggattacaatgataaacgcgcaatgatacaccgccatcccgcttaccgccaccgcttcgcggcctgttaccgcggattttgtgcggattgattaacatcccgccgtctgcccgcctgtgcggcagctctgcaggatgggtgacaggccacatcaatggattcggtgttgcaattatcgttatgaatatattagaaaaaaaagagtattcagatcaggataacggagtgtttttgcgggcaggcattacgtagtatgtattttcagcaagggaataacagaggacgcgcacatggatcgtatctcagaatctgcggaattatcgcggatattgcacaaaaagtatcaatacggccacaaagtaaagcagatgctgacggtgtttatccgtccgcttcagtatttgtgtctgattctatccggctgctgcctgctggatatctgttttgatctgccggggcaggatgtcagacagcaggtgcgttctgttgtggcctggtggcaggagagtgatactgacagcctgatactgagtttccgtcagtgaaaaaacgccgccgtgatggcggcactgttgtcaggctttatccaggaagcggctgatggcgcgcagaaccgcgtctggtttttcagcgtgtacccagtggccgcatccggcaatcacatgcgcggttgcctgcgggaactgcgccataatagcgtcgcggtattccggtttcacatacgatgaattaccgcccgggataagcagcagcggaacctgttgcggtggcaaagtttcccagccgatgatggattcatactgtgctttgataaccggcagattgaatttccattctccctgcttaaaggatttcagcaggaacggaataacaccatcctcacggattcgccgcgccataattgcggtggcctcagtgcgtgtggtgacgccggcggcagtaacatcttccagtgccgcgataatctcatcatgacggcgtacgccataagcgacgggagccatatcaataacgatcagcttttcagtgacatccggtgccagtgctgccagcgccatggcgatttttccgcccatggaatggccaatcacaatcactctttcgaaatgcagggagcggataagatcaagcacatcctgcgccatctcccggtaagtcatggtttgtgcgcgcggtgaatcaccgtggttacggacatcaatctgtaccacagtgtgcgttttccgcagttcacggccaagcaccccgaggttatgcagatctccgaacaaaccgtggatcagaacaatgggtgtggtgtgatgtgatatttcaggtgtgaatatttcatgatgaagtaatgcaggtaatttcatattaacaaccgatccgcagagcaaaacaggcggatatgatgacacggcagccgccggaaaccaacatgttaagtaaatgtttctgtgattgattgtgtgcccggaaacgataacttactgatttattttttaaatgccggacggggcaaactgcgggggtttttagtttaagttattgaaattttacttgttttgttttgcatttttctatcttataataacgtgtttcgcgttaacgaataaaagaaccgggtagaaatgaaaacaatcgatgtagatgaagaactttacagttatattgccagccacacacagcacattggtgaaagcgcatcggaaattttacgccgtatgctcaatttagggccgcaggcaccgggtgccacctgcgcacctgctgtaactgacagcgcggataacaaaatgccgccggttaccccgcgtccggtcaaaaccatgtctcaggatccggtccgcgtcatgcgcgaactgctgctgtccgacagctatgcagagaaaaagaaaacgatcgatcgttttatgctggtgttatccgcactgtataatattgatccgcaagggttcagcaaaagcaccgatgaactccacggccgcacccgcgtctatttcgccggtgatgagcacacgctgctggccagcggtaaaaccagcaagccgcgccacattccgggcacgccgttctgggttatcaccaacaccaatactcagcgcaaacagagcatggtagaacagattatgcagggaatgggcttcccggcaaatactgtcgagaaagtctgcaataccctgtaaggggtatttatctgccggtgacggcgtaatcaggggagaatgacacagtggctcatacgcacccgcgggctggtcagcctgcgcaacaatccgatttaatcaatgtggcgcagctaacctctcagtattatacccttgcacctgatgcggcggatccggcacagcaggtcaaattcgggacttccggccaccgcggcagtgcggcgcgtggcagtttcaacgaagcacatattctggcggtcactcaggcaatcgccgaaatccgtcagcagcagggcattaccgggccgtgctatgtgggtaaagatactcacgccctctctgaagcggcatttcagacggtgttatccgtactggcagcaaatggtgtccgcgttattattcaggaaaataatggtttcaccccgacaccggcggtgtctcatgccatcctgacttacaaccgcgaccatgctgataaagcagacggcattgtgatcaccccgtcgcacaacccgccggaagatggcggcatcaaatataacccgccgaccggcggcccggcagacactgaccttacctctgttatcgaaaagcgtgccaatgtactgctggccggtaatatggcgcaggtgaaacagataccggtgtgtgatgccctgcgcagcccgctggtcagcgcggtgaacctgattgagccttacgtcagttcgctcagtgacgtgatcaacatggatgctatccgtaacgcgaaactcaaaatcggcgtggatccgctgggcggtgccgggattgagtactggaaacgcatccgtgatttttatgatctggatattgagctggtcaatgagcaggtggatcagacattccgctttatgccgctggatcacgacggggttatccgtatggattgctcctcaaaatgggcgatggcggggctgctcagcatgcgtgaccgcttctcgctggccttcgccaatgacccggattacgatcgccacgggattgtgacgccgaaagggctgatgaatccgaaccattatctggcggtggcgattaactatttatttcagcaccgtccggactggccggcctctgtcggtgtcggcaaaaccctggtatccagcgcgatgattgatcgcgtggttgcggatttacagcgtgatctggtggaagtcccggtcgggttcaagtggtttgtggacgggctgtataacggcacactgggcttcggcggcgaagagagtgccggcgcttctttcctgcgctttgacggtacaccgtggtcaaccgataaagacggtattatcctctgcctgctggccgccgaattgactgccgtgaccggcaaaaacccgcagcagcattatgatgagctggcggaaaaattcggttcgccatgctacagccggatccaggcagcggccagtcatgcggagaaatcccggctgtcaaaactgtctccggaaatggttaccgcagataccctggccggtgatccgatcaccgcccgcctgacagccgccccgggtaacggtgcgtcgatcggcggcctgaaaatcatgagtgagcaggggtggtttgccgcgcgtccttccggtacggaagatgcctataaaatctactgtgaaagtttccggggtccggaacatctggcacagatagaaaaagaagcaattgaaatagtcaaccaggtgattgcggactgacgcattccccggaaaagcagcgcggagcggatcttcccctccgcgttttttttgcctgtctcagcccaaagcaaccatcagtgcaccaacggtgatcagcgcaacgccaccggccgcaatcatagaaattttttcaccgaacaggatcacggcaaaaatcacagcaaaaaccacactcagtttatcaatcggggcaacctgtgaaacctgaccgttttttattgccataaaatagaacagccaggaaagtgctccggcaatcccgctcagagcgataaaaaacagggctttacggttttcgattatctcactgataagattaagttttccctgaaccaccaccacaccgaccagaaacagcgccataatcactgcacggatcgcggttgcggtattggcatccagatgctgcagccccattttcccgaagacagcaaccattgcggcgctgatagcagacagcagggcatagatcagccaggtactcataataaataattcccattatcaattagtgatgtgaatatcataaggtattttcattagcgtggtagcttaattttgaataataaaattgttaataaaatgataaaaaataacaattatgtaatttaattacttaaaaggggcattttgtgcgtatcatacaggcatcaagtggtcagatgagtggtaaagtttcaccagttgggttaatatgaaagcgaaatacattcggtgattattgctgttctgcgataatccgttattaaggagggtctcaatgtcaacatttcaggcatatccgttgcataaggttctcttgcgccgtaccggtgcagtatctttaggtatcctggcgttcccgtttatgctgttctaccgggatcgcgcccgcttctggagctatctgtaccgcgtgtggtccaagacaagtgataaaccggtctggctggcacgttcagaaaatgcggtaagcagtacccagcagcactgataccggcatccggaaagcaaaagagacgcccggcgatattatcgcggggcgtttttttatgtctgcaaattgctattggcgggcagggaagggatggtaaatctatccgcacggacaggaaaaatgtatgaatcatattgaattagaacagattattaatgaaaagctggcagtacaggattttcaggattatgccccgaacggtctgcaggttgaaggacgtgaacaggttcagcgcgtggtgaccggcgtgaccgcctgtcaggcattgctggatgaagcggtgagactgaatgcggacgcggtgctggtgcatcacggctatttctggaaaaacgagccggtcagtatccggggcatgaagcagcgccggatcaaaacactgctgtgtaacgatatgaatttatacggttatcatctgccgctggatgcccatccggaactgggaaataacgcgaaactggcgcaactgatgggagtcacagtcaccgggcaggttgatccgctgcttccgtgcggtgagttcgcgcaaccggtcagcggcgaggaactggcgcagcgtttacagcaggggctggatagggagattctgcattgcggggataacgcgcctgcacagattaaaaaactgggctggtgtaccggtggtggtcagagttttattcaggcagccgcagatgcggggcttgacggctttgtgaccggcgaggtatcagagcagacaatccatattgcccgtgaatgcgggatgcacttctttgccgccggtcaccatgccactgagcgcggcgggatccgtgctctgggtgaatggctgcagaaaacgcacggactggatgtgatttttgtggatattccgaaccctgcataacgggtaacaggaaaagccggtcttctgaccggctttttattatacggtttgcgtgctttgcacagccttgcgcggtgcacagagcagtgttcccgcagcacagacacacagtgacataccgaggttctggctcagcccggccagtgccagtccgccgccaatcagcaggtaatacatcagaccgagcagcgcaccggcagtgccgaggcggtcacggtaatcctgtaacacaccggccagaatattcggaatggcgagcccgtaacaaatcacgataccggtcaccggcagcacaaataaaatcgatcctgacaacagccaggccgcagcagcgctgaccataccggttacggcagcaaggcggatcagtgaatgactgtgccatccgcgtttaagcaggacacggttgattacagagcctgcggccacaccaagtgcgagcagtaacccgctgtaaccgaattcctgttgtgtaaagcccagcccgctgaaataaaacggtgctaactggtagtagctgaacaggctgatattcagaaaggcaatcagcagcacattgcgcagaataaagcggtcacacagcatacgaccggctgtttccggcagcgaaactgacgtgatatgtgccggacgtgtttccggtaaccggaacgccgtccataccagcagaacaaccgccagtaccgcaagtccggtaaagactccctgatatccggcgaaaccggtcagtaccgcgccgctgaacatccccagtgccgggctgacagccagtgctatccccatgacagagaacacttttgccagctcatccccgcggtaacagtcacgtatgatggtttgtgtgccgactgagccgaccgccgccccgaaggcagacagcatccgcaggatcagtaatacgctgaaatcctgtgtgataactgcaccgcaggaggcggcagcgtaaagtatcagaccactcagcatggtgcgtctgcgcccggcgatatcacataaacgtccccaggtgaccacgccgagtgcgaaggcgaaaaagtacagggacagagtctgtcctgcctgtgccgcactgacgccgaatccctgtgcgatatccgtcagcgccgggctgtagatggtttccgctatctgcgggaacatcatcagggcaacggcaagtgttaatgcgggtttttgtattgtcattttgtcccccttttttgtaactgaaatgaacggggggcagattagcaaaaggcgggatgccttattataataataaggacattctgtttatcaaaagggacaacatggcgtggctgaagcaaagtgatgcatttgatgcggaccgctattccgcaccactgattggcattgccgcagaaatggcggcacagcatgattccggttttcaccgccatcagcgcggacaattgctgtttactgaacggggagcgattcagatcaccctgacggacactctctctgttctgccgccgacgcgggtggcgtggatcccgccgcagatgctgcaccgcgcgcagatgtttgaggctgtcggttaccgctcactgtatccggatgcacaactcagcgcctgtctgccgtcaacctgtgaaattttcggcgtatcgccgctgctgcgtgagatcctgtttctctttgccggactgccgtttgacagtgactggacacagccccgtctacagcatctgctgccggtatttctggatgagctggcgctggccgggcgggaagatatgcagttaccgctgccgtcggaccggcggctgaaaaccctggatacccggatactgccgccgccgcttaatgagctggcatcccgctgcggtgcaggggaaaagacgatcaccagggttttccggcgggaaaccggtatgagctaccagcagtggcggcagcaggggcgattaataaaatctgttgaacttttggcgaaaaaataccgcagcagtgatattgcacaggcgctcggatttgccagtgacagtgcgtttgtctctttcttccgtaagatgaccggaaaaccccccggtgaatatatgggtaaatgaatagccgggagttaaaaatgcataaaaaaaccctccggagagggttttataaggattaatacggtattgtcacgatgaacagcgtttggtgactttggtttcaaacggacgctcagtgtaaccggtataaagctgacgcggacgagcgattttgaggccgtcgtcgtgcatttcgctccagtgggcgatccagccgatggtgcggccgatagcaaagatcaccgtgaacatatttgacggaatacccagcgctttcaggatgataccggagtagaaatccacgttcggatagagtttcttctcgataaagtacgggtcgttcagtgcgatacgttccagctccatcgcgacttcgagcaggctgtcattcaggcccagttcgttcagtacttcgtgacaagtttcacgcattactttggcacgcgggtcatgatttttgtacacgcggtggccgaagcccatcagacggaaagagtcatttttatctttcgcgcgctcaataaaggccgggatgtgatcgacggtctggatctcttccagcatacgcaggcaggcttcgttcgcgccgccgtgtgcaggtccccacagggaggcaataccggctgcgatacaggcgaacgggttggcaccggaggaaccggcagtccggacagtggaagtggaggcgttttgttcgtggtctgcgtgcaggatcaggattctgtccatggcacgttccagcaccggattgaccacatactcttcacacggggtggcaaacatcatacgcaggaagttaccggcgtaggaaaggttgttcttcggatagacaaacggctgcccgacagaatatttgtaacacattgccgcgacggtcggcattttggagagcagacggtaggccgcaatttcgcggtggcgcggattgttcacatccagcgagtcatggtagaacgcagccagtgcgccggtcacgccgcagagcacagccatcgggtgagagtcacggcggaacccgttgaataagcgggtgatctgctcgtggatcatggtgtggcgttttacggtttctttaaattcgtcatactctttctgatcaggcgcttcgccgtacagcaggatgtagcacacttccagataatcagatttcatcgccagctcttcaatcgggaagccgcgatgtaacaggataccttcatcaccgtcgatatacgtgatttttgattcacaggacgcagtggaggtgaagccgggatcaaaggtgtagtagccttttccgccgagcgtccggacatcaactacgggctggccgagagtcgggctcaggatatccagctcagtaaccctgacgccgtttagtgtcagctccgcctttgtattagacatgtaggtctccttagcgcatttattatttgtttttcaatcttattgtgataacccctgatgcgttacctgaatggataccgtacctggtgttacgttatccggtacggcgcatgatgggttatcagattgttaatgaaactttgtgttgcgataaaagttatgttgtacagcaagatattgtgcattttttgcaagttacacttttgcataagtttgcacttacgggaagtctttcttgccggtaattgtcgttttaatttttgtatttaaccacataatgtaattcaaatgttgtcagaatgtcacaagtcataataatgggcgtttttattgtgtgaaccgtgatcttattcactgttctggctaaatctgaccaaacattttgtatgggaattgtaatcatattgtgaagtccatatactgcctcaaggtctccggaattccctgaagcaggagcacccagcgtaactgaatcattacttttgtaaaacaatacggatgttgattttacttaaggattgttcttatttccccagcgctgtctgatttccgcccgggtccggaggaaggaaaaataataaagagctgtgtgggcaaaattgtgaaaaaacaacgacctgtcaatttagacttgcagacgatccactttccgatccctgcaatcgcttcaattttacaccgtgtctcaggcgtcattaccttcattgctgtagcgattctgctgtggttattagggttgtcgctgtcctcgccggaagggtttgcgcaggctgctgatatcatgagcggtttcttcgcgaagtttatcctctggggcatcctcactgcattggcttaccacatctgtggtggcattcgtcacatgttaatggatttcggatttgttgatgaaacactggctgccggtatttcatccgcgaagatttccatggttctgactgtgattttagccgtgttggcgggggttctggtatggtgaaaaattcaaaaatcagtgcgaccacgctcggccgtaacggtattcaggattggttaattctgcgtgccagcgccattgtgattacactttatgtactctacctcgtcggttttgtggcttttacctctgacatcacttatgacgtctggtacagcttctttaccgcttcattcactcaggtgttcaccaccctgacactgatcgccattctcgcccatgcctgggtcgggttatggcaggtactgacggattacgtcaagtgcctgagcctgcgcctgctgctgcaatttattatcattattgtgctggcagcctatgtcatttacggttcaatcattgtgtggggtgtctaaatgagcttacctgtcagagagtttgacgcagttgttatcggtgcaggcggcgcaggtatgcgcgcggcacttcagatttctcagtccggcctgtcctgtgccctgttatccaaagtgttcccgacccgctctcatacagtgtccgcccagggcggtattactgtggcgctggggaatacccatccggataactgggaatggcacatgtacgacaccgtaaaagggtcggattacatcggtgaccaggatgctatcgaatacatgtgtaaaaccggcccggaagcggtgctggaactggagcacatggggttaccgttctcccgtctggacgacggcagtatttatcagcgtccgttcggcggacaatccaaagatttcgggggcgagcaggctgcacgtactgccgctgcggctgaccgtaccggtcacgcactgctgcatacgctgtatcagcagaacctgaaaaatcacaccacgattttttccgaatggtatgccctggatctggtgaaaaaccaggacggcgccattatggggaccaccgctatctgtatcgaaaccggtgaagtggtctatttcaaagccaaagccacgattctggcaaccggtggtgcagggcgtatctatcagtccaccactaacgcccatatcaacaccggtgatggtgtcggtatggcggtgcgtgccggtattccgctgcaggatatggaaatgtggcagttccatccgaccgggattgccggtgccggggtactggttactgaaggctgccgtggtgagggcggttatctgctcaataaagacggcgaacgctttatggagcgctacgcaccgaacgccaaagatcttgccgggcgtgacgtggttgcccgttccattatgatcgaaatccgcgaaggccgtggttgtgacggcccgtggggaccacatgccaaactgaaactcgaccatctgggtaaagaagtgctggaatcccgtctgccgggtattctggaactgtcacggacattcgcccacgttgaccctgtcaaagagccgattccggttattccgacctgccactatatgatgggcggcatcccgaccaaagtcaccggtcaggttgtgaccatgaatgagcagggcgaggatgtgctggttccgggtctgtttgcggtcggtgaaattgcctgtgtttctgttcacggtgcaaaccgcctcggcggtaactcactgcttgacctggtggtcttcggccgttccgccggtctgcatctgaaagaatccattctggagcagggcgcaatgcgtgatgccggtgaatcggatatcgatgcggcactggcgcgtctgaaccgctggaataacacccgcagcggtgaggatccggtcgctatccgcaaggccctgcaatcctgtatgcagcacaacttctcggtattccgcgaaggggatgcgatggccaaaggactggaagagctgaaagccattaaagagcgcctgcagtatgcgcgtctggacgatacctcatcagaattcaacacccagcgcatcgagtgtctggagctggataacctgatggaaacggcgtattccactgcaatggccgccaacttccgtactgaaagccgtggtgcgcacagccgctttgactatccggatcgtgatgatgcgaactggctgtgtcattccctgtacctgccgcaatctgaaaccatgacacgccgtgcggtgaacatgcagcctaagctgcgtgacccattcccgccgaagattcgtacttactgatgtgtggtgatgaggcatttgcggagagaatactatgaaagttgaattttcagtttatcgctataacccggatgtggataacgcaccacacatgcagaactatcagctggatgtggaagaaggccgggacatgatggtgctggatgcactgattctgctgaaagagcaggatccgagcctgtcattccgccgctcctgtcgtgaaggggtgtgtggttctgatggtatcaatatgaacggcaaaaacggtctggcctgtatcacaccgttgtcggcgctgatgaaaggcggcaaaaaagtggtgatccgtccgctgccgggcttaccggtggtacgggatctggtggtggatatggggcagttctacgcgcagtatgaaaagatccgcccgtatctgatcaacgacaacaaaaacccgccggcgcgtgagcatttacagtcaccggcgcagcgtgaaaagctcgatggtctgtacgaatgtatcctgtgtgcctgctgctcgacatcctgcccgtccttctggtggaacccggacaaatttatcggcccggccggtttattagccgcgtaccgcttcctgacggacagccgcgataccgagacagaatcccgtcttgacgacatcagtgatgctttcagcgtattccgctgtcacggcatcatgaactgcgtcagtgtatgtccgaaaggactgaatccgacaaaagcaattggtcatattaaatcaatgttactgaaacgcagtgcataattgactttattctgcttaagcgattgataataataagatgcctgcccggcaggcatcttttaccaacccgtaacaataggcataatctatcgcagtaagtgttagaagcggcaataaatgtagttaattgtgattaagatgtgagttttttggttcaaatgtaagtatggttatagacagtacagggatcttcagcaacggttattccgttgctaaaggttcctcagggatacacagaacataagatgcacaagcaccacccgggaatcctttacgcaccgcaatgtatcgcggtattagttatcacggcgaaaactaaacccggcctcattcaggttgcagggcagcggcagacggggaatccgcagaacagagccactctgttttccggacggacacgcagccggtacaccgcagccgggaagacaacggggatgaagctctaagcttaagggatcataatgcagaacggcgcactgaaggactggctggattccagctttctggctggagaaaaccaggcctacatagaagatatctatgaagactatctgaacgatccgtcctccgtcgatggaagttggcgggagattttcgactcactgccgaaagcggacatcacagaacaacctcattcacagacgcgcgactacttccgtcgtctggccaaagattcgacccgctaccacacctccgtcagcgatccggcgatggattccaagcaggtcaaagtcctgcagcttatcaacgcattccgtttccgcggtcatcagaatgccaaccttgacccgctcggcctgtggaaacaggaaccggttccggatctggacccggcgttccacaatctgaccaaagccgattttgatgaaacctttaacgtcggttcttttgccatcggcagcgaaaccatgcggctgagcgagctgtttgacgcattaaaacgcatttactgcggctccatcggcgccgagtatatgcatatcaccaataccgaagagaaacgctggctccagcaacgtctggaatccgttgacgtcagtaagctgttcagtgctgatgaaaaacggcgtttcctggcggatctgaccgcagccgaagggctggagcgctatctcggggcgaaattcccgggtgcaaaacgcttctcactggaagggggcgattccctcattccgatgctgaaagatctgatccgtcatgccggtaagcaggacacccgcgaagtggtgctgggtatggcacaccgcggtcgtctgaacgttctggttaacctgttcggtaaaaaaccggcggatctgtttgatgagtttgccggtaaacacaaagatcatctgggtaccggtgacgtgaaataccatcagggtttctcgtctgatttcgtgacagaaggggctcaggtgcatctggcactcgcctttaacccgtctcaccttgagattgtcagcccggtggtcatcggctctgtccgcgcccgccgcgaccgtctgccggaaagtctgagcaaaatggttctgccgatcaccattcacggtgactcagcggtaaccggccaggggattgtccaggaaaccctgaacatgtcacaggcacggggctatgaagtgggcgggactgtccgcattgttatcaataaccagattggtttcaccacctccaacccgaaagatacccggtcaacggaatactgtactgacatcatgaagatggtacaggctcctattttccacgtgaatgctgatgatccggaagcggtggcctttgtgacccgcctggctctggatttccgtaacacctttaaccgcgatgtgatgatcgacctggtctgctaccgccgtcacggccataacgaggcggatgagccgagtgcaacccagccgatgatgtaccagaaaatcaaacagcacccgacaccgcgtaaaatctacggcgacaaactgattgccgaaggtgtggtcgccgccggtgatgtgactgaaatggtcaatatgtaccgtgatgcgatggatcgcggtgactgtgtggtggaagagtggcgtgaaatcggtaaagccgcgctcacctgggaaccgtacctgaatcacaactggaatgacagctacgccaataaagtggaactgaaacgcctcggtgatctggcgcgccgtatcagtaccgtgccggaagaagtgcatatgcacccgcgtgtcgaaaaaatctataccgaccgtgcggaaatggcggaaggtaacaaactgctcgactggggggcggcggagaatctggcctacgcaacactggtggatgaaggtgttccggtgcgtctgtccggtgaggatgcgggacgtggtacgttcttccatcgtcacgcggttatccataaccagagcaacggctcctgctatgtgccgctgatgaatgtccataacgcccaggggcgcttcaatgtatgggattctgtcctgtctgaggaagcggtactggcctttgaatacggctatgcaactacggatccgcgtggtctgactatctgggaagcgcagttcggtgactttgccaacgtggcacaggtggtgattgaccagttcatcagctccggcgaacagaagtggggccggatgtgcggactggtgatgttactgccgcacggctacgaaggccaggggccggagcactccagtgcccgtctggaacgttacctccagctttgcgcggaacagaacatgcaggtctgtgttccgtcaaccccggcacaggtttaccatatgttgcgccgtcaggcactgcgcggtatgcgccgtccgctgattgtcatgtcaccgaaatcactgctgcgtcacccgctggcggtctcttctctggaagaactggccgaaggccgctttgaagcagttatcggcgaagctgatgatctgaatccggcagatgtgaagcgcgttgtgctgtgttccggtaaggtttactacgatttactggagcagcgccgtaagaataatcagacggatgtggcgattatccgtattgaacagctctatccgttcccgcatgaagatatccatgcgattctcgcaccattcagccatgtgaaagattttgtctggtgccaggaagagccgctcaaccagggcgcgtggtactgctgccagcataatttccgtgatgcggttccggcaggtgcggcactgcgttatgcgggccgtccggcatccgcctctccggccgtgggttatacgtctgttcaccagcagcaacaacaagagctggttaatgatgcactgaacgttgaataaattaaggaaaagcaatgagtagcatagaaattctggttcctgatctccccgagtctgttgccgatgccaccgtggcaacctggcacaaaaaaccgggtgacagcgtcgaacgtgatgaagtgctggtggaaattgaaacagacaaagtcgtgctggaagttcctgccagtgattccggtgttctggaagcggtgctggaagaagaaggggcaaccgtcctctccagacaactgctcggacgcatccgtctgggcgacagcaccggtctgcctgcagaaataaaagaaaaagtacagtccacaccggcacagcgtcagaacgccggtctggatgaagaaaccaatgatgcggtaagccctgctgtgcgccgcctgctcgcagagcacggcctgaaagcggcagatattaccggcagtggtgtcggtggtcgtctgacccgtgaagatgttgagaaatatctgtctcagcagccgaaagtgccggcaaaagctgccgctgagccggtttctcaggccggtttaccgcaccgcagtgaaaaacgcgtgccgatgacccgtctgcgcaagcgtgtggcagagcgtctgctggaagcgaaaaacaacaccgcaatgctgaccacctttaacgaggtgagcatgaagccggtgatggatatgcgcaaacagtacggcgaatcttttgaaaaacgccacggtgtgcgcctcggtttcatgtctttctatgtgaaagcggtggttgaggcactgaaacgttatccggaagtgaacgcctctatcgacgggactgatgtggtgtatcacaactatttcgatatcagtattgcggtctccacgccgcgcggtctggtgaccccggtcctgcgtgatgcggatgcgctgagcatggctgaaatcgaaaaacgcattaaagagctggctgtcaaaggtcaggaaggcaaactgacagtggaagacctgaccggcggtaactttaccattaccaatggcggggtattcggttcgctgatgtccacacctatcattaacccgccgcagagtgcgattctggggatgcatgctatcaaagatcgtccgatggcggtaaatggtcaggtagtgatcctgccgatgatgtacctggcgctctcttatgaccaccgtctgattgatggccgtgaatctgtcgggttcctcgtgaccattaaagagatgttagaagatccggcacgtttactgctcgacgtgtaatcaaccctcatccgggcggcatcgcgctaaaaccgcccggctgaactcgcgacagtgaatctgtgtccctgcgccgggaaaccggcgctatccaggcaacaacaataagagagtccgctctcatcagacaaattatggatagaacatcatgaatttacacgagtatcaggcaaaacaactcttcacccggtatggtttacctgcaccggcaggctatgcctgctccacaccccgtgaagcggaagaagcagcatccaaaatcggcagcggcccgtgggtcgtgaaatgtcaggttcatgccgggggccgcgggaaagcgggcggtgtgaaactggttaagagcaaagacgaaattcgcgcgtttgccgaacagtggttaggcaagcgtctggtaacctatcagacagatgcactgggtcagcctgtgcatcaggtgctggtggaaggcgcaacagatatcgccaaagagctttatctgggtgccgtggtggatcgcggctcacgccgcgtggtctttatggcctccactgaaggtggtgtcgaaattgagaaagtggcacatgaaacaccggaactgatccacaaagccgtgattgacccgctgaccggcccgatgccgtatcaggggcgcgagctggcgtttaaactgggcttaacaggtaaattagtcagccagttcaccaaaatctttatggggctggcaaccatgttcctggagcgtgatctggccatggcggaaatcaacccgctggttatcaccactcaggatgagctcatctgcctcgacggcaaattaggcattgacggtaacgccctgtaccgccagccggaactgcgtgaaatgcatgatccgtcacaggaagatgcccgcgaagcacaggccgcgcagtgggaactgaactatgtggcactggacggtaatatcggctgtatggtgaacggtgccggtctggcaatgggcaccatggatatcgtcaaactgcacggcggtgaaccggcaaacttcctcgatgtcggcggcggcgcaaccaaagagcgcgtgacagaagcctttaaaatcattctgtctgacgaaaacgtcaaagcggtcttcgttaatatcttcggcgggattgtccgttgtgacctgattgcggacgggattatcggcgcagttgaggaagtcggtgtcagtgtgccggtggttgtgcgcctggaagggaacaacgcggaactgggtgcggaaaaactggcgaaaagcggtctgaatattattgcggcaaccagcctgacggatgctgcgaaacgtgttgttgcagcagtgggagcgaaataatgtctattttaatcgataagaacaccaaagttatctgtcagggattcacaggtagccaggggactttccactctgaacaggcgattgcgtacggcaccaaaatggtcggcggtgtgacgccgggcaaaggcggtacaacacatttaggtttaccggtctttaacactgtgcgtgacgcagtggaagccaccggtgcgaccgcttctgttatttatgttccggcaccgttctgcaaagactcgattctggaagcgattgatgcaggcatcaaactgattatcaccatcacagaaggcattccgaccctggatatgctgaccgtcaaggtgaaactggatgaagccggtgtgcggatgatcggcccgaactgtccgggtgttatcaccccgggtgagtgcaaaatcgggatcatgccgggacatatccatctgccgggcaaagtggggatcgtttcccgttcaggtacgctgacttatgaagcagtgaaacagacgactgatgccggtctgggacaatccacctgtgtgggtatcggcggtgacccgattccgggttctaactttattgatatcctgcggatgttccagaacgatccgcagacagaagcgattgttatgatcggtgaaatcggcggcagtgcggaagaagaagcggctgcctttatcaaagaccatgtcactaaacctgtcgtggcgtatatcgcgggtgtgactgcgccgaaaggcaaacgtatgggtcatgcgggggcgattatcgcaggcgggaaggggacagcagatgagaaatttgccgcccttgaagccgccggtgtgaagacggtccgcagtctggccgatatcggtgatgcagtaaaagcgattctgaataaataattcctgccattattatacagccgggaccggttccatgccgcttccggctgttttttgatctgaacacaattccgtcatttctgcctgattacgcgcttttactcactgcttcctgttattgctgttgttttaagcaattttcttaattgttctgaaacgcctgctgtatcgtttacacagcaaaaagtctcaggtataaaagggcgttttttatcatcttgatttatacttaatttttgtgccgaaaatgattattgtcgtgcgttaatacaaacagacaataacagttttagtgataatttatttataattgaattatccggctcatgaaattaaccagaattgctgatgaaaataaaaggttaataaaaagcgcatatattattggtatttttctgtcaggttgtatttgtgtgtacattgccttaacaataaagtaactcaattaccatatatgcgattttaattaacactgagaggaaaaattgacataaatcaatctattgcactggcattatttcggtgatttgtttaaattgtggcagatcaaaatagccgaaaatgactacgctgtgcattatttgatatatcctcagaattccaatctgaatcacgcaaaagcggtttattgtgtgcaaatataagcgtactattattagggtgtctatttaggtgtttttttgttactaatttgttattgcatttagaggcatttattgctggtagttatgttgctttctttcttcaggaaagcttgggttgccgcatgtcggtgtcttcctgctaggagcaaggagtcaagatgtttgatattgtcgaactgtcgcgattacagtttgccttaacagcgatgtaccacttcttatttgtaccgctaacattagggatgtccttcatgttagcgatcatggaaacggtatacgtcctgtccggtaaacaaatctataaagatatgacgaagttctggggcaagttatttggtattaacttcgctctgggtgttgctaccggtctgaccatggagttccagttcgggacaaactggtcatactactctcactatgtcggtgatatcttcggtgcgcctctggcaatcgaaggtctgatggcattcttccttgaatccaccttcgtgggtctgttcttcttcggctgggatcgtctcagcaagaaacagcacctgatggtgacctggttcgttgcactcggttccaacttctctgcactgtggatcctggtggcaaacggctggatgcagaacccgattgctgctgacttcaactttgaaaccatgcgtatggagatgctgagcttctccgaactggttctcaacccggttgcacaggttaaatttgtgcacacagtggctgccggctactgtaccggtgcgatcttcgtactgtctatcagtgcgtggtatctgatgaagggccgtgatcttgcatttgcaaaacgctcttttgcgattgcagcaagctttggtatcgccgctgtgttatccgttatcgtgctgggtgatgaatccggttatgaaatgggtgacgtgcagaaaaccaaactcgccgcgattgaaggtgaatggcatacccagcctgcgcctgcatcatttaacgtgattgcgttccctaatcaggaaaaaatggaaaacagttttgcgattgagattccgtacctgatgggtcttatcaccacccgttcaattgatactccggttctcggcctgcgtgacctgatggtgcagcacgaagcccgtatccgtaacggtatggtggcgtatgatctgttacagcagctgcgtggcggtaataccgacccggcagtccgtgatgcctttaatcagagcaaaaaagaccttggttacggcttactgctgaaacgctataccgataacgtcggtcaggcaacggaagagcagattcaggcagcaaccaaagactccattccgcgtgtcgcaccgctgttctgggcattccgcctgatggtggctgccggtggtctgatgctgatcgttctgggtctggcattcctgagtgtactgcgcaatcgtatcggcaagtccaaatggctgctgcgtgctgcattcctcagcctgccgttaccgtgggttggtgttgaagcaggctggttcnnnnccaccctgccgttaccgtggattggtgttgaagcaggctggttcgttgctgaatatggccgtcagccatgggcagtcggtgaagtgttaccgacagcatatgcaacgtcacatctggcagccggagacattctgttctctatggcgctgatttgcggcctgtataccttattcctgattgctgaaatgttcctgatgttcaaatttgcacgtcttggtccaagcagcttaaaaaccggccgttatcatttcgaaacgtccccggcacaagacgctaagtaaacaggagcccacttatgtttgattatgaaatattacggtttgtatggtggatcctgattggcgtactgctgattggcttcactgtaactgatggctttgatatgggcgtgggtgttctgctgcgagttatcggcagaaatgatactgaacgccgtatcatgattaacgcgattgcaccgcactgggacggtaaccaggtatggcttatcaccgcgggtggtgcactgtttgcagcatggccgatggtctatgcggcagcattctccggtttctatatcgcaatgattctggtcctggcggcattattcttccgtccggtcggttttgactatcgttcaaaactggaatcaccaaaatggcgcggtatgtgggactggggtatctttatcggcagtttcgtaccgtcattagtgattggtgtggcattcggtaacctgttacagggtgtaccggttgaagttaactcccagctgcaggtgtcttatgcagggagcttcttcggtctgctgaacccgtacggtctgttagccggtttaatcagcctgatgatgatcgtggcgcacggtgcaacttacctgcagatgcgtaccaccggtgatctgcatgtgcgtgtgcgtaaagccaccactatcactgctctgctgacatttgttctgttcgcagcggccggtgcatggctgatgtggggcggtatcgatggtttccgtgttgtctctgacatcgaccatttcggtgcgtctaacccggttaataaagaagtggtacaggaagcaggcgcatggatggcaaacttcaatgcctatccaatcctgtggatcctgcctgctattggtctggcatcacctctgctggtcgtgatgttcactgcaatggataaaggcgcgtgggcattcctgttcacctcgctgactattgccggtgtgatcctgacctgtggtacagcaatgttcccgttcattatgccttcaagcattgacccgaacgttagtctgaccatgtgggatgcaacttccagcctgtttactctccaggtaatgacggttgttgcgattatctttgtaccacttgttctcctgtacaccatctggtgttacgtgaagatggcagggcgtattgataagtccttcatcgaagagaacaaacatacattgtactaaggagcagacgaatatgtggtattttgcatggatcctcggaacgctcctggcctgtagtattgctgttattgcagcactggctattgagcaccacgaagataaagccgcttcaggcgagtaagacggatgctggataagtcttaccaactactggataagggtcccttacgggcccttgtcctgataatggcgttggggctggcattgagtgtgatctgggatccgtcgcgttttgcggcaaacaccagttcattacagatctggcagggactgctgatgatctgggctgtatgcagcggcgcaattttcggtctggcattccggccgaagcgcgcaatctggaagattctgttccatccgcttccggcggtggtgattctgggttacggcctttatcattttttcagctgatacaaacgtttatgactaaaaagccgttcatctgaacggcttttttcttttctgtttccgctccggttcacggatagcgcagtaatgcggcattatctgcaaaaaagcgggcaaaataatctataaacacccggaccttctgcggcagatgtgcagcgggcggaaataccatattgatgctctgatccggcaccggctgacgggtgaataccggaaccagtttctcctctgtcagctgctcccggatataccagaccggcagcagactgtaaccctgatgtgccagtgtcatggtgcggatcgcctgaatcgaattagagataaacaccctgttgtccggtgcgggcagatgctgacgccagttgatacgggccgtcaggttgctgttggcgataaagggcagagtggcgggatcactgctctccgtcacgcggtgctgccggataaactccggcgttgccacataacagaccggaaaatcagcgagtttgcggaaccgcaggccgctgtcactcagcgttcccagccggaacaccacatcaagtttcagggcaatcaagtcactcagactgtgatcgacacggtaatccgctctgatcagcggatagcgctctgtgaaagcaggcagctgcggcagcagaaattgtccgccgaattctgcagcggcactgaaactcagcggcccctgtggttgcgctgtttccgttctgacggcatccatcgcgttgtcgaactgttgtaacagtggtttgaattgctgatacagcgcctggcctgattctgtcagcgtaaactgccgcgtggtccggtgcagcagtgtggtactgagctcggattccagagctttgatatgcaggctgaccaccgatttgctcagattcaggcgtgcagcggcccgggtaaaggaaccggtatccacaacataaataaaggtattgatcttctcaacggatgtcagcataagattgtttcgttttctcaaacagtattgtctattttgatgcatagacggctgcggtcaactgcttttacactgctggccggaggaaaccatgacttatcgttaccgtatcgccctgatttttttactgggcttttttattgattgcatcaatatctttatgtcggccatcacgctgcctgcgattgcagaggccatgcaggtgtcatccctgtcggtgacctgggtggcaaacagctatattctcggactgacactgattatcccgctcagcccccgtctggcggcccgtttcgggatccgcgaactgatgacggcctcgatgctgctgtttgccgcggcggcagtgctggcaggcagtgcagaatcctttgcttcactgattttctggcgctttttacagggtgtggcaggcggattactgatccccgccgggcagtcactgacttttcagtattttcaggggcgcgagcggagcaaaatctccaccattattatgatgatcgcgctgattgcacccgcactttccccgatggccggggggattattgttgacctggccggatggcggcctgtcttttatgtcaatgcgccggtggcactctttacggcactgctggcctggtgctggatccgtgaaccgaaaaccactgccggagaagcaccggatctcaaagggctgcttctggtcagcctgacgctggcatccctgctgattgccctctcattgtacggggaataccacaatatcaccggcgcacttgcgctgggcgggctgatgctgttcagtgccgggctttattatcgccattaccggcagactccgcaggcgattattgatttatcgctgctgaaaaatacacggctgtggctctcggttgcggtgtattacgcggtaccgggcgtattcaccggggcgaacatcctcgctatcttttatctgaccacggttctcggcctgagtactgcggtgaccggtgcgtttatgctgctgtacgcggcgggtgccatggtggcgatgctgatcagcggcgcagtctataaccggaccggtgccgggcgcctgtttattatcagtctgctgctgcacagcggcggtatcgcgctgtttgccctgacagacagccacaccccgctgtatttcatcggtctgatttatctgctgaccggtaccggcggcggtattgccgcaaactgtgcacaaaccaccgcactgtatgattttcacggaacacagctgaacaaagccagtgtgatctggaatattaaccgccaggtggtgttcagcattggtgctgctgtcatgatgacgctgtatcagaccctgaatgcggttgccccgggacaggcatttgcactgacatttctgggaggcgctctggccgggcttatcccgctgattttcctggtccgcccgcagttccgtacttcactaaaacccgcagaggagattatccgtgagtaatactatgtttcagcaggcgtgtgacgaaatccatcatgtccacgacctgatttttaaaacatttactgtccccggagcagaagggcaggcggcactgtctgagttgctgacccattttacccctgagttttccatgaccggtatcagcggggcagtgattgatctcgcggcggtgacagcgatgtttacccgtatacagggtcagagacagggagcaccgattgaaacggcggagtatcagtgcgtcagcctgacagaaaacaccatatccgtgcgctatcaggagacacagcactttgccggaagcatcacagtacggcgctcactggttattctccgccgggaggataacgggaagtggcggtggcattatttacacgaaacaccgctgtctgcctgaaatagcgccggtggcgttttcagccggtaaatgcggatggaaatcctgtttttataagataaaaataaggtgatttaatttatgtaattacaataagttagattacgcggtaaataaatcggtagcacaaaaatccggataattccggatttttgcgtattcatggggaaaaatgtcttttaataagtgtttaatgatagctttcagagcaaaaaataacgcccctaaggtgttgtaatacgtaacaaaatattttttcatctcaacccttccgggggcttgcgtgttggataaaggcgagtatgattagcgcgcggacaaacgggcttttcttatctttacgaactaagcattttcaatacgtttgctcttcacgtatagtttgcaaagcatgttgtctgataaaggtaagttgcgggatattcaatgttcagttggccaatacgggtttattacgaagataccgatgctggtggtgtggtataccacgggcagtatcttgcattttttgagcgcgccagaaccgaaatgttacgggaacggggctttcatcagcagcgtctgctggaagagcagctcggctttgtggtccgcaaattaactatcgattaccaccatccggcaaggttagacgatctgttagaggtacgcagtgagatcaccgacatccgtcgtgcgtctctgacatttacgcagacacttatgcataaaaacggaactcttttatgtcgcgcagaggtattggtcgcctgcgtgaatatttctttaatgaagccggtagcgcttcctgagtctattgtcgcggagtttaagcagtgactgacatgaatatctgggatttattcctgaaagcaagttacctcgtgcaatttatcatgctggtattgctgggcttttctgttgcctcgtgggccattattattcagcgcaccaaagtcctgaatgcggccacccgtgaagcagaagcgtttgaagacaaattctggtcaggaatcgaactgtcccgtctgtataaagaaagccaggcccgccgtgatgaactgagcggtactgagcagatcttctactccggctttaaagaatttgcccgcctgcatcaggcgaatgtgcactctccgcaggcggtggaaaccggtgcggcgcgtgcaatgcgcatctccatgaaccgtgagatggaaaatctggaaaaccacatcccgttccttggtactgtcggttctatcagcccgtatatcggtctgtttggtacagtatgggggatcatgcacgcctttatcgcactgggtgcggtaaaacaggcaacattacagatggtggcgccgggtattgcggaagcactgattgcaacagcaatcggtctgtttgcggcaattcctgcggttatggcatacaaccgtcttaatcagcgcgtgaataaattagaacagaattacgacaacttcagcgaagaatttctggcgattttacaccgtcaggcctttgctactgctgataagaaataaggcaggagattatcatggcacgtcatcgcggacgccggcgggagctgaaatccgaaattaacattgttcctttactggacgtgttactcgtgttgctgctgatcttcatggcaacagcgccgatcatcagtcagagtgtggaagtggatctgccggatgcctccgattcacaatccgtttccaccaatgataatccgccggtgattctggaagtctccggtgtcggccgctacaccctggtggtgaagcaggatcgtctggaactgctgccggaagagcagatcattgctgcggcaaaacagtatctggctgaagatccgaagactattttcctggtcggcggtgccaaagatgtgccttacgaagagattattaatggcctgaatattctgaaacaggccggagtgaaatctgtgggcctgatgacgaagccgatgtaaggtttgttatgcagatgttttcactcagaaggttagggaattaagcgtgggaaagctgaaagagcgtaaagataaattaaatcgttctgtcatcacctctgtggtgttgcatcttttgctgattgcgcttgtgatctggggatcgtttgtaaccaagtcagggctgaccggcggcggtgagggcggtcaggtgatcgacgccattatggttgatccgaacgccatggttgaaaattttaaccagcagcaacagcagcaggccaacgcaaaacaggctcaggcgcagcgcgagaaaaaagcgaagcagcaggaagaagaattacgtcagaaagaactgcgtgagcaggagcgcttaaaagcgattgaagaagagcgcctgaagaccgaacaaaaagtagaagatcagaaaaaacaggctgaagagcagcaaaaacaagctcaggaagccgtgaagaaagccaaagaagagcagaagctggcggaagaagccgccgccaaagctcaggctgaaaaagaaaaagtaattaaagagcaggcactggcgaagaaacaggctgacgaaaaagccgccgcacagaaagccgctgaagaagaaaaagccaaagccgaaaaagcggctcaggaaaaagctgccaaggctgaagccgctaaagcggaagctgccaaagcagaagccgcaaaagctgaaaaagctgccaaagacaaagcagctaaagaaaaggcagccaaagccgcagcgaaaaaacaggccagtgaagtcgatgacctcctcggcggactggcgtccaacgctccgggtacagaaagcggcggtgcatccgcagccggtcagggcggtggcaagaagagcggaacaaactcggatggcgatatgaacggttatatcgcacaggtccggttagcgattcaggcgaagttctataatgcggatatgtaccgcggtaaaacctgtacgctggaaattaatatcactgataaaggtacgcttatcagtgtgaatgcggtcggtggtgatgacggtttatgtcaggccgcactcgcggcggccaaacaggctcgtattcctgcgccgccgagcaaatcggtctggcagcagtttaagaataccaaactggactttaagccggaataagctgtaatacagcgtgacgaaccagatatatccgggtgttagtttttactgtggtatctggttttggttatgaacgtttgttaaaatacgggtttgatgcgggcattggcgcaacgagggagagagaatgaagcaggcagttaaatacatgctcggttttctgatgctgtgggcggcagttgctcaggctgaagttcgtatcgagattactcagggtgttgattcagcacgtcctatcggcattgtacctttccaggtcgtcggcggcggcgctgtaccggaagaagtcggcgcgatcattgctgctgacctgcgtaacagcgggaaatttaacccgatcgaccctaaccgtatgccgcagttaccgggtaccgcatctgaagtggttcctgagtcctggacggcgttaggcattgatgctgttgttgtcggccaggttcagccgggtgctgacggcaactatctggtgagctaccaactggtggatacctctggttccccgggcagcgtgcttgcacagaaccagtttaaagtcaccaaacagtggctgcgttatgcggcacacactgccagtgatgaagtgtttgagaaattaaccggtattcgtggcgcattccgcacacggatcgcttatgtggtggttaaaaacagcggtgactatcgtcacgagctgcgcgtgtctgattatgacggctacaaccagttcaccgttcaccgttcacctgagccgctgatgtcaccggcatggtcaccggatggcgagaaactggcgtatgttacctttgagagcggaagttcagccctggttattcagaatctgtccagcggacaggtgcgtcaggttgcttcattcccgcgtcacaacggtgcaccggcattttcaccggacggaaccaaactggcatttgcgttatcaaaaaccggtagtctgaatctgtatgtgatggatctcggctcaggccagatgcgtcaggtaacagatggtcgcagtaataacaccgaaccttcatggttcccggacagccagacgttagcgttcacgtctgaccaggctggtcgtccgcagatctataaggttggtattaatggcggtgcgcctgagcgcctgacgtgggatgggactcagaaccagaatggtgacgtcagtgctgacggcagtttcctggtaatggtcagttcaggcggcgggaaacagcatatcgccaaacaagatctagtagcgaacaatttccagattttaacggatacgttcctagatgaaacgccaagtatcgcacctaacggcactatggttatttatagctcctcacaaggtatgggaactatattgcagctggtttcgaccgacgggcgtttcaaagcgcgtcttccggcgactgacggacaggtaaaattccctgcctggtcgccgtatctgtgatgcattaaaaatatgtatggcaaattataaaaggatcaaagagatgcaacttaacaaagtgcttaaagggctgatgttagctttacctgttctggctgttgctgcatgtagttctaacaaaaacgaccaggcggatgcgggcactgtcgacaatggcgcaaacgccggtatgtctgcggaagaactggcacgccagcagctgcaggaacttcagaacaacaatatcgtatacttcggtttcgacaaatacgatatctctcctgaattccagcaaatgctggatgcacacgctgcattcctgcgcaacaacccttcttacaaagtaactgtagaaggtcatgctgacgaacgtggtactccagagtacaacatcgcactgggcgagcgtcgtgctaacgcagcgaaaatgtacctgcagggtaaaggcgttaacggcgaacaaatctctatcgtttcttacggtaaagagaagccggcagttctgggtcacaccgaagctgactacgctaaaaaccgtcgtgctgtaatcgtatactaagagatatacatgaaaagtaacttcagacgcctgatggtgagtctgtcgttattgataggtgtagcggccccctgggccgctattgctcaggcacccatcatcaatatcggctcaggctccactgatgaccgcctcatgcagctcgagcgtatttctaacgctcatggtcagctattaacccaacttcagcaacaagtcatggacaaccagcgcgatatcgacatgctgcgcgggcaaatccaggaaagtcagtaccagctgaatcagttgacagaacgccaacgcgaacttttctcacaggtggattccctcaccggtggcggcagcgcatcaacagataatacatccgcggcatccggtaatacggactctgcgggtactgccgcaacctccgctcctgctgctgcaagtaagggcaatgagaaagatgactataacgccgcggtaaacatggcgatgaacaccaaagattacgatggtgcaatcagcgcatttcagagttttatccaaagctatccgaagtccggttatcttcctaatgccaattactggttaggtcagatgaactacaacaaaggcaaaaaagatgacgctgcggcgtattttgcttctgtggtaaagaactggccgaaatcccagaaagcaggagagtccttctataaagtcgggctgatcatgcaggagaaaggggataaagcgaaagcgaaagcgatttatcagcaggttgtcgcaaaatatccgggctctgccggtgcgaaactggctgagaaaaaactggctggtttataaccgccggtttatttttttgctcagagtatagccccgaccggagagttttttgctcaaccggggctaagtgagtgaattataagcgtttgaataagttaatttgaaaaaatcgttgcaccggccggataaatcagtattatatcgtgccgttggcaagagagtacgggtcgttagctcagttggtannnnnnnnnnnnnnnnnnnnnnnnnnnnnnnnnnntcttttgcccgaaatctgaaacgggtcgttagctcagttggtannnnnnnnnnnnnnnnnnnnnnnnnnnnnnnnnnnnnnnnnnnnnnnnnnnnnnnnnnnnnnnnnnnnnnnnnnnnnnnnnnnnnnnnnnnnnnnnntcagagtccctcagcagtattacgatgggtcgttagctcagttggtnnnnnnnnnnnnnnnnnnnnnnnnnnnnnnnngtaaccattttccctctgatttttgttctccccggcatcacaccggagatcacccgtttgttattattcattctccggcgcaagtaaatcatcggcattcagccggtcagtgaccagtgcaataattttatctgccagcgttatatcgatatcaaatttctgtgtttcaatcacgcggagtgccacatcgcggtagagtgccagcatcgccatatgcgcccgtgcggcacggacacgatcacggttatccagtgtcgccataaaacgcccgtacaggcccggaggcagccaggtgctcagatgacgccctgcataccagacatcctgcgtaccgtcgctgcgcagcagcacatgccactccagcagggtgatcagccactgtttcatggcggtatctttcagccgggtagtccagagttcattgcgcagataataaaccggcacctgtgaggcttccagccagaagttctgccagttttccaggaacgtctgctgatccggcggagtgagcacggcagccggatcggcatattcaggcaacccggcagtgagaccggttttatccagcagaacggcataaccgcgctgatagatgctgtccagcccgtgtgcggccatctgtgtgatacgttcgcgcccggccagcacaaaatcgactttacggcctttctcatacagaacctgacaagacggccagcagaggctgtcgtcttcgcgtgaagccgctttgcggataatcagcggcacaccaaaccggttcagccagcggctgtcctgaaacaactcatcatgactgctgccgatcagttcggcattaatatccgaaaaacggtctgcctggttctggcgtgccacagagccggtgataatgaccgcatcgatacggggatctaatagggcaaaagaaattatattgtttataatttgctcaattgattccattttacatctcattcatataattgatagctgggctgatagtacgtcataatcaaaaatagcgggagagttcaggttaaaaaaacgttatcatgtttagcatattaaacaaatgctgttacgatgggatgattttactgaaaacagcagggcaggatacagttaactaaacctgtcatcagtggctggccgccggtgacaggaaatatacttaacacaggtgacggaatggaattttttgatattaataatattctcgtggtgatcccctactggaaagaagggtcttatgcgctgtcctggattgaagcagtaggcgcaaccgccgggttgttatgtatctggctggcaagcctggaaaaaacaatcaattatctgtttggcctgattaacgtcacgctgtttgcggtgattttctttcagatccagctctatgccaatctgctgctgcagattttcttcttcgccgccaatatttacggctggtatgcctggagcagacaaaatgataaagcggaagcggagctgaaaatccgctggatgccgctgcggcagacggcagtcattgcggcggtttctctggcggcgattttactgctggcgcgatttatcgacccggtctttacgtggctggcgcagagtatggtcagcatgctgaacgccgcaggggctgatctggcaatgccggtattgctgcccgatgctttcccgttctgggatgcggccatgacggtgctgtctgtggtggcgatgatcctgatgacccgcaaactggtggaaaactggctgttgtgggtggttatcaatatgatcagtattgtgatttatgctcttcagggcgtgtacgcgctgtcgctggaatatatcatcctgctgggtgtggcgctcaacggttcgcggatgtggataaaagcagcgaagcagccgtaaaactattttcagtgcaataaccgggtgattataatgagagtccggtaataaccggattctcattaatcagcaataaaaggaaacgcctgtggccggtggcagcttactcgcactactcgatgatattgcaaccgtactggatgatgtctctgtgatgaccaaaatggccgccaaaaagacatccggtgtactgggggatgacctggcgctgaatgctcaacaggtggccggtgtccgcgctgagcgggagatcccggtggtctgggcggtggcgaaaggctcctttcttaataaactgattctggtgccgctcgcactgctgatcaatgcctttgctccctgggctgtcacgccgctcctgatggtcggcggggcgtttctgtgttttgagggggcggaaaaactggcgcataagtttctgcataaagccggtgatgagcccggagaaacggcaccggcggacgatcttcagacaccggaagagttggccgcattcgagaaacgcaaagtcaaaggcgctatccgcaccgattttgtattatcggcggagattattgctatcaccctcggtattgttgccacctctccctttattaatcagctcgtggtactgtcagtgattgctgtcattatgactatcggggtatacggtctggtggcggggattgtcaaactcgatgatctgggattttacctgcagaagaaatcagccgcgctgctgaaaaaactgggtgacgggctgatccacgccacgccgtatttaatgaaaaccttatcagtcgtcgggactgcggccatgtttatggtcggcggcggcattctgacacacggcattccgtttattcataacctgattgaaaatctggctcagcagagtgcacaactcccggcactcggcagcatattgcactttatgaccccgccggttgccaatttattgttcgggctcgtcgccggtctggtgattgttgcgctgattaccgctgttaagcgtattaaaacgggattagcggcataaatacccttctcacgggcagcggctgatgaagccgctgttttccttctgattcataataatttgtcctgttgatctgaatattttcggggtgaaaaattaatttcaattccggcggcagctaattgtttacagcttgttgacaagcagttagattaaaataacgacaataatgaaacgggacaccggaagagacgggttatgaattatcagaacgatgatgtaaaaataaaagaaattcgggaattattaccgccagtggcgttattagagtcatttcccgcgactgagactgccgcagacaccgttcgccgcacccgtcatgcaatccacgaaatcctggaaggccgggatgaccgcctgctggtcgttatcgggccatgctcaattcacgacccgaaagcggcggttgaatatgcggatcgcctgctgacattacgcaaagaactgaaaggtgagctggaaatcgtcatgcgcgtctattttgaaaaaccgcgcaccacggtcggctggaaagggctgatcaacgatccgcaccttgaccactctttcgccatcaatgatggtctgcgtattgcccgcaaactgctgctggatatcaatgataaaggcttaccggcagccggtgagttcctggatatgatcactccgcagtatctggcggatctgatgagctggggtgctatcggcgcccgcaccacggaatctcaggtacaccgtgagctggcctccgggttgtcctgcccggtcgggtttaaaaacggcacagacggtaccatcaaagtcgccattgatgccattaacgccgccgggtcgccgcactgttttctgtccgtgaccaagtggggacattcggccatcgtgaacaccaccggtaacggtgactgccatattattctgcgtggcggtaaaaaaccgaactacagcgcggaagatgtcagtgcggtaaaagaagggctggcacaggccggtctggcaccgcgtatcatgatcgatttcagccacgcgaacagcagcaaacagtacaagcgtcagatggacgtgagcaccgatgtggcacagcaggtcgccggtggtgagaaagccattatgggcgtgatggtggaaagccaccttgaggaagggaaccagaacctggaaggtgatgcaccgctcgtgtacggcaagagcgtgacagatgcctgcatcggctggggagataccgaaaccctgctgcgtcagctggcagatgcggtaaaagcccgccgcggctgatagaccagaaccccggttcacagaaaataaaaaaccctgacatagtcagggttttttaccaaagaaggcggattacttcgctttaccctggttagcaacagcagcggctttggcagcaatcgcatcctggtcgcccaggtaatagcggcgcagcggcttcatgttttcatcaaactcatacaccagcggcacagcagtcgggatgttcagctcgaggatttcatcttcgctcatgttatccaggtatttcaccagtgcacgcagggagttaccgtgtgcagcgatgatcactttctcaccggaagcaacgcgtggtttgataacatcagtccagtaaggcacaacgcggtcgatagtgatcgccaggctctcagtggcaggcagttcgctttctgccnnnnnnnnnnnnnnnnnnnnnnnnnnaatggcaaaaccgcgacgccacagtttgacctgctcgtcaccgtattttgcagcggtttccgctttatccagaccctggagtgcgccgtaatgacgttcgttcagtttccagcttttctcaaccggcagccactgctggtttacctgatccaggatattccacagtgtgtgaatagcgcgtttcagtacagaggtataggcgaaatcaaaagagaagccttcttttttgagtaactgaccagcctcttgtgcttcagcacggcctttttcagataactcaacatcagtccagccggtaaagcggttctctttgttccactcactttcaccgtgacgtacaagcaccagtttagttactgccatagcgtaaactcctgttgtgtttcagatagggggtttcagaattgaaacagacccggcacattgcccattatattggtcaccggcgcctttcggcaaactttccgcacaggtatttccgccggggcctgtgcggaagagatcaattccgtcctgtttaccggatagtgtataccaaaactgaatcgattccgctataaatgtttacgcaaagtgtgatacacaggaaaaaacggttttttacgctaccttaaacggccaggtaaaaaacagcagatggcagaggttcagcgcgaagtgaaaccctgtcgccacccacagccgtccgctccacatccaggccagcccgtagataactcctgccagaccggcaaagacaaccagcagcgctcctccggcaatatgtgccaggccgaagacagcggctgcaataaacagcgcggcatacggcggcagataccgggaaagcacctgctgaatagccccccggaacagcgcttcctctgcgagggagacaaaaaacagattcgccagcataaacgccggcagccagtgcggcagatgcggttcaaaccccagtccgccaagggcggttgccagtaacagcagtgcgggtacggagaaagccagtaacagccagtgcaggcgggtggcccggcgcagcggcgcggtgacaaacagctgcggaatgatgatgatcagcacaaacggaagcagtgctttatcggcattaaaccagaaagaatagggcggactgtgcggcccggcagcctccggcggcatccagcgcaggttgtggaatcccggcagcaggtgaaaagccagacccagcacgacggtgatcaccagtagtgtcagcagtacacgctgccatgagcgtggtgcggtataaggccgtgcgacagccagcaggatagcaaaccacagggtgagcagggcatgccagtccatcacaccggtaaacagggcgctgatggtggcagccagaagtgttgccagtgacagtgtccggtgaaattgtaataacagcagcgataatgcaagtaaaagccaggtcatggaattgtgtcagagaatcagaaaaggagtgagcagggtaaaagagaagtcagtgatgcgccagtaaaaaaagcagactgataatgatttttaatcagattattcttaataacggactgaatacattcagaaaataacggctgtttccggtgcagtaaaaaagtaaaacagccgtttgataaaaagattacaacgtattgatttcgtaacgataactaccgttatcaggaataaacgccagccgccggttaatgcaggccggagtatcttcgctgtgatggctgacaaacagcagctgagtatcaccacggcttatcataatatcgataaaacgcagtaccagcagacggttgagtgtatccagcccctgtaaaggctcatcgaggatcagcattgcagggtgttttaccagagccctggcaatcagtatcagccgctgctgcccccacgacaggctgtggaacggagcatcgcggtacgctttcagcccgagcagcgccagccactcatccgccagttttacctgccggtctgacggtttctgatagagcccgacagaatcgaaataaccggaaatcagcgtgttacgcacactgatattgacgcggtaactgaggtggatgctgttactgacatacccgatatggcgtttgatatcccacaccgtttcaccgctgccccggcggcggccgaacagcgtcaggtcattgctgtaaccctgcggatggtcaccggtgatcagactgagcagtgtggatttacccgcgccgttctcgccggtgatttgccagtgctcaccgggcagcacctgccaggtcagatcattgagaataggcttatcgttatagctgacacagccgtgattgaggatcacccgcggaatatccggcgcaaggcgttctgcggacgggtcatcccgctccggcagcgtcagatgctctgtctgctcactacgggccagctgtgcctgtaacagtgcggataaggtatccgccggtgccagtacacagtctgtcagcagcccggcgcgggtgataaagtccggaatatcactgaaacggttgaggatcagaacaaccgtcagtccgccgtctgcaagctctgccagcatctcactgagcatacggcgggaatcggtatccagcccgtcataaggctcatccagcaccagcagatcaggctctgtcatcagcgcctgacacagtagagttttgcgggtttcaccggtggaaaggtatttaaaacggcgtgacaggcgatcagaaatcccgaactgtgccgccagctgcaggcagcgttcattatcgcggtgttctgcctgaataatctcagcggtggtacggccgttgtcggtgtcatcgccgtccatcaggtcggtattattgcggttccactcttcatcaatcagcgcctgtaatttctcaaacgcgaccagaaccggacggcggaaagtattgctcatctctccggaaagcagcggaagctcctgaatcagcgcacgggcaagggccgattttccgctgccgttggtgccgataaaggcgtggtgctggccgctttccagctgtaatgacggaacagaaagctgtttgtccgcgcttaaccggaagaccccttgtgtgatgtgcagatgtgccatagtgaacagccttattattagtttaattattccccagaaataagcggaaccggcggggatgtcaagatatggcaccggtgttacatcccgtatcatgaaaagaagatctgcttcacagaaacgtcatcattcagtctgctgtttttgttatactttttggtacagaaatcacggcatcacggaaattaaccgaaagagagggcagggtgagaacaggattaaaatattcggtgctggcattactgatcagcggaacggtcaacgccgcaacggtggatctgcgggtgatggaaacctcggatattcacagtaacttaattgactttgattatttcaaagacaaaccgacagagcagtttggtctggtccgcaccgccggtttaattaaagcggcaaaaggtgaagccaccaacgcagtattagtggataacggggatttaattcagggcagcccgctggccgattatatggtcagtaaagggttaaatgacggtgaagcccatccggcacataagctgatgaataccatgggttatactgtcggaaacttcggtaaccatgaatttaactttggcctggattatctgaaaaaagccattgccggtgcggattttccgtatgtgaatgccaatattattgacgagaaaaccggtaagaatctgtttacgccttatattatcgttgataccaaggttaaagatcgcgacggtaaagagcatgtaattaaaatcggttatatcggttttgtaccaccgcagatccttatctgggataaagcgaatctggaaggaaaagtccgcgtcaatgatattacggaaaccgcgaaaaaatttgtgccgcaaatgaaagcagaaggtgcggatttaattgtcgctattccgcactccggtttttctcaggagccgtataaagccatggctgagaactcggtttattatctcagtgaagtaccgggtattaatgccattatgttcggtcactcgcacggcgtattcccgggcaaagattttgcggatatcaaaggcgttaatattgaacagggaaccgttaacggtattccggctgtgatgcccggccagtggggggatcacctcggcgtggtggatctggtgctgaataatgatgacggcgcgtggaaagtggcggatgccaaagcacaggcgcgtccgatttatgacaaagtcaataaaaagccgttggtggcgcgggatgacaagctggcttctgtaattgatgagcagcacaatgcgacccggacctttgtcggcaagctgattggtaaatcaccggataatatgtacagctacctcgcgctgttgcagagcgacccgactgttcagattgtgaataatgcgcagactgattatacccgccgctttattcagggcgatccggatctggcggatttaccggtgctgtcagcggctgcgccgtttaaagtgggcggacgcaaaaatgccccggcggattttgtcgaggtggaaaaaggggatatgacgttccgcaatgcggcggatctctatctttatccgaatacgctggtggtggtgaaagcgaccggtgcggaagtgaccgaatggctggagtgctctgccgggatgttcaatcagattaacccgcagtcagaggcaccgcagagcctggtcaactgggatggtttcagaacctataatttcgataccatttccgggatcaactatcagatagacctgacacaaccggcaaaatatgatgtggagtgccagacagtcaatccgcaggccaaccgtatcaaaaatgtgacttatcagggaaaaccgattgatccgaaagccgttttcctggtcgcgaccaataactaccgtgcttacggcggaaaatttgccggtaccggtgacaaacatattgcgtttgcatcaccggatgaaaaccgcagtgtgctggcgggttatatcgcggcagaaaccaaaacgaaaggtgcggtatcagcacaggctgagcaaaactggacgtttgtgccggtgaaaacggataagaaattagatatccgctttgaaacgtcaccgggcgataaagccacacagtttattaaagaaaatgcccattacccaatgacccgggtcgggacggatgatgtgggttttgcggtttatcaggttgatttaacagcgaagtaagcagttactcacgaaagccgccgtcagcggcggcttttatcatcatttttatcagcacaatgtggcaataatcacctggtccgcattaaacagcgcggtgacgtcatcaccttctttcagttgctgcctgtcggcatcctgattatccagggtggagcataattgtgcgccgccggtcagtgtcaccatcacctcgctgttttccgcacctctggcaacggaacagatacgtccgctcagacggttgtcataatccgtgctgttttctgcggatttgctgattttcacccacggcgctttaatcagagtaagtacttctttaccgactgataagcccagccggttggcactctgttccgtcagggcaacggcaagttcggtctttttatccgccagcaggacattcacatgctgctgcacatgagaatggttgcgcgacataattgtgccgaagaactggttacgggcactggtctgcaatgagaagcgggagatggccgccagcaggctgtcgaggggcagcgaatcatccttaagaacatcaaaggctttctgctggatctgtgccagcagatcataaagctgaagtaagcgctcaccatagcgtgtcagtgtcgcgccgccgccgcctttgccgccggtggcccggtcaacaatggtttcctcggcaagctggttcatctcattgatggcatcccaggcgcttttgtaactgattccggccagttttgccccctgactgatggagccggtggctctgacctgtttgagtaaggaaatccgccgcggatcggcaaataaatgaccttctgatttcagtgttaataaaatatccaacggaaaataccccgtatattaatcagacagaatcaccggcgcagtctctccgcccggtgcggctttactttccggttagtgtagcaaactgcgtttttttttcatctgccaatatggcgggtttagtttacttaaaaattcatgaacntttaagtttacttaaaaattcatgaaccggataaaaacaggtatggtataggaattgattatcagccagagattatttcatgcagaatgtattatttcgtcttcatcaggcagtcaaggattccccggaaccggaaggggctgaaacagaagaatttgcccgtatgctggcagaacagccattctgggctgaatcacaggatcatgaaagtggcggacaaattggtctggcattcactcagggggaagatgatgaagaacctctgctgctcgtttatatgcgtgatgatggcggtcatgaagcacctgcaaaaatcgcggaagaaatggcatccggtgagcgggaatatacctggctgccgggcgcgtttttactgggactgagcaggaaaattgatttcacactgtgcatcatcggtgaggatgggcaaaccctgccactgaacagccagtttatgaaaatgatgtttctctatattcaggagctttaccgcgaagacgatgaaggtgaaacaccggtacaatccccggctgcccctgtctcaccacgcagcagtattgtggaaaaacccggcagtgccggaaaagtgataggttttctgattctggcggcggctattgtggcggttgtttactttatgcagacctgacagcacgaatcgccatgctttccggggtgtgatttatatagaatagcggccattatgacgctattatagtcatgctgaatatccttttcgcctgatataaagagattaagtgctatgtttgagttagttaaaagtttaggtttcgcactgttaatggttcctgttgttatgacaggcctggcggctctgatctggggattaggtgaaattttcaacctgatttcaaaaggcgagcgccgcgaaaagcagctctgattataccgtattcaggattacctgcgttcgcgggtaatccgtctttgcttctgttttcccgctcattatctgcgtaattcccctcattttatattgttttccgcttaactgccgatagtgggataaacctcctttcatttttcgctgtatcttgttatatacaacgggttaatcctaatctatcctggtggaaaaaatgaaaaaacagttcagtaagttattggccggtgttgttatctctgctgctgtcatgggtcaggcatgggccgctgaaaaagtgaccgtatttgctgcggcatcactgacaaatgcggttgatgaaatctcggcaaaatataagcaggagaaaaaaggcgaagtggtcgcgtcttatgcgtcttcttccaccctggcccgtcagattgaaaatggtgctccggcagatatctttatttctgctgaccagaaatggatggattatgctcaggagaaaaacctgatcatcaatgacacccgtaaaaccctgctgggtaatgagttggtgctgattgccgcgaaagacagcaaaattgataaagttgatattaataagcagaccgactgggttaaattactggatggcggccgtctggctgtcggcgatcctgatcatgtgccggttggtatctatgcacaggaagccctggaaaatctgggtgcctggaaagtcgttgatccgatgctggcccgcaccaataatgtgcgcagcggcatggcgctggtggaacgcggtgaagcgccgctgggtatcgtgtacggctctgatgcggttgccagtgataaagtgaaagtggtcggtattttcccggcagatacccataaaccggttgaatatccgattgctatcctgaaagatcgcaataatgccgatgttaaaggtttctatgattacctgcagacaccggaagcaaaagagatcttcaaacgttacggtttcagccctctgtaataagtaaggactaacagacagcgatgttgaatgagtatgaatggcaggcggtcatcctcagcctgaaagtatcaacggtcgccgtggcagccagtctgccgttcggcatactgatggcatgggtactggtgcgctgccgttttccgggcaagtcgctgctggacagtcttatccacttaccactggtgttaccgccggtggtagtgggttatctgctgctgatcagcatggggcgcaaaggcattatcggtgagtggctctataactggttcggcttcagttttaccttcagctggcgcggtgccgcgctggctgcggctgtggtggctttttcgctgatggtacgggctatccgtctggcactggaagcagtggatatgcgcctggagcaggcggcacggacactcggggcttccccgctgcgggtctttttcaccatcacactgccgctgtcgctgccggggattattgtcggtaccgtgctggcatttgcccgttcgctgggggaattcggcgcgacaatcacctttgtttccaatattccgggggaaacccggactatcccgctggccatgtactccctgcttgaaacgccgggggcggaaatggacgcagcgcggctctgtattatcgccattgttctggcactggcttcactgctggcctcggaatggctgacccgctggggacgcaaacgcctgggggttgccacatgttagtacttgattttgaacagcagctcggtgatttatccatggtgatcaataccgaactggccagtgaccgtattaccgctgtcttcgggctctccggggcagggaaaacctcctttatcaatgtgatcggcgggctgacaaagccgcagaaagggcggattgagcttaacggtcacacactcgtcaatattgaaaaacgtatctgtctgccgccggaaaaacgtaaaatcggctatgtcttccaggatgcacgcctgtttcctcattaccggataagaggcaacctgcgctacggtatggcacgggaaatggaagatcagtttgacagtattgtggaactgctgggtatcgggcatctgctgaaccgcctgccaatgaccctctccggcggggagaaacagcgggtggcgattggccgcgcgctgctgactgcgccggatattctgctgatggatgaaccgctggcgtctctggatctgccgcgtaaacgcgaactgctgccgtatctggaaaagatggcacaggatatcagtattccgatcctgtatgtcagccacagcctggatgaaatcctgcggctggcggaagatgtggtgatcctggaaaaaggccgcattctggcacaggggccgctggaagaggtatgggccggagcggcattacgcccgtggctgacacaggaaagtctctcaagtgtactgagtgtcacggtgcttgagcaccatgaccgctatgccatgacggccaccgctatcggtgaccaggtgctgtgggtaccgcgtatcgccggtgaacgggacacgccggtacgtgtgcgtgtcagtgcggatgatgtgtccattgcactggaaaaaccgaaaagcagcagtatccgcaatatattacgggcgaaaatcacggaaatgtatgatgacgacaacgggcagacggatgtacgtctggcggtcggcaatcatttcctctgggcacgtattaccggctgggcgcgggatgatttgcagctgaaacccggacaatgggtgtatgcccaggtaaaaagcgtgtcgctgagccgcgaattataatttatctgaatatacgtacttttcattaataaaaggggcattcatattattctgattgcccttctgaatcaccggcgatatatattaacgccggtgcatcactgaccctgccgaattatcacagaatattctccgcacacggaaacaagtgtaagacgtgcgttattgcattaaaaaccactgagtcagagggataaaatgaaaaaagcatttctctttttattactgggtattttctccggcggtcaggcgctggcggcaaatcaggtgatgtgctacacctatctgaaaaaagtcaaagatgttgaaatcgaaaatttaaaagtctggtgcatcggcaccactgacggttctcagggcggaatgcgtatcccggatctgctcagtatgggatataaagtggtggcaacagaaagctttccgtatcagtattctgaaggtggttatacctacgacggctcgaaattactgctgatcgtcgaaaatgcaaaattcccgaatcagaatccggcagaaaaaccaaaaaataactggaattttgataagtataaataacggatgttattcgcaggtcagcggaaaacagatcataataaaaacgcctttattaaaaggcgttttttatagttcagaatacggtattgatcagctgagaatatgacggcggattgcctgtgcaatacccggctgtgtattatccgggataatcaggtcagcgtgtgctttgacttcgtctgccgcattacccattgccactccgagaccggcggctgaaagcatgctgatgtcattatggttatcaccaaatgccatcacatctttcatcgtcattccctgagattccacccattcctgtaaacggcggcctttgctgttacctttgcgggcaatatccacctggtttatccacgaccactcgcaggacagtcccatatccgcttccacagcgtcggtaaattcacgcagtttgttcagatcatctgagcaggtggcgaatttccagatagtgtcagcgcgatcaacctcatcaagaaaattattcactttgcgcatcaccggacgctggtgctccggcagagaagctgaccagttcagtgtccgctcaatagtgctgctgtcagtgtgataaagcatggcatccgagatatacatcagatgctcgatatccgtctgtgccaggcgttcgagcaactgacgggattcactgacactcatcggatcggcggaaagcacttttttccccggataatcgtacagataggtaccgttacagcagatagccggtgtatccagctgcaatgtctgataaaacggatgaatagcaacgtgatgacggccggtgacaatcagcacctgcaccccggcacgacgggcttcgcggatggcatccagcgactcctgcaatatatgtttatccggatcgagaagtgtaccatcgagatcaaatgcgaggacgcggtaagacataacagggagccccttgtatgagtgtcagaaccggaataacggcgggcatcagggaatattattgtatcctgacggcatcctgaatgattccgggcggagataactgataatatagcatgttaattgtttcgcgataaacgctaagtgcggtattattatacagaaatgcttacattacctgttaaaaatcaaacgggtaagtgatgatattaaggagcgcgaatgaagcaggtggtttatgttgccagtacggaaagtcatcagattcatgtctggcagatgaatgaacacggtgagatgtcactgttacagacagtatcaacgcctgatcaggtgcagccgctgatcaccgcgccggatggccgtcatctttatgctgcggtcaaaccgggcaatgcggtggcgacttataaaatcgcggaagacggcaaactcacacaaaccggcctgacgccgctcccgggcactgccgcctatatcacccttgataaagcggggcgcacactgtacgccgcttcttatcatcagggaaatctggcggtactgccgatccgcgataacggtattcccgtccgtgcagtgcaggtgattgagggattaaaaaatccgcattccgccaatattgcgcaggatggacacacactgtttgtgccgtgcctcggggaagatcacatccgcgcttacacgattgaggaagacggacgcttaactgaacgtcacgccgatatgctgacggttgctgccggtgccgggccgcgccatatggcgtttcatccggcaaaacatgtggcgtattgcctgaatgaattaaatgcgaccattaatgtttaccgcgaatgggttaaagtccgtgaaattcagtcagtggatatgatggcggatgattattcaggccgccgctgggcagccgatattcatatcacgccggacgggcgtcatctctatgcctgtgaacgggcatcaagcgtgattaatcactaccgggtgtcggatgacggcggtcatctgcaactggcggggcgttatccgactgaaactcagccgcgcggttttgcggtggataacagcgggcgtttcctgatctcaaccggacagctctctcaccatgtggcggtttccctgattgatgcgattaccggcgaactgcactttatcaaccgctatccggcaggaaaagggccgatgtgggtgacagtgctgacgctgaagtaatgtgtttttttcaatacagagtttgccggtcaggtaataagcgataacgggcaggcgaaacgaaaagcatgcgcgtcatggatgacgcgcctgagcttacagggatgtattcacagcggcttttcgtttttgcccgttatcagcgcttcaccggtactgatgctatcacctgttttttattcctccgtcaccttatctatcgcctgcgtcagtttttccagttgtgccgctgtaataatgtatggcggcataatataaatcagccgtccgaacggccggatccacacaccggcgtcaacaaagcggcgctgtaattccgccatattgaccggctcttccgtttcaatcacaccaatggtaccgagtacccgcgcatcgcggattccgctgcgggatttcagcggcagcagagcgcttttcagttgtgtttcgatagccttcacacgcgcagcccagtctccggacaacagcagatcaatactcgccactgccgtggcacaggccagcggattacccataaaggtcggaccgtgcataaagcagcctgcgtcaccctgactgatggtgtctgcaatatggcgggtggtgagggtggctgagagtgtcatataaccgccggtgatggcttttccgagacacataatatccggtgatataccggcgtgttcacaggcaaacagtttaccggtgcgtccgaatccggtggcgatctcgtcacaaatcagcagaacattgtagtgatcacacagtgatcttacacctttcagatattccggatggtagaaacgcatcccgcccgcaccctggacaaccggctccaggatcacggcagcgacctcgtgatgatgctgtgccagcaggctttccacagaatgaagatcctccggccgccattcctcatcaaatccgcactgcggcgcatccgcaaacagatgatccggcagatagccctgccagagtgagtgcatggagttttgcggatcacacactgacatcgcgccgaatgtatcgccgtggtagccgtgacgcggggtgataatccggtggcgtttttcgccacgtgcctgccagtactgcagcgccattttcagcgccacttccaccgcgaccgagccggagtcggcaggaaacacacattccagcggctccggcgtgattgccaccagacggcggcacagtgcaacagcagacggatgggtgatcccgccgaacatcacatgtgacatctgtgacagctgttcagtcaccgccgcattcagtaccgggtgattatagccgtggatagccgcccaccaggaggacataccgtcaaccagttcgcggccgtctgcgagtgtcagcaccgcaccgtgtgccgataccaccggatagaccggcagcggctgagtcattgatatataagggtgccagatgtggcggcgggcaaaatccgcatcatcagccgaaaaggcgtgacctgaaatattccctgaaaaagtcattatgtaaaccatttcaatgcaaataaagttgacatgataatgctgatatttaaactggcaacacttttttatcgggagttacagttatgagtcaaggtcgtcagtggacattaaaagaagccaatgcattgtttgaaaaacctttttttgaactgttgtatgaagctcagaccatacatcgccagcattttgaccctcagcaggtacagatcagcacactgctttccatcaaaaccggggcgtgtccggaagattgtaaatactgtgcgcagagtgcgcgatacaagaccgggctggaaaaagagcggctgatggaagtacagcaggtggtggaaacggcgcgtaaggcgcgggctgccggttcgacccggttctgcatgggcgcggcgtggaagaatccccatgagcgtgatatgccgtacctggaaaccatggtgaaagaagtgcgggcactgggtatggaaacctgcatgacactcggtatgctgaacagctcacaggcggaacgccttgccaaagcgggtctggattactataaccacaacctcgatacctcgccggaattttacggctcgattgttaccacccggacttatcaggacagactcgacaccctcgacaatgtgcgggatgcggggatcaaagtatgctccggcgggatcttaggactgggtgaagcggtgcgtgaccgcgcggcaatgctggtacagctggcgaatctgccgaaagcaccggaaagtgtgccgatcaatatgctggcgaaaatcaaaggtacgccgtttgaggataatgaggaagtcgatccgtttgatttcgtccgcaccatcgccgttgcccgcattatgatgccaacgtctcatgtgcgcctctccgccggtcgtgaaatgatgaatgaacagacccaggcgctttgctttatggcgggtgcgaactccattttctacggctgcaaactgctcaccaccaccaacccggaagaaaataccgatattgccttgtttaaaaagctggggatcaaacgcgaagccatccatgttacccggggtgacaatgaagagacgaattctttactggatgccatcagccacagcgatgacgaaaaattctataacgcagccctgtgagccgtaccatgtggcagacttttctttctgagcgcctgcagcaggcgcaggaacaggatgcggtacgccgccgcgaggccaatgacggcgcggacgggcgcactctcctgattaacggcagacgtgccgtgaatttctccggtaatgactatctcggcctcagccgccatccggcggtgatcagcgcctggtgtgacggtacccggcaatacggtgtgggcagcggcggatccggtcatgtcaccggttacaccacggcacaccgggatctggaacaaatgctggcggagtggctcgggtttgatcgggcgatcctgttcgtctccggtttcagtgctaatcaggcggtgatcaccgcactgatgcagcgcggcgaccaccttatctgcgacaaactcgctcacgcctccattatggaagcggcgatgcattcacccgctgaattcagccgttttcatcataatgataccgcccatctcagtacccggctgagccggacagagaacagtatcggcaaaaccctggtggtcacggaagggatcttcagtatggacggggatgccgcaccgctggcggcgatcctgccgctcacccggcagcataacgcgcggttgatggcggatgatgcgcacggtatcggtgtgtgtggccgtgaagggcggggcagttgtgatgcggcggggatccgcccggatattcagattgtcaccttcggcaaagcggtcggggtcagcggcgcggcggtgctgtgcgatgcacagacggcggattatctgacgcaatatgcccgtcatcttatctacagcaccaccttcccggcggcacaggcgtgcgccattcaggcggcggtgcaggaaatccgccgtggtgacggattacgggacacactggcggaaaatatccgcttcttccgtgagcgggtggcgcatctgccgctgcaattactgccgtccgcctcggcgatccagccgctgatcgtgggggataaccgtgctgctctggcactgtcgcactatttacaggagtgcggcctgtgggtgaaagctatccgtccgccgaccgtgccgccgaatactgcccgtctgcgcatcacgctgaccagcgctcatcaccgcgacgatatcacacagcttacggaggcgctggatgcattctgccgtcactaccgccccggtgaataaagccgctgttgccgctgctttcggacgcgccgccggacactatgacaccgtggcgcaccttcagcagaaaaccggctgccatctgcgccaactgaccacacaggcactttccgggcggttactgtctgaactgcacgggctggatgccggctgcggtaccggttttttcagtgaacagtggaaagcggattgccgcagtgtgaccgcgtttgatctctcccctgacatgctggcacacgcccggcagcagcagcgggcgacccgttatgtacagggggatatcgaacagctgccttttgcggataatcagtttgatttttgtttcagcaatctggcggtgcagtggtgtgattcactggcggcggcgctggccgggctggtgcgggtggcccggcccggcggggtggtggcgttttccactctgctcagcgggtcgctggatgagctgaatcaggcgtttgcccgggtggacagcaaccgtcacgccaacggttttctcagccgtgaggcggtttccgccgcctgtcagccttaccggcatactttgtcagaagtgtgttaccggctctcctttgattctctgcccgcgctgctgcattccctcaaggggattggtgccacccatgttcatcagggacgtgcagccgggctgatgacacgcaataaactcattcagctggcgaatcattaccccgccgaagacggcgtatttccgctcagctatcttattcagtacggagtcattcatgttggaaaataactggtttttaaccggcaccgatacagatgccggtaaaaccgtggtcagttgcgccctgttacaaacggcccgcaacgcaggtttctgctgcgccgggtataagccggtagcctccggcagtgagatgacagaagagggactgcgcaacagtgatgcgctggcgctgtggcggcatacggtaccgccggtcagttacgcgcagattaacccttatacctttgccgagccgacatcaccacacattgtcagcgaactgactcaaaccccgctggaatttgcggtgatgactgacgggctgcatgcactgaatcagcaggcggactgggtgctgaccgaaggggcgggcggatggtttacgccgctgtcggccacacaaagctatgcggactgggcggcacaaatgcggatgccggtgctcctggtcgtcggggtgaagctcggctgcattaatcacgcgttactgactgtactggcgatacagcaggccggactgaccctggcgggctgggtggctaatgaggtcacaccgccgggcctgcaccagccggagtatctggcgacactgaacaacctgatcccggcaccgtgcctgggtgtgttaccgcatctgccggatccgctgaatcaggacttatccggttatctttcactgccggtttccgcgcactgatcctgcatccggacggatcgtgccgggatcacggcaaatcttccggccgggtgttttttatcaggaaaaaatcctgaattattttttctctttgtgctgaaagtgacaattttatgactgcacaatgtcacgcaaccatgcaccggcaaacgactttattaagttatccactattcctgtggataaccctgtgcattaactttagaaaactcacgctatccttgcaggaacggggctttcactgacattgttgtaaaatcgggcttttatgatttatttataaataacaattagataaataaaatcaagggtcctccggcgtgaaaaatagcaattggtcagaggggcgtcagatttcagcataatttaaaattgcaagtgcttttttttggggataactgtgaaaagccaataaaattttccccggttttgcaagcaaaaaatcacaaaataacggattttttctgccgggggttgaagctggttttttatccagtatcatagtgaccctattcgcgcaggggggcccatgagcaaactatttaaactgcattctgactttaaaccggccggtgaccagccgcaggccattgcaaaactggttgagggcctggaagacgggcttgcgcatcagacgctgctgggggtaacgggctcggggaaaaccttcaccattgccaatgttatcgccacgctgaaccgcccgaccatgatcatggcgcccaacaaaacccttgccgcgcagctttacagtgagattaaagatttcttcccggaaaacgcggtggaatattttgtctcctactacgactattatcagccggaagcctatgtcccgagctctgacacctttatcgaaaaagatgcctcagtaaacgagcatattgagcagatgcggctttctgccaccaaagccctgctggagcggcgggatgtggtggtggtggcgtccgtttccgctatctacgggctgggtgatccggacagctacctgaaaatgatgctgcacctcaccgaggggatgatcattgatcagcgttcgatcctgcaccgcctttccgatctccagtacacccgtaacgaccaggcctttcagcgcggcacattccgtgtgcgcggcgaagtggtggatattttccctgcggaatctgatgattacgcactgcgcgtggaactgtttgatgatgaggtcgagcgcctgtcgctgtttgatccgctgaccggccatatccattatcaggtgccgcgctttactgtttacccgaaaacccactatgtgacgccgcgtgagcgcatcattgaggcgatggaagggattaaaaccgagctggcggagcggcgcaagttcctgatcgacaataataaactggtcgaagagcagcgcctcgcccagcgcacccagtttgatctggaaatgatgaatgaactgggttattgctcgggtatcgaaaactactcgcgctatctctccggacgcaaatccggcgaatccccgccgaccctgtttgattacctgccggcggacggtctgctggtgattgatgaatcccacgtcaccattccgcaaatcggcgggatgtacaaaggggaccgttcgcgtaaagaaacgctggtggagtacggtttccgtctgccgtccgcactggataaccgtccgctgcgttttgaggagtttgaatccctcgcgccgcagagcatttatgtgtctgccacaccgggaaaatatgaaacggagaaatccggctctgatgtggttgaacaggtggtccggccgaccgggctgctcgatccggaagtggaagtgcgtccggtgaccactcaggtggatgatctgctgtctgaaattcgtatccgcgcacagaaaaatgagcgcgtgctggtcaccacactgaccaaacggatggcggaagatcttactgaatatctggaagagcacggcgagcgggtgcgttatctgcactcggatattgatacggtggaacgtgtggaaattatccgcgatctgcgtctcggggagtttgatgtgctggtgggcatcaacctgctgcgtgaggggctggatatgccggaagtgtcgctggtggcgattctggatgcggacaaagaaggcttcctgcgttccgaacgttccctgatccagaccatcggtcgtgccgcccgtaacctgcacggcaaagcgattctctacggcgataaaatcactgactcaatggcaagggctattgaggaaactgaacgccgcagagagaagcagatggcgtttaacgaagcaaacggtattgtgccgaaagggctgaataaaaagattggcgatatcctgaaaatcggccagccgtcagccggggcgaaaaataaaggcaaaggaaaagcagccgcgaaaagcagcgattatcagcgtatgtcgccgaaagagctggaagttaaaattcaggagctggaagcacagatgtaccgccacgctcaggatctggaatttgaacaggcggcagcggtacgggatgaattacaggggctgcgtgagcagtttattgccaactcctgacgggatcagggcagcaggctgattgttttatccagcgcactcagcagcaggcggcggtcatggcggtacggtacatcctgtgcctccaggacctctctgacgatcaggcgatcgccgaggtcgccggtattgatatgcggtgcgcacaccacggcatctatccgtttgcggccgatgcggctctcaatcacggcgattttttcactcaggctgagggacgccgctgccgggctcagttctttgccgagattctcaatatagatcatcggcgcctgattaaaattaatggctttggtgaagtcgggcagcagcatcagcggcatcaggctggtaaagaaactgcccggcccgataataatcagctctgcgcggcagatggcatccagcgcctctttggtggttttcaccggcggggagagctgcagctcctgcggcgggcaggtcagctgatcgacattcacttcgccgtacacttcatggccttcgctgtcgatagccatcagatcgaccggcgtttccgacatcgggatcaatttggctttgactttcagcatattgcggatcagattgatggcatccagcgggcgcacactcatatgatccagcgccttgagcatcaggttaccgaggttgtgtcccgccagttcgccgttaccgctgaaacggtattcaaacatggtggaggcaatcgacggctcagtgatcatctgattgagacagttgcgcatatcaccccaggcaatgccaccctccgcccggcggatccggccggtggagccgccgttatccgtggtggtgaccacgccggtcagccgcgatcccagaccgttcaggcaggacatcacccgtcccagcccgtggcctccgcctaaagcaacaacatgttccagcgacgtgagtgtgcggtttcccatagtgtttatgcattccctgagttttcatatttatttgcgcggtaatctatcataaaaaccaatttttcgcgtcacgatactgagatttatcaaactccggtcaatcataaagataaattatctttttgctgcgtacttttacgtgtgattcagaagtggcagcggcagggaagtcatggtatgagtggatgcggtgactgaaaacatcacaaataaacatcaataacaaaaatcaataaatgacaggaagaacattatgaatgacctgacgtgcaccattccggtgctggaaactgaccgtctgatcctgagtgcccaccgcagagaagatcatgcggcggttgctgatatgtggtcagatacggaagtaacgcatcatgttatggcaggacaaatctccacaccgcgtgacagctggatgcggatgctggcctatctcgggttgtggccgctgctgggctatggttactgggcggtcagggagaaaagcaccggagagtatatcggcgatatcggttttgcggatttttaccgcgaaatggaaaaagacaccagccactatccggaagctggttgggtgtttacaaagcgggcacacggtaagggctatgccggtgaagcattgggagccatactgaactggctgaaagaggtgcgcggtattaatgaatgcgtgtgtattattgcccctgagaataaaccctccatacggctggcagagcgtcacggattccgtccgcaggagacactgagaatgaatcataaatccgttattttctatcaccttacactggactgaccgggcctgctatacctgtgtcagatcaagaaagcggtaaataattttcctgtcaaaccgccgtatttccggcggttttctgtttattatttattcagtggcctataattaatttgctaattaattgaaaaactgtgtgaaattttcgttatccggcgtatccgttccttttcccggaggcccggtaactcgttgtataataagatatatagcgtatttatcatggtaattcccgcagggcaacgctagaatcaactcacttagcgtggttattaacagcattaatgacaacgattaactcctagccttcacacctacgtttcaggtcggaaccggaaatagggtgagctggccgtgacactcacgagtgccaccagggtgcaggatagaaatgtccgcatctcccgtatttggaaaggtgttatgactgaacaactgacagatccctttgcgcgcaaattttattatctgcgcctctccgtgacagacgtttgcaatttccgttgcaactattgtctgcctgatggttataaaccaaacggacacaaatcctttctttctctcggcgaaatccgccgggtgacccgcgcatttgctcagctgggcacggaaaaaatccgtctgaccggcggtgagccgaccatgcgccgcgattttaccgatatcgttgccgctatccgcgaaaatgagaatatccgcaccattgccgtgaccaccaacggttaccgcatggcacgggatatccgcgactggcgtgccgccgggctgagcgccgtgaatgtcagcgttgacagtctcgacccgcgccagtttcacgctatcaccgggcaggataaattcatgcaggtgatgagtggtatcgatgccgcgtttgaggccggttttgagaaggtgaaagtgaatgtggtgctgatgaagaatgtcaatgacatccatctgcctgcatttctgaactggatcaaagaccgcccgatccagctgcgttttatcgaactgatggaaaccggtgacggcagcgatgtgttccgccgtttccatatctccggcaatgttatccgcgcccgtctgttacaggcaggctggcagcagggggcgcgtgcccgcagtgacggcccggcacaggtgttcagtcatccggattatcagggcgaaatcggcctgatcatgccgtatgaaaaagacttctgccagagctgtaaccgcttgcgggtgtctgcggtcggtaatctgcatctgtgtctgttcggcgagcaggggatcacactgcgtgatctgctggcggaagacgggcacgacgcagagctgaaagcacggcttcagcgcgcattgcagcacaaacgcgaaacccatttcctccatcagggggacagcggtattaccccgaatttatctgttatcggcggctgatccgccggtcatatcaggagtttacatgtctcaactcacccatattaatgcggcgggcgaagccaacatggtggatgtgtccggaaagcaggaaactgtccgcgaagcgcgcgccgaagcctttatcaccatggatgccaaaacattacagatgattattgacggcaaccatcacaagggggatgtctttgcgacagcccgtatcgccggtatccaggccgccaaacggacctgggatctgatcccgctgtgtcatccgctgatgctgagcaaagtggaggttcagctgagcgcggagccggatacatcccgtgtgcgtattgaatcctgctgccgtctgaccggtaaaaccggggtggaaatggaagctctgacagcggcttctgtggctgcactgacgatttatgatatgtgcaaagcggtgcagaaggatatggttatcggcccggtgcgtttactggaaaaaagcggcgggaaatcaggacattttaaggcggacgcatgattaaggtactgtttttcgcgcaggtgcgcgagctggtgaataccgatgagctttctctgccgtgtgattacgccacagcggaagatttacgggccgcgttatgtgagcgcggtgagcgctgggcgctggcgctggaatccggcaaactgctgtgtgcggtgaatcagtcttttgtgccgctgtcgcacccgctgacagacggcgacgaggtcgcattcttcccgccggttaccggaggctgagtcatgaataatacccggattgctgttcagactgacaatttcagtgtcggtgaggaatatcagtggctggccggttgtgcggatgatggtgcggtggttacctttaccggcaaagtccgtaatcataacctgggtgataatgtggcggctctgtcgctggagcattacccgggcatgaccgaaaaagcgctggcggatattgttacacaggcgcgtgagcgctgggaattacagcgggtgacactgatccaccgggtcggcagtttgtacccgaatgatgagattgtgtttgtcggcgtcagcgctgcccatcgcggtatggcatttgaagcggctgaatttctgatggattacttaaaaacccgcgcgccgttctggaaaaaagagacattgccggaaggcggtacccgctgggtggatgccagagaaagcgaccagaaagccgcagatcgctggtaattcaccgctgataacctcctgatcgcaggattttttccggcggctgtctgtcaggttaaaaatatttcctgtttgtaaagaaatggggagaattcctgacagtttgcctgctggcaacaccctttttatgtgataatctatagtccttggtcgtttatcatccgataaacaatttgatacagatgaaagggttatccatcatggaccgatttcctcgttctaacggctcgatagtttcacaggcgggctccggtattcaggcttatatggcccaggtttacggctggatggcgtgcggcctgctgctgactgccttcgtcgcctggtattcgtctaactccatggcgattatgagctttgttttctccagcaaaatcaccttcttcggactgattattgctcagctggcactggtctgggttatctccggcatggttgagcgcctgagcgcgtccatggcgaccgggctgtttatgctctattccgcactgacggggctgacactccccagtatctttatcgtgtatacagatgcatctatcgtcagtaccttctttatcacggcagggatgttcggtgcgctgagtatctacggttacaccaccaagcgcagcctgtccgggatgggtaacttcctgtttatggggctgattggtattatcatcgcgtcactggttaatatctggctgaaaagcgaaggtatgacactgatcatcacctatatcggtgtgattgtgtttgccggtctgaccgcgtatgacacccaaaaactgcgtgagctgggtgagcagattgacagcaacaacaaagacaccatgcgccgttatgcgatcgtgggtgcgctgtcactgtacctggacttcatcaacctgttcctgatgctgctgcgcctgctgggcgaccgccgctaatcacagacagaacaggatgtaacaataaaaggccggtgaaaaccggcctttttacgttctgattcacgcaatcttgcgccggaacaacgcataggcagccgttccggtggtcacggcgatcaccagtagcggccagaggctttggcggataacactgaaatcagcatctttgaggtaaatctgtttggtgatttcattaaagtgacggataggattgacccaggtgatatgttgcagccagaccggcatattctccaccggggcaatataaccggacagcagcacggcaggcatcataaagacaaacacgccgataaaggcctgctgctgagtggcggaaagggcggagattaacaggccgaacccgaccagcgacaagccgtacaccatcatggtgaaataaaacagaagcagtgagccggagaaggggatgcggtaagcaaaaatgccgatcaccagcacaatactggcctggaccgtggccactatcagtgccggaactgccttgccgacaaaaatttcaccggtggtcagcggtgagaccagcaactgatccagcgtaccctgttcccgctcacgggcaacagagagagaggtcacaatcatcacgccgatggtggtgatcagcgccaccagtgacggcacaataaaccatttataatccagattcgggttataccagttgcgcaccaccagctcactggtgaccacctgcggcatccgctcctgctggtaatgcgcggtgatttgctgaacataattggcagcaatctgcgcactgttggagttccgtccgtcgagcaggatttgcagctgtgccggtttctgtccggcgagctgcgcactgaaattctgcgggaaatgcaccagcagcagggctttgcggttatcaatcacatcctgcacatcatgccggttctggatcagcagcacatcagaaaaggcactggctttggcaaactgctgggtcagctcaatggatgcgggacccttgtcctcatcataaatggcgatagtcgcgttggtgacttccaatgttgccgccagcgggaacaaaatcatctggaataataccggtacgatgaggatcgtccgggtctgccgttcacggagaagtaattgcagttctttgataattaaggtgagtatccggtgaaacatggcagtctccttaatcaagccggcggcgggttttcagggcggtcaggccgataaacacaagcgctgacaggatcagcaacaccagattactgataatcaccggcataatattacccgccaggaacagtgtctgcagactttccacaaagtagcgcgccgggatcacataagtcaccacctgtatcgccaccggcatgctgtcaatttcaaatacaaagccggacagcataatcgcaggcagaaacgcggcgttcagtgaaatcatggcggcgttaaactgattgcgggtcacggtggaaatcagcaaccccataccaagcgcggtggcgagatagagggaggtcaccagggccagaagccacagcgagccgtgatacggcacatccagcacatacacggtcaccaccatacacagcaccatgacaaagctgccgagcacctgatacggcagcagtttggagagcagcagttccgttttggttacctgtgttgagagcagagcttccatggtgccgcgctcccattcccgcgccaccaccagtgaggtcaggatagcgccgaccacggtaataatgatgctgatagcgcccgggataataaaatgctggctgatagccgccgggttgaaccagtagcgcagccggacatcaacaggcggctcactgctgatcccccgatcctgtgcccgctgctgctgccagatctgccagataccgctggcatagccctgcacaaagttggcagtattgggctcgctgccgtccgtaatcacctgaatctgtgcgatatcgccctgacgggccagacgtttgtccaaatccgccgggatcaccacaataccgcggatatgccccgcctggagtttatcaattaattcacggcggttatcactgagggtggcatcgataaacggagagccggtaaaggcattgatcagttcccgcgccggttcgctctgctgattcaccaggatcccgaggcgcagttttgatgaatccagattgataccgtaaccgaaaataaataacagaatcagcgggatcacaatcgcgatcagggcactcgacgggtcgcggacaatctgtttgctctctttgatgcacagcgcccgcagacggcgccatgaaaaaccggaaggtgtgctcatgatgcagcctcctgtgcgctttctttgtcatactcctcgaccagcccgataaaggcatcttccattgacggatccggacgggtgtcatcagccaccgaggctttcagctcatcaggggtaccggcggcaatgattttgccgtgatagaccagcccgatgcggtcacaatattccgcctcatccataaagtgagtggtcaccatcacggtgacgcctttatccaccatgccgttaatatgcagccagaattcacggcgggtgagcgggtcaacgccggaggtgggttcatcgagaaagagaatatccggctcatgcatcagggcacaggccagcgccagccgctgtttgaagccgagcggcaaatcttcggtggtctggcgcaggatcggggtgaaattaaaggcatttaccatatcatcgattttctgctgctgcgctttaccgcgcagtccgtaagcgccggagaaaaatttcaggttctgggcgaccgtcagattgccgtagagagaaaatttctgcgccatataacccaggcggctgcgggctttggctgagctggttttcagatccagacccagcaccagggcacggccactgctggggatcatcaggccgcacatcattttgaaagtagtggatttgcccgcgccgttcgggccaagcaggccgaaaatctccccgcgcttaacctgaaaatccacatgatcggttgcggcaaaatcgccgaattttttggtcaggctgacggcttcaattacggtttgattgggtgccgccgggatctgcggcataatctgcgccagctgtgagcggtgagaagggccgccgccgagcagatcaataaatgcatcctcgaaacggggcttagcgggcagcagctctgcatccggacatttcagtgcgctgagcagggtgcgggtatctgcctgtggttttacaatcagccggacataacgtccctgaataacaccgtcggacacctgtggctgaatcaatgcttcctgtaaaatgcggcggcgttcaccgggggcagcggaaagcaggaaagagcggccttccatcgtttcggtcagttgtgccggtttgccttcataaatgacttttccctgattgagcagcagcacatcacggcactgttccgcttcatccaggtaagaagtgctccagaggatcagcatgccgtcatcggcgagagagtgcaccatccgccacagttcgcggcgggcgataggatcgacccccacacccggttcatcaagcagcagcacctgcggctgcccgagcagtgtgcaggccagtccgagcttctgtttcatgccgccggagagtttacccgccatgcggccggtaaaacgggtcagatcagtaaaggtcagcagccggtcaaataccgcctgctgttcatggtgcggcagaccgcgcagttcggcatataaacggaggttttccatcacggacagatcttcatacagcccgaatttctgcggcatataaccgagctgtgcacgcagagcgacactgtcctcaatcggatcaaacccggctacgcggatctccccgctgtccggtttcagtaatccggccagcatgcggataagtgtggtttttccggccccgtccggcccggcaagcccggtcacaccgccgccccggatggtggtggtcagccggttaaccgccggattatcaaggccgggaaagcatttttcgacggcactgagggagatagtgatgtctgacatcgtctctccttacggctgcggctcttcattatcaaagcggatggtgaccggcattccctgacgcagcagcgggtcggcatctgtcaccacaatgcgcagacggtagaccagatctgtccgcagtgccggggtttcaacggatttcggggtaaactcggcagtcggggagacaaatccgacatgcccgtgatacggtttgcccgggcggctgtcggtttccagtaatactttacggccgggctgtgcctgtcccagctcgctttcgctgacatacgcccgtacccacaccggattggtcagtgtcagggtgaacacggtgctgcctgccggtaaaatcgtaccgggctcgatggcgcgggtcagaatagtgccttctgccggtgcagtcagacgggtgtccgccaggtcaagctgtgcctgctccacggcggcttcagcctgtttcagctgtccgcgcgcttcggcaatctcttctttgcggtaaccgttttccagctggttcagtttgtcctgtgaggctttcagtgccgcatcggcctgattacgctgattgcgggcattttccagatcattggcggagatagcccggcttttcatcagtccggcctggcgctgataaaactgacgggcaaattccgccgctgctgtattacgggcaacgtcggcttttgcctgcgcgatttcttccggccggtagccggtttccatcatcagcaatgcggcttgtgcgctgtcccgtaccccttccgctttcagcagggcgtgacggtacggtgtatcatccagcataccgagcagctcaccgggctgaaccgctgctccttcatccgcattcagggattgcagtttgccgccgacacgaaaaccaagattcaccgtccggatatccacattaccgtacagcagtgcaggccccgacgggcgcgactcccaccagtaccatccgccggcaccagccagcaggatcagaataatgataaatatcccggtttttttcattggcttcatgaattgattcctggtgagttatcagagacggtggtgtatcagttccggtaatgctgctttaatccgctgagcagcaaccggatatgttcccgcagcacatcattgatcatgtcatactctttcgggccgatattatcccagccggtctggcgcagcaggttttcccgtgccagacggaaagataaaatctcccccatcagagcgtgtgtatggatcagtgtgttgatatgtccgtccggcagcccggtataacgggcaactaatctggcctggcgggtaaaaatcgcggacagcgcctgttcgtggataagtgtgtaagctttggtcggaattaactgctcgcgtgacataatccggctgatattaatattacttttcttcagtaccagttcattataggcaagaaaactcagttcaatcagttgcagacagcggctttcatcccgttcgtcagcgcggttttccagaaacagatcgatttcttcaatgacaggacggaattcatcacggataatgtcggcaatatgctgtgcaacggccagatacaacccgtcttttgagccgaaataataagcaatagctgcgatattttgatccgcacgttgtgcaatctggcgagtagtggcactatttgggccgttcagtccgaaaatctcaatagcggcttccagtaaagcgagtttggcttgttcgcctcgcggcgtattagtcgtattgactgacatggcgtatatccttatgggggtgtcggcataaacgagagatcaatcatatgattaactgtatgctcatcagtatctgttgtaaatgagcagtaagcaacggattgatcacagacgtattttatcgatatttcttccggagtgacggattaattttcgacattcaattatcagcaggccccgcagacaacagaccggggcggagtcttaacaattcatgagtttttcatcattaccattatgcccggaaattcagaaggccgtcgcagagatgggctacgaacagccgaccccgattcagatgcaggccattccgcaggttcttgccggacatgacttattagccagcgcacaaaccggtaccggaaaaaccgccggttttaccttacctatcctgcaatatttacaggataatccgcgcaaaggcggcgggcgtccggtccgcgcgctgatcctctccccgacccgcgaactggctgctcagatcggcgaaaatgtccgcgagtacagccgccatctgcgcacccgttcgctggtggtcttcggcggggtgagcatcaacccgcagatgatgaaactgcgcggcggcgtggacatcctgattgccaccccgggccgtctgctggatctggaacatcagaatgcggtggatttatccaaagtcgaaattctggtactggatgaagctgaccgcatgctggatatgggctttatccatgatatccgccgtgttatcaaaaaattaccggtgaaacgtcagaatttactgttttccgcgacattctccaatggtatcaaatccctggcgaataccattctgaataatccggtgacggtggaagtttccccgcgcaacagtgcctcgcagcaggttacacagtttgttcatctggtggataaaaaacgcaaagcagaactgctggcgcacctgattggccgtgataactgggagcaggtgctgattttcacccgcaccaaacacggtgccaaccgtctggcggaattccttaacgacagcggcatcaaagcggcggctatccacggtaacaaatcccagggagcacgtacccgggcactggcggatttcaaaagcggcgctatccgcgcactggtcgcgacggatatcgcggcacgcggcctggatattgagcaactgccgtatgtggtgaactatgaactgccgaatgtggcagaagattatgtccaccgtatcggccgtaccggacgtgcggaggctaccggcctggcattatcattggtatgtgtcgatgagcatgatttattacgtgacattgaaaaactgctgaaaaagcaaatcgagcggatggctgaaccgggttacgatccggatccgtccatcaaagccgaacctatccagaaagcgaagcagggtcgcggcggcaacggccgttccggcggcggacgtcagggcggacaggggcgcagcgccgaaggccgcggtaacagcggtggcggtgataaacgcccgccgcgtccgcgtcagcacaaaccgcgttccggcaacagcgactccggcagcccgtggggtaaccggggcaaataacggaaccggctcatgcgtgttcttttagcaccaatgcagggggtcttagaccccctcgtccgtcatctgctgacggcggtgaatgattatgatctctgtatcaccgagtttgtccgtgtggtggatatgctgttgccggagaaactgtttttccgtctctgtccggagctggaaaacggcggtctgaccgaatccggcacgccggtgaggatccaactgctgggacagttcccgcaatggctggcagaaaatgccgcgcgggcggctgatctcggttcacacggagtggatctcaactgcggttgcccgtccaaaacagtgaacggcagcggcggcggggcgacgcttcttaaagacccggagctgatttatcagggcaccaaagctatccgtgaagcggtaccggcacatctgccggtgtcggtgaaagtgcggctcggctggagcagcaatgcgcaccagtttgaaatcgccgatgcggtggcgcagggcggggcaacggagatcacggtgcacgggcgcaccaaagaagcaggttatcgcgcggatctgattgactggccggcgatcgcagctatccgtcagcggcttccgattccggtgattgccaacggcgaagtccgggactggcagagtgcgcagcaatgtctggccgtgaccggctgtgatgcggtgatgctcgggcgcggagcgctcaatgtgccgaacctgagccgggtggttaaatataacgcgccctttatgccgtggccggaagtggtggctttgctgcaccgctacacgcagctggaaaagcagggtgataccgggctgtaccatgtggcacgtatcaaacagtggttcagctatctgcataaagcctatccgcaggaagcggatgaactttttgccgtgatccgcccgctgaaagattctgcctcgattgcacaggcgattgcccgggctcagggcgcataaaatttgctttttttaccatatcgcactttaattgacaggtgagccggattttttcttaacccgttaatacagcaggaggtactgatgaattttctgtcctggattatttttggcctgatcgccggtgtgctggcgaaatggatcatgcccggaacctataatatcggcattattatgacgattgtgctgggtgttgttggtgctgttgtcgggggatatatcagtgttttcttcggcaaggggcgtgtcgacgggtttaatttcggcagctttgtggtcgcggtgatcggcgcgatggtggtgctgtttctcgccgggaagtttgcgggctgacagccgcataacagatttaaaaaatgccggagcagctgacgcgctccggcatttttttatggttcaatcggcagggtgtctgagccgccccattccgcccaggagccgtcatacagacggacattctgatggccggtgagcgtcagcgccagcagcagtatggcggctgtcataccggaaccgcaggacaccaccaggtatttgcttaaatccacacccgcatcacggaatatctgctgaatctgtgtcggggatttgaagatcccgttttctaccagagtattccacggcacattgcaactgccgggaatatggccggaacgcacgccgggacgcggatccggtgccagcgcctgaaaacggtcggcagaacgggcatcgacaatctgaatttccgggtccgtaatcgccagcagcacatcatctttattcaccgcattatgacgctgaaattccggcacaaaggttttcgcctgcggcggcggcagttcaccgctttcggtggtataaccggcaccggcccaggcattcagcccgccctgtaaaatacgcagatttttcacaccgaaggttttcagtgtccaccaggcgcgcggggcggagaacaggttaccctgatcataaataatcaccattgtgtcattatcgatcccgaactcaccggcagcttgtgcgaacacctccggtgatggcagcatatgcggcagcggggaagagagatcagcgactttatccagatcaaaatagtgtgcgcccggaatatggcgctcaagccataactgatggtaatctgcgggctgaacgggcggagctttgctgacatcgagcacaacaagattgtcgtcattcaggtgcgtgtgcagccagtctgctgtcacaaaatagtctcggtacatcgcaattaacctcgttagcaggacgcagagtgctaccgggtttctccggtggtcgtttcctgcgccgtggatggagtctcaggggcaacagaacgattatacatattcataccggcaagaaaaacgccgccgagggagccgaaggcaaaaataaaaatgaaaataatcaataatttcttcatagatgtattgtggtcttatctgatggagcctgtctgccggacaaatccggggttatgttgattaattgtaacaaattattgaagcaaccgtatgcagaaaatgagcggtaacggcccggacatgctgattttttttctgtagtgtgaaacaatagcgccctgtttatttatccataggtttttcagatgcccctttccgccaccgtcaaacaacaaatcagcgcctggtacaaagccctgccggagcagattgacggctttgtcccgcgcgctccgcagcgggaaatgattgcggaagttgcccggacgatggcgggcgatgaagggcggcatctggtgattgaagccccgaccggggtgggaaaaaccctctcttatctgatcccgggcattgcggtggcgcgggaacagcaaaagctgctggtgatcagcaccgccaatgtggcgttgcaggatcagatctacagcaaagatctgccgctgctggcaaaaattatccctgatctgcgttttaccggtgcattcgggcgcgggcgctacgtgtgtccgcgcaatatggcggtgatcggcgcggcggaaggggaacaaatcgatctgatgctgctgctcgaagataaagcggatgtggcaacggcctctgaacgcgataccgtgcgcaagctgcagaatgattttacctctttcggctgggacggcctgcgtgatcaccataaaacctccattccggacagcctgtggcgaaaaatcagcaccgataaactcagttgtctcggccgcaactgccagtattactcgcgctgtccgtttttcctggcgcggcgtgaaattgaaagtgtggatgtggtggtcgccaaccacgcgctggtgatggcggcaatggaaaatgaatcggttctgccggaaagcaaaaaattgctgctggtgctggatgaaggacaccatatcgctgatgtggcccgtgattctctggaagtggaaggggatatcaccctggtatcgcttcaggcgcagctggacaacctttcccgctttgtcacccagtatctgcaacagttccgtccggtaaaaccgccgaaactggcggacagcgcccgtctgcagaaacacctggaagcgatgtcagatgtgtaccgcgatgtggcgatgtacacacaggcgctgctgccggagcaggcggcggatccgcactatctgtttccgctcggggaactgccggagccgctgacggcggcggctcagcagctgtcaaaacagacggatgccctgcacagcatggtggaggggatactcagtgatctgaacgaacagacggcaaaacaggatattgtccgtctgcaccgcgccatcctcaccgccggaaagttcctcggtgcgctggaaaacagcgctaaactgtggcgtctggcggcgttgtcggaaatttcacacgcgccggtttcaaagtggctcagccgccgctatgaaaaaaatcagtctcacctctggttccactgcgcggggatccgcgtcagcgaacagctcggccacctgttatggcgcaatgtaccgaatattgtggtgacctcggcaaccctgcgttcactcaacagtttcagccggttgcaggaaatgaccgggctgagtgaaaaggcggacgaccgctttgtggcactcgattccccgtttgatcactgccgccaggggcggctggtgatcccgaaaatgcattatgaaccgacaccggcggatgaagccgcgcatatcggggagatggcgcgttatttccgctcccagctggcgtccggtgaacaccgtggcatgctggtgctgtttaacagtcagcgggcaatggatctgtttctcacccatgtgacggatttacgtctgcaactgctggtgcagggggatcagccccgttaccggctggtggaaacccattgtcagcggatccgggacgggcagaacagtgtgcttatcggcctccattcttttgctgaaggccttgatctgaaaggggattacctgactcaggtgcatattcacaaaatcgcgtttccgccggtcaccaacccggtgattatcacggaaaacgactggctgaaatccctgaaccgctacccgtttgaaatccagagcctgccgggagcgtcatttacgctgatccagcaggtcggacggcttatccgcagtcaccagtgtcacggggatgtggtgatttatgaccagcgcctgctgaccaaacggtatggcagcaggctgcttaatgcattaccggtctttccgattgtgcggccggatattgaaccggaaaaataatataaacggctgagcgttattctgccgtggcggtaaaggttacgttaccgccctgatcattgatattactgactgtcagatggtcaccgcgtttaactgctctttttaccgctatttccgaactgcttttcggttgcagcataaaggatttatgcagtatttgttttttatccgccagggtgatttccgtaatggtaatgtggtacggcgatgtattattgacccgtattgaatgactgccggactgaaatgtaacctgctgtgtggcagtgtttctgtcacttaatccggcagggcggtaaaaaactttaaaccgtgaacggacggccagttgtcctgaatttttttccttcagtgatgatgtttcactgaccggcggaatatcaaggacattcagccaccacaggctttctctgtccgacggcatactgtttttatctatcagccgcatacgtaagatttgctctgccccggcattgatgcgtgaaaccggcggggtcagttcaaacggcgtgaccggcagtttcgcgggcagtgtttctgaatcccctgaatcaagccagtattgtacaaataccggtgaggcagattcattattaaccctgacagtaatatctttttcaccttccggataaatataccgtgtgctgttcgtactgacaccatctgcgaatgcaaaggcactgataaaacacccgataaataacagatatgatttcattttatttccccgctgtgcacgaaggaatacacggacaggtattattactgagataatgacctgccatgattacgtattaacgtattccctttatttcatttaattttatgcgttttttttatttttgaaatacgtatgttttccctgttttgtttattacggaatactgataataccgaaaaataataagcaaaaaaaaccgcccggaggcggtataaagggtaggattgactcacaaggtcttactgtttttattgtctgcgacacatactcacacatgagatgtttatttcagcaccgtaacccgccggctgcggtgccgtatttctgacgattattcgatattggcttcaataaaccacagatactggtcgaggtcgcgggaggcggcagtaaacatatctgcggtattttcatcctcaacgcggctgacggcacggcggatatcgttggcgacaattgcataacggtcggccagtgctttcaggtgatcctgcacagtgtggatatcggtcggataagccggtaaagcagaggctttactgacagcctgtgaggtaccgagtgccacaccgccgagctgaacagcgcgttcggcaaaggtatccaggtggctgttgaggctgtcacggaagccgtccagcatttcatgtacagcaatgaaattacggccgcgcagattccagtgcgcctgtttggtcatcagcgacaggtcgataaactgcagaacctgatgattcagttcatcaatggtttcctgcttaatatcatcagtgacatcgttacgggtgtacactaagtgagaagctgtggttttcactaatttcgcggtgctcattattgttccccttatttattccgttaaacatctttgtttcgatggggttactatagggcagcgcagatgatagttaaattcgattaaatctatagaatcgataggcaaaccggcacgaggccggtttcagtatggcgggtgattactcaacagctttgatttttgattttggtttgatggtcagtgccgcacccatggaagcgatgacaatgcagctcagcgccagccattgtgtgaataacagatgctcgctcaggaagataatacccaccattgcgccaatcaccggttcaagactcatcagtatgccgaatgtccgtgtcggcaggcgggtcagtgccaccatctccagtgagtacgggaaggccgttgataagatagccaccgccaccccgaccggcagtaccgcccagctgaacatcacactgagatcactgtgataagcccctatcgggaaaaaaatcagtgcggcgataagtgagccgacggaaaccgtggctgcgccgtaaaaccgcccggcccgctggccgaagataatatagagtgcccagcctgccccggcaccaagggcgtataacatccccaccggatccagctggttaatctgtccgatctgctcaccgagcggcagcaggaaggccagaccggcgatcaccagaataatccagagataatccgttattttccgtgccccgaacatggcaaccgccagcggcccggtaaactccagagcgaccgcaatcccgagcggaatggtggacagcgccagatagaacagatagttcattgccccgagcgagaggccgtatcccagcatcggcagcaaagactcacgggtaaaacgcagccgccagggtttaaaaatcaccagcagaatcgctgtacccagcagtaatcgcagggcggtcacacccggggcaccaataaccggaaacagggttttcgccagtgaggcgccgctctgaatagagatcatcgacagcagcaataagccgatcggtaaccacggagaaccattttgctggcggggagacgcagacatgaagaacctcgggagcaataaaaatgcggtgagacaattagttatgttgaattgcatgcaaaaggcagaactcgtcctgcaatcttagcggggcggctgacggatagcaattactgatttaagaggatattaatccgcagacagcgattgccgggtaacatagcaaaatctgacgagtgctatcttcagaccgcttgcgtatactgactgccggattttcatttcatcacgataaggacagggcagatatgcgggatattaaacgaatagcagtctattgcggatcagctgcaggtgcatcagagatttaccgccttgaggccgtgaaatttgcccggattctggttgagcagggaattaccctggtttacggcggtgccagtgtggggatcatggggacggtggcggataccgtactccgcgaaggcgggaaggccatcggggtgatcccggcattgctggaaggacgggagattgcccataaaaacctgactgagcttcaccgcgtcagcaccatgcatgaacgcaaaagcaaaatgattgaactggcggacggctttgtcgcgctgccgggcggcttcggcaccctggaagagtttgccgaggtctttacctggagccagatcggactgcatcagaagccggtcgggctgatgaatatcaataattattatgacccgctgctgtcgctgatcagtaaaatgaccgatgagcagtttatgcaggaaaaataccgccatatggcaattgtcgaaacggacggtaatgcacttatccgccgcttccgtgactatgaggcacctgcggtcaaaacctacgattaaccggagaacaccatgataatccgccctgccgccctgaatgatactgaccgcattgctgatctttatcagcagttatttaccctgatggcggaatatcagccggatcgctggcgcccggcgcagcaggatcgcggatttatcgaaaacgccgtgacggatgaaaaattctgtctgctggtggcggaaacggaagggcgtattgccgggttcgcttttgcgcagacgcaggatacctcaccttacacctgtgtggtgccgcgtcgtttcggttatatctttgatattgtggttgatccggcggtacgcggacagggcaccggtaaaaaattactggatgctgttaaagactggtcaaaggcacagggccatacgcatctggagttgtcggtgctgccggaaaacaccggtgccatgcgtttatatgagcgcgaaggctatcagccggtgatccacacactggcgattaagcacggataatccggttgtcagcatattgagaaaaaatcagcggaaagtattgcggctgccagaatcacaattactgcaataagcgctatgccggacagagcaaacagaaacagctccgccacaatcacaccaccgccgcacagcagggcaatacgtgcggcgattttattttctttgcgcataaacccggcaccggcaaaaaacagcgccagcagtgccagtgccgttccggtatagcccgcataacgggctgattccgataacgcgcgccgttcttcatccgccggtgtggtttccgcctgatactcatgtccccgcagcgccgctttggcagcctgtttcatcgcactgattttgttataaaccacctgttcggcaggcggacggctttcaatatatttatcagtctgatattgcgcaaaaaagaaggcggctatagcgagcaggccgagtaacataccggaaaaactgaacgggttttttctgacgatccgtttcatggtgaatatccttataaaaagagcctctgacagaggctctttaactgtataccggaacggcgtttttgtcagttggtcagatgaacggttttaccgccgacaatggtgcgcagcactttcacattggcaatatcatcagcaggtatctgaaacacattgcgatccagcacgatcatatccgccagtttgcccggctccagggaaccgagaatatcttcccggtgctgggcataagcagagtcaatcgtggcggcacgcagtacttccgtgacagtcaggtcacggtcggtgtccagacgcggtgccggctgaccgttgaccggatgaccacggcgggtggcagccactttcagatcataccattcatcaaaatcatcaatcggccagtcactgccgaacgcaacgactgcaccggcatcaataaacttaccgataggttccaactgctgaaaacgggtttcaccgatcatattgcgggtgaattccgccagttccgcagtcggtgccgcccactggaaggagaggcaggcaatggtgccgagtctggcgaaacgcgcgtaatctttggcatccaccagctcattgtgagccagtcccggacggatatctttgcccggatgcgcagcccgcattttttcgatgccgttgagcaccatatcaaccgcaccttcaccgacggtatgcagatgcggatcgtacccggcagctgcgatacgttcgagcagggcatcgatcacctctgaagtgaaatagagatcaccgtaattttctgtctctcgccagtccggttgtgccggggtaccgtgattgatccggtatggtttcagcagggaggcggtcatggtcgggaactgaagcacaccatcaacaaacattttgatgttttttaccgcgatgcccggttccgggccccattgcggctgatgataacgctccgcaaaggcaacggcgttttgcacggcctgcggcacggatgccacatccggtgcatcatccggggtgatttcacgggcagcctgcacacgcagtgtcagttcaccctgttcctgtaatgcacggaacgcatccagctgtaattccgccacacgggcatccatgaccatggtgacgccctgttcattgaggactttctgcaccagacgggcaacatccaccgcacggtcggcctgaatggacggaatactgtccgccgcacgcatggccggggcatcctcaaggataccgttcagttcaccattggcgtgtttgccgattttaccgtcactcggtgccggggtttctctggtgatgccgaacagttccagcgcacggctgttggcaagcagggtatggcagtcattggagaacaatacgacagggcggcgggtattgagcttatccatatcttcgcggtacatatcaataccggccggtaacatgccctgacgcagccaggcggtcactttcagccagtcgttttcgccggtgcgcggatcattatccagatgcgcctgcacacgggcgaggatctcatcaatggtcagggattcataattcagatggcagccgaacagctgaataccgccccagaacgggtgcatatgaccatcaataatccccggcatcatcattttgccgtcgagatcgataaactgtgtatgctcaccacggaatgctgccatgtcatcattatcaccacaggcaagaatacggccgtcagcaatggcgatggccccggcgacgcggttttccgcatccgcagtatagatataaccgttgtgataaataatatcagcggcagtcattttcattatgctctccaatcctcatcaacagagttaattgataattaagtgagtttcttcttccgtgattgacggcggacggcgggtaaagaagcgggtgatcacaccgaggtataccacaccgatccccagccagatcagaccgacagtcagtgcctgagcatccaggctggtccacagccacagggtcagcagcaccccgatcgccggtaccaccagacagcgcaggatcacggcagccgtcagcggttctttccggtcaataataaagtgtttgataacacacagatttacaaaggtaaacgcaatcagtgcgccgaagcttatcatggatgcaaccaggctcagggagagcaccagcgccatcagtgaagcgagggcgacaaacaggatcgatagtaccggggtgttgaatctggcatgcagacgggcaaacacagagcgcggcagcaccccttcacgccccatggcataaaaaatccgcacaatactggcctgggatgtcatcgcggaggcaaacacgccgatcacataggcagtaataaaggaggatgccatcagtgcgccgccgactttttccatcacctgaatactggcgatatcggtgttcggcaggaaatcacgccacgccggatagctcagatgtgcggcgtaagagataatgataaacaacgtaccggcaataaacacggtatagaggattgctttcggcagcgcccgtttggcgtctttggtctcttccgccatggtggagatggcatcaaccccgaggaatgcgagacacagaaccgccgcaccggcaaacagcccggacacctgatcggacatcaccgtcagcggggcgagcagcgcctctttatccagcgtgaatgctgaactgaagctgagatacaggaacagcgcgataaatatcagctgcatcacaatgatcagcatattcatcgaggtgaccagtttgatcccgagaatattcagcacagagacaatcacaatggtggagacgataatcagctccatcggcaccgacggcagggcttcatgcacaaaaataccgatggcgatatagttgataatcggcagaaacagataatccagcaattgcgcccagccgaccagaaacccggtattcccgccgaaaattttctggacataggaatatgcagagccggccagcggcagtgtgctggtcattttacaatagctgagtgcggtaaacaggacggctgtcagagtaataatataagcaaccggtaaatgaccttcactgaggacggtaacctgtccgtaagttgtgaagataccaaggggcaccatataggcgagcccgaagaaaaccaacgcgggggtatttaagacgcgtttcatctgcacagtattctgttgcatttttacagcccttcccaatagcctgaaacatgccgcggatatcgcatccgggcacaatatatatctccggccgtcagcggatgacggtcagtctgcatttattttcaataaacctcgcaccttgcgtctgcatcgtgcgcactttactgaaacgtcagtgataaacgggccatcaccacacgctggggtaaatgcaggcggcgtacaatatatgagttatctgtatttggcaacagaagttgcacaggataataataaggataaaccatccttaccagtcgtgcttttccggcttattatcaggcataccgaaaacaacgtaacctgatatattttcagtaaattcattgcaatacctgttttaattaataagccggtgttaccggcaatacattacgtgacataacgtaattcgttatccggccacaaaagagaataaccggggtatttttgaaccgggagggtgacggataagtctcaggctgctgcttttcatcgccgtaaaacggcggataaccgataaataaagataaagtaatagcgggtcaaaaagagaatgtaaaaaataaccgcatccccggcggaatatccccgaaaataaacgtattgcgggagagaaataggatccgcagcgattcagtattatttaccggcagtcataccacttttatggttacataatatgatggcaaataattaaaattataatgaattgatttttatgtaattttgagtctttctgtacaactgaggccggcttttaatcactttatgttcacgccctgatgacggatattaccctcccggccgaaaataacagagtgccgtaatctgaaatactctttttgtattttctgcctgttttttccgccggaacgatgtttgatacaaatattaacaatgtgttaattctcttaaagtgtgaacgaaatcgtttgcttttgttttttgcggctatagaattcgtcagatttttttggcctgagaaaagcaacaggaggcaattgtgtccggggataaaaattacagtcatgggcctgtgcccatatccgcgcggaaaggcgggctggcattaacctttgtaatgctgggtttgaccttcttttccgccagtatgtggaccggaggtgctctcggtaccggtctcagttttaatgatttcttcctcgcagttcttatcggtaatcttcttcttggtgtctacaccgcttttcttggtttcattggttccaaaaccggcttaacaacccatcttctcgcgcgttactccttcggtattaaaggctcctggctcccttcattcttactcggcggcacacaggtcggctggttcggtgtcggtgtggccatgtttgccattccggtcggcaaagcaacgggctgggatatcaactggctgatcggtatctccggggtgctgatgacggtgacggttttcttcggtatctctgcgctgaccgtactgtccgtgattgcggttccggcgattgccattctcggcagttactcggtttaccttgcggtaaccggtatgggcggcatgagcgcactgcgtgatgtgatcccggcacagccgattgattttaatctggcgctcgccatggtggtggggtcgtttatcagtgccggtacgctgacggcggattttgtccgcttcggccgcaagccgaaaattgcggtgctggtggcgattatcgccttcttcctcggtaactcactgatgtttatcttcggggcggccggggcggcgtctctcggtatggcggatatctctgatgtgatgattgcccaggggctgttattaccggcgattatcgttctcggtctgaatatctggaccaccaatgataacgcgctttacgcctccggcctggggtttgccaatatcaccgggctttccagcaaaacgctgtctatcgtcaacgggcttatcggcacactgtgcgccctgtggctctacaataattttgtcggctggctgaccttcttatccgccgctatcccgccaatcgggggcattattattgccgattacctgatgtaccgtcaccgttatgaaacctttgaccgcagcaaaatgcgtgatgtaaatgtcagcgcactgctggccgtggcggcaggtgtgattgccgggcactggctgccggggattgtgccggtgaacgcagttctcggcggggcattaagctatgctgtcctcaatccgttacttaaccgtcgtcgtacaaccaacccggagatgacccgtgcttaatcaaacagtaaaacatatttttaatgcccgtctgccggatcgtgatggcctgtggcgtatcgacatcgataatcagcgcattatcgcgattgtgccgcagccggagggtgaagtactgccggagagcctggacgccgaaggcggcctggtcaccgcgccgttcgtcgagccgcatattcacctcgataccacccagaccgccggggaaccggcgtggaaccagtccggtaccttatttgaaggcattgaacgctgggcggaacgcaaagcgctgctgacgcatgatgatgtgaaaacccgtgcctggcagaccctgaaatggcagattgccaacggcatccagcatgtccgcacccacgttgatgtctccgatgcgaccctgaccgcgctgaaagcgatgctggaagtgaagcaggaagttgcgccgtgggtggatttgcagattgttgcgtttccgcaggaagggatcatgtcctatccggacggtgaagcactgctggaagaagcactgcgcctgggcgcggatgtggcgggggctatcccgcactttgaatttacccgcgaatacggcgtggaatccctgcacaaaacctttgcgctggcacagaaatatgaccgtctgatcgacgtgcattgtgatgaaatcgatgatgaacagtcccgtttcgtggaaaccgttgccgcgctggcacaccgtgagggaatgggcgcgcgtgtcaccgccagccacaccacggcgatgcactcttataacggcgcttatacctcccggctgttccgcctgctgaaaatgtccggcattaactttgtggcgaacccgctggtgaatattcacttacaggggcgtttcgatacctatccgaagcgccgcgggatcacccgtgtcaaagagatgctggcggcggacattaatgtctgcttcggtcacgatgacgtgtttgacccgtggtatccgctgggcactgccaatatgctccaggtgctgcatatggggctgcatgtctgtcagctgatgggatatggtcagattaatgacgggctgaaactgatcacggaatacagtgcgcgcaccctgaacttacaggattacggcgtggcggaaggcaaacgcgccagcctgctgatcctgccggcggaaaacgggtttgatgccgtccgccgtcaggtgccggtgcgttactctgtccgtgacggccgtgtgatagcagaaacacagcctgccgtcacacagatccatctggataaaccggagactatccgttacagccgcacacctcgcactgaggatcaggcttaaggttaatggtgcggaactgcatgcgcatcgcatcaaacagcaccacttttccgctgctcacctgcccgtagccggtgagcagtttgatgcactccatcgcctccagggtgccgatggtgccgaccagcggtgccatcacacccgcttccacacaggtcagactgttttccccgaataaccggctcaggcagcggtaacagggttccccctcctgccaggtaaagacagaaatctgtccttccatacggatagcggcaccggacaccagcgggatcttcagctgatgacacgcccggttcagttgttcgcggacagcgacattatcggtacagtccagaaccacatggtgagaccggatcagagcggtaagctcatcatcatccagctgtttggtaacggtttcagtccggcaatgcggattgacggctttcagcgcaatcgcggcagattctgtttttgccatcccgatacgggcatcggtatgcaggatctgacgctgaagattggagagggagaccgtatcaaaatccagcagcgtgagatgccccacgcccgctgccgccagatactgcgctgccgcacacccgagtccgccgaggccggtgatcagcacacgtccggctttcagcgcttcctgaccatcaaaatcaaagccgcgcagcacgatctgacggttataacgcagtgcttcctcatcactgagctcaatatgtacgggttcagtcgccatcagtcattcttcagtaaatggttaaaaaactcgatttcaacagtttcaccggcggcaaccgcaccgcgctcacgctccagcacaataaagcagttggcgaggctgaatgaactgaaaatatgcgagccctggtcgccggtggtttttaccaccatctgaccggactcattcactccggcaataccgcgctggaaatccagacgaccggcggattttttcagcggcgtggtggtcacggctttaaaccgcatcggcggctgccactgactgaagccggacaggcgggcaatcagcggctgcaccagctcataaaaggtgactgtggtggagaccgggttgcccggcagaccgcagaaccaggcgttgtccagtttaccgaaagcaaacggcttacccggttttatcgccagtttccagaaattaattttgccgatctcatcaagaatctgtttggtgtaatccgcttcgccgacagacacgccgccgctgctgatcaccagatccgcctgtgcatcggctttctcaaaggtggcgcgcagaatgtccgggttatccgggataacgccgagatcaatcacatcacaaccgagcttttccagcatcagacgaaccgcaaagcggttggtatcataaatctgtccgtcacccagcggctggccgaccgcctgcaattcatcaccggtggagaacaccgccactttcagtttgcgcaccacggacagctccgccagaccgagggaggcaatcagcggcagctgggcggcggccagtttggtgcctgccggtaaaacttcgctgtgctgcgcgatatcctcaccaacacggcggatattctgcccggcgctgatccaggcggtaaaggtgatcccggcgtccgacacttccgcttcttcctgcatcaccacagtatccacacccgccggtaccggtgcgccggtcataatacggacacactgtccggccggtaattcacctttaaacggaacacccgccagagcgcgaccggcaaccggcagcggggtttttccgtcccaatcggacaggcgcaggccgtaaccatccattgcggaattatcaaatggcggtacattgataggcgaaataaccggggtggcagtgatccgcccggcggcatccgtcagcgcgattgtttcagtaccggtgatcgcggccggggtcgcgagcagcttatccagtgcttcctgtaaagagattaacgaagaggtgtaactttctgtcggattagccatgatgctgtttcactcccggcgcctgctgggcgcagataaaacggataataaagagaaaggcattatggcagacttacagcacaagttgaatgatgtggcacaaaagcgtgagcgacagatctgattccggaagtcattattgcattttaaaggcttcttttggtataacgaagttacaaattattaacatattgcatttcatatgacgacatctcactccgcccgtcagacaacggcgcttcatattgcagtcagtggttttcttgcgctggtggtggccatgggaatagggcgctttgcttttaccccgcaggtgccgctgatgattgacgagcaccagcttgacctgacaaccgccggtattgtggctgcctggaactatctcggctatctggccggatcatttgatgccatgcgggcaaagcgcggtattgagctgcggctgtggaccggtttatggggcgcggtgattatcacactgctgtcagcggtgatttccggagcggtgctgcacagtatcgcacggttttttatcggctgggcgagcggctggacgctggtgttagcggccgcctggaccaatgacgcactggcaaaactcaaccgtccggcactgagtgtcgcggtttacggcggcaccggtaccgggattctgctgtgcggactggcggccatcggcattcagggcttatcgctgaccgcctcacagggctggtggatctatggtgctgcggcactggtattcagtctgtatgtcagccgctatctgccgcgcccgggggaactgagcagttcctcctccccgcacagtaaaccgctgatgacaccaaaaatccgtcgtttattgtggagctatgcgctggccggattcggctatattctgcctgccacgtttttatcgcagatggcggcggcacgtttccccggtagcctgtttgcccagtttgtctggccggtattcgggatagcggcagtcgtcggtatcgttgctgcgattgccgcgcgacgtttttttacgccgcagcggcggctggcaatcactctctgggcacaggctgcgggtattctggcggcggaggtcatgcccgggatcagtggtctggcggttagtgcttttctggtcggcggcggcctgatggctgcggtgcaactggcattccagtgcggacgtgaactggccccggaacacggtcgttatatggccggattgctgaccacctggtatgcggtcgggcagctcggcggcccgctggtgtcctctgtctccgcgtattttaccggcaaactggaaccggcgctgtgggtcgcctttgcggcactgattaccgctggtttgctggttttccgtgaccacagcgatataaaagaataatgatctcagtgataacaggattactatttattaatcctgttatctttattattcattaaaaataaaaaactgataattaaaaaacgattttataacttagcctgtttatgctttatttaattttcagggcataaagtcattattccaaaatataacagggtagtcattcccgatgagaaagaacaattttcttcagaaggcaatcaatgatctgaaagatatacgattgtggtccatgagtatcagcatgatactgacatctctgacagtaacgcactcgtcactgcgcattgtcaggcctgacaatgtgatgatcgatgtctttctcaccccggttatttatgcgggattctatatcctgataaaaaagatactgtactttatatttgaataattgagaggttaattatgaaagaattaaatcaggaacaattattgttcgtttcaggtgcagggtttatctctgccggaatgatgttcgccggtattgcatttgatattagtgctgtaatgatttcaaatatcacccagaataacgaagaaattgtttttgttgatcataaggatatttcccgtctccgttatgaggttatataacacatccgttatccggcatttttccggcaaatgtttccgtcagcgtcattccggctgatatccgcattattaacagggatttccggtgcaaacttttcatcaccaaaaccacaaaatggattaacaaaacggcgtattgctctaaaatagcagggcggcgggtattgaccggccgacgggtgcaacacagcaccgggagtcacctgaaaaatagtcggagaaggtatgtcatcattaagccgggaagcagaacttgtccacgccgcgctcatcgcacgcgggctggagacaccattgcgggagcagacactgccgccggaaacccgtaaggttcagattgaagcgcatatgacagaaattatgaagctgctcaatctcgacctgagcgacgacagtctggctgataccccgaaacgtatcgcgaagatgtatgtggatgaaattttttcaggactggattatcacaatttcccgaaaatcaccctgattgaaaataaaatgaaagtggatgagatggtgacggtccgtgatatcacgctgaccagcacctgtgaacaccactttgtcactatcgacggtaaagccaccgttgcctatatcccgaaagacaccgttatcgggctgtcgaaaattaaccgcatcgtgcagttctttgcccagcgcccgcaggttcaggaacgactgacacagcaaattctgctggcactgcaaacactgctcggcaccaccaaggtggcggtatccattgacgcggtgcattattgtgtcaaagcgcgcggtatccgtgacgcaaccagcaccacgaccaccacctcactgggcgggttatttaaatccagccagaatacccgccaggaattcctgcgcgcggcccgtcatatttaacggatgaatacttcagtcacatcagcttctgcccgtattgatgtcctcgatatggtgcgggggctggccatcctcggtatttttattctgaacatcggcggatttgcgctgccgtctgcggcctatctgaacccgctgtacaccccggtggcgtccgcaacagatatcgccacctgggcggtactgagtgtgctggttcaggggaaattcctcggcatgtttgcactgctgttcggtgccactctgatgatgctcagccgttacagccagccctggaatatggcgcggttactggtgcttggggtgatcgggctgctgcataccgctctgctctgggacggggatatcctgctgatgtacagcctgaccggtgtggccgcctgctggataatccataatgtctcctcccgctggtggctgaagctggtaccggtgctgatcctgaccggattgtttttactgtttttcctgttatcggaaggtggtgagctgaaactgctgtactggcagccgtcgcaggaaatgctggattatgaagtactgatcgccaacaccggtggtattgccggcatgctggacagaatcagcactatcagcggtatgctgatgatgatggtggttcagtatggctggcagttactggcaatgatgctgctgggcgcaacactgatgaaaaatggctggctgaaaggggcatatccgctgtctcattaccggcggctggcggcgtggctgctgatcccgtcactgctgctgcaggctgttgtgatgtggctggaatacctgaacggctggagtgtcttctggatgggcactgtcggttatccgttggcggatattttgcagccggtacagactaccgggcttattgcactgttctatggtttacagccacagctgaaaccggttgccgcctgtctgcaacgggtcgggcgtaccgcactgagcagttatctgctgcaatcggtgtgcggggtgatactgtttgagtacctcggttatttctgtcagtttgatcgcctgacgctgctggcatttgtgccgctgatgtggctgatcaacatcctgttctcaactctgtggctgcgttatttttctcaggggccggtggagtggttatggcggcaggcagccaataagctggcggcccgctgaaaccggattattgcgcggcgggtgccggttgtgtggtatccgccggtttttccggtgccgcaggtggctccggataaagcacattcaattcttccggtgtcactgccggatatgacggtacattctccggtaacgtttgtggtgccggaatcgactcctgcgggccgaggaaacgcggctcgcggttgagaatatataaatcagccagtgcgcccagccgggcaaccacttcccgcgcccggacagtaaacatattcttcggggaggaaacagcgtaacagcgcgcctcaatgcctttttccattgcgatatacagcgcccgttcacaatggaagcgctgggtgataatcgtaaagccattggtatcaaagactttacgggtccgcaccacggaatccagtgtacggaacccggcaaaatcgagcacaattttactggccgggatcccggcattcaccagatccttgcgcatcgtgctcggttcattgtaactgtgctgagcattatcgccgctcagcagcagatacttcaccttgccgctattgtatgcattcacggcaccctgaatacgataccggtaatattggttaattgtcccgtttttatagtacttagccgtaccgagtaccatgccgacttcactcggcggcaggtcattgatattttcatagatataaggcgcggttttccagctaatccagcgatctgccgcaatagccgctgctgctgccagaatgatacctgccagcatccacagaatgatccgtttccatatccgggcttttcccattattactgagacctttatcactatatagttatcataaggctaagattacttgagcggggaaaggctggcaagggtgaaaaaaagaataaaacccgcacaagtgcgggttttcagcggcagaataccggttattcgtcagaaagatgtccggcggtaaacacgatattccggatgccagaagttgcgttcgatagcttcatcgagtgcaccgtcagaggtcacagtcgcgacaccctggatctgtgcttctttggcaacctgtttggcgatgatacgggagacttttttgatgtcctcgatatccggcagcagtgagccttcgccgttaacaaccatcggtgagcattccgccagggcgcggcttgctgccatcatcatgccgtcagtcactcgtctggcaccggcggccagcacacccagaccaatccccgggaaaataaaggagttgttgcactgggagataggataggttttatccttataaatcaccggattaaacggactgccggttgcaaccagtgcatgaccgtctgtccaggcgataatatcttccggacgggcttccacacgggaggtcgggttggacagcggcatgacgaccggacgctcacagtttttgtgcatttcacggataatctcttccgtaaacagccccggctgaccggaaaccccgataagcacagtcggcttagcgttacggaccacatcttccagtgaaatcgcatcattctgcacatcccagtccgcaataatgtcacttttggtgatcagtttgctctggaaattcagcaggttcggcagtttgtccgtcagcaggccgaatctgtccaccataaagatacgggcacgcgcctgctcttcactcagaccttcggatttcatctgcgcgataatctgctcggcgataccacacccggctgaaccggcacccaggaaggcaacagtctggtctttcagttgtccgcctgcggcacggctggcggcaatcaggctgccgagggtgactgatgcggtaccctggatatcatcattgaagcagcagagctgatcgcggtagcgttccagcagcggcatcgcgtttttctgggcgaaatcttcaaactgtaacagcacatccggccagcggcgcttaacggcattgataaattcatcaacaaattcatcatactcttcgccggtgatacgcggatgacgccagcccatatagagcgggtcattcaggcgctgctggttattggtgccgacatccagcacgataggcagggtatacgccgggctgatgccgccgcaggcggtatacagagaaagtttaccaatcgggatccccatcccgccgatcccctggtcacccaaaccgaggatccgctcaccgtcggttaccacgatgacttttacattctgcttggtggcattctgcagcatgtcatcaatgtaagcgcggttcggataagagataaacagcccgcgcgcacggcggtagctgtccgagaaatgctcacaggccgccccgacagtcggggtgtaaatgataggcatcatttctttgaggtgagcattgagcagacggtagaacagcgtttcattcgtatcctgaatgttacgcaggtagatatgtttgtcagtatcgtttttaaaatcagaatactgacgataagcgcgttcagtctgctcttcgatggtctccaccgcttcaggcagcaggccgtggaggttgaagttactgcgctcttcttcggagaaggcgcttcccttattcagcagcggaaattctaacaggatagggcccgcatacgggatatataatgcacgtttgctttcgtattccagttccatgtatgactactctttgccaattgacatttttaagacaggacgcactgatcctaagttatctgaaaaatatgtacagtaattgttacgaaattagtgataccgatgtgtgaaagtgagaggcgggatagatttatattgagtaatcacgtaaaggcagatacccggaacctgcgggtatctgcctcagcaaagcagaatcaataactgaacagggcgatatcctgacaccccagggcgcgcagtgtggcagaggtactttcccactgtgacagcatggcgttactgccttccaccagcacggcgcggtggatgtcatgcaggtcgccgccggccatattcataaagatcagnnnnnnnnnnnnnnnnnnnnnnnnnnnnnnnnnnnnnnnnnnnnnnnnnnnnnnnnnnnnnnnnnnnnnnnnnnnnnnnnnnnnnnnnnnnnnnnnnnnnnnnnnnnncgcagcctgcagtggcggcagtcccgggttaaaggcggcattttcaatatacgcaccgctgtagatgcgtccgcggctgtcctgtaatgctacactgctgtgggaatgagaatacggcgcatggctgcggttggcagcttccagcgcttttccgaccaccgcattggtggcgaggaaatgataaccatgatgcacctggtcaaataaccgggtttcaattcccagatccaccggcccgaaagcatgaggcagcagggttttcagcggcatggcagccagttccggtaactgaatcagcaggtctgtgccgctgttcagttcattcataaactgacggcagtggccgcacggtgtgtaattgacggtgactttgcgcaaacctttctcgccgcgcagccaggcgtgggtgatcgcgctctgttccgcatgcactgtctgttgtaacggcacatggcagaattccatattggcaccgaaatagaggttaccgctcagtccgtgtgcaactgcgccgacattaaaccgggacaccggcgtcacggcacaggctgcggccagcggcagcatagccagtgcgagtgcatcctcatcagtacctgcggcgctgcagagtgcagtgatctgtttggcagataagtatcccgggaaagtatcagcacaaacagtgtccgtcagcagggtctgtaacggggaagggagtgtgttcagggctgcatgaaagcggttttgcataaaatgacctccattatcaatgagatcattctagcgggtagttatacataatgaacgtgatttttatcacgttcattatgaaacgaatgaaacaaatgttgaacttgcgagatgggactcaaattttcaggtcaaccgaataatgccagcagcaccgggaagataaatggcgccatcagggaagtaataatcccgcaggtcattaatgccagagagctgtaagcaccttccacataatcctcttccgcgcagcgggcagtgccgagggcgtgagaagccgtacccatcgccaggccgcgtgaggctttggtggtgacccgcaggcgtctgaacagggtatggccgaaaatcgcgccgaggatcccgacgaaaatcacacacacagcactgattgccgccacgccgccgatggaattggacaccgcgatcgctatcggggtggtgactgacttaggcagaatagaggcggcaatttccggtgtcgcgcccatcataaaggcaatggcggtaccggtgaccatggcaatcacactccccgcaaagcagatggtgatgatggatttccactgtgcgcggatctgatgcagctgttcatacagcgggaatgccagcgccaccacagcgggttgcagcagatcgttaaggatgcggctgccctcaaaatagtggttgtatgaagttccggtgaatatcagcagcggaataataatcacgatggatatcagcagcgggtttaataccggcagcttaaatttgatatagatagctctggcgagaaaatagacgccgatggtaagcgggagcgaccaccagatatgcgttaacatttgcgtttctcttgttgttcggtgtgttctgctgcggcaaccgcatcggcttcctgttgttcaggaaccggaacatggcggcggtgaataaattcagaactcagcgccacagcacacatggcgataaaggtactgacaacacaggcgacgaggatcggcagcaactgggcgctgagggtatcgtaatagttcatcacaccgataccgatcggcagaaataacattgtcatgtttttcattaataaggtgcagccgggctgaacccagtgcgccggaacaatctgcagtgcgagcagcacaaaaagcagcagcatgcccacgatgctgcccgggacggaaaacggcagtaataccgcgataatattgccggcaaacaggcacagatacaggatcagaaatgcccggagatagcgccagccggtttccgctatctgttttggtttcatgataatgttccttcttggatgaacccattcatcatacaattaactttttatttgtgctacaggtcacgaaaaaaaatcatacatcggtgtgaacgtattggtcgttttttatacttcgtataatcataaaggacagattgtaacggacgcgaaataagatatcagatacaatagtgtctgttttactaattatttgttctttttggataccatgatatccataggaggtcttatgctatcccggctgttattaactgatgcggatgtcagcaaagcatttgccgtctggctgcgtaaaaaacgcgaaagccggaaatggtcgcgtgacgctctggccgcccggagtctcgttcccgcatccacgataaaaaaatttgagctgaccggccgcatatcattccgtcagctcctgacattatggcagtgtctggatgatatcggtgtactttatgatgttgtcgacccgaaaaaacgcactgaggtgaagataccacagacaatagaagaggtattgaaagatgaattttaagcctgttcagaaactgacggtaatgcggacattatcaacgggagagacaacagaagccggaacgctggtacagaaccggacaggcgttttttttcagtataacagtgattatctccggctcttcggtaacagttcgcccctgacactggagaccagcactgagcttcagccagcaccggccagcccgcatgatggcttacacggactttttgcagatagtcttccggatggctgggggcgcttactgcaggacagagtattccggcagcagggtattgcactgcataatattactgcgatggacaggctggcatttgtgggacatcgtggtatgggagctttttcctattatccggaatcagattatcagcctgaagaagagggatatgcagacctgatttctctgggaagagatgctcaggcggtatttgagggtgagacggatgttgttctgtctgctctggtggcagcgggaagttccggcggagccagacccaaagcacagctttatttcaagcccggggatttttctgcctgttcaaccggtgaaattccgggcagtgaagcctggctggtaaaatttacgtcagcatcactgccgctggggcatgatgagggattatgtgaagctgtttatctggatcttgccggacgggccggacttaatccgccacagtggcgattgatcgataccggaagccggggagcagcaaaagcctggctggccgtaaaacgttttgaccggacagataatggtgcagataaacagcccggccgtttgctgatgcacagtgtgtgcggattactggatgcagatttccggataccgtctttagattatgaggagctgattcgtctgagcaggatgctgtgccgttcagtccccgccgggcaactgcaattccgtagggccgtatttaacctgctggctgcaaatcaggacgatcacactaaaaactggtcttttctgcaatcagatgacggtcagtggcagccggctcctttttatgatgtgacttataatccaaatggtatgaatgagcatgcaatggctttcggcggatacggaagaacaccaccggcagaaacaatgaagcatctggctgaactggccggttttgataactgggaaactgcgcgtcaggcaattggggagatcgcggatgttgtggccggttttcctgagctggcaaaagcagccggtgtttcaccgggtatccgccgggaaatagaaagcacgctgacacagcggcggcaaagtaatcagcatttattgtctgtataaaaaacggcagcggatctgaatgatgcgctgccgttatttttactggtgaattacaggatttacttcacctgctgacccggttgtgcaccggaatccgggctgagcaggaaaatctcgtttccgcccgggcctgcggccatgaccatgccttcagagatcccgaaacgcattttgcgtggtgcgaggttggcgaccatcactgtcaggcggccttccagcgctttcggatccggatacgcctggcggatgccggagaagacctgacgggtttcgccgccgagatccagtaccagtttcagcagtttgtcagagccgtccacgaaatcggcagacataatctgtgcaatacgcatatcgactttggcaaaatcatcaaaactgatggtgtccgcaatcggatcatctgccagagggccgctgaccggtttggcggacatcgctttgatatcctctttggaagcttcaatcatctcttccactttcgccatttcaatacggctgaacagggctttgaagtctgcgatctggtgatccagcagcggtttggcaatgccgtccagtgtcagttcctgattcaggaatgcttcactgcgggccgccagttccggcatcaccggtttcaggtaggtcatcagtgcgcggaacaggttgatacccatggtgcagatggcgtgcagctcatcatctttaccttcctgtttcgccaccacccacggtgctttctcatcaatataacggttagcgacatcagccagcgccatgatttcgcggatagctttgccgaattcacggctggtgtactcttcgctgatggttttttcagcatcgacaaactgctgatataactcaggttcagccagggttgcactcaggcggccgttaaagcgttttttgataaatccggcggtacgggatgccaggttgaccactttgttaacgatgtcactgttaacacgctgaacgaaatcttccaggttgaggtcgatatcatcaatacgtgaagagagtttcgccgcgtagtaatagcgcaggctgtccgcattcaggtgattcagataggtgcgggcctggataaaggtaccgcgtgatttggacatcttcgcaccgttgaccgtcacatagccgtggacaaacaggttggtcggcttgcggtaaccgctgccttccagcatggcaggccagaacaggctgtggaagtacacgatatctttaccgataaagtggtacagatccgcgtcagaatctttcttccagaactcgttaaaatcgagattgccgcgtttgtcacacaggtttttgaatgatcccatgtagccgattggcgcatccagccagacatagaagtatttgcccggtgcatccgggatctcaaagccgaaatacggtgcatcacggctgatatcccactgctgcaggccggaatcaaaccactcctgcattttgttggcaacctgctcctggagcgcgccgctgcgggtccatgcctgtaacatgtcagcgaaagccggcaggtcaaagaagtagtgctcactttcgcgcagcaccggtgtggcaccggagaccacggagcgcgggttaatcagctcggtcgggctgtaggtcgcgctgcacacttcgcagttatcgccgtactggtcttccgctttacatttcgggcaggtgcctttcacaaagcggtccggcaggaacatgcctttttccggatcatacagctgggaaatggtccgggtttcaatatggccgttctttttcagtgccagataaatgttcccggataacacccggttctcctcgctgtgcgtggagtggtagttatcaaagctgatggcgaaatcagcaaaatctttctgatgctcgacgctcatgttggcgatcatctcttcaggagagatcccctgctgttgtgccttgagcataatcggggtgccgtgagcatcgtcggcgcagatgaagtgaacctctttgccgcgcattcgctgaaaacggacccaaatatcagcctggatatgttccagcatatgaccgagatggattgaaccgtttgcatatggtaacgcacaggttaccaaaattttattagcgatctgagacatagagtatttcacttcctcaaataataaagggtctttgatgttaaccgatcccgtccacccctgccagcagtaatccggctttgtgtgtggttttccggacttttttctgccgtgaacatccggcgataacccttcttattgcaggggatttgttttgtgcgggtttgcgcggaatgactaaattaatcagttggcttctgctatcattgaagccgatagttacaggcaataaaaacgataaatctaaggagccgggatgaatgcgaaatcccccggggagatgaaccctgaattgctgaacgaccaggtcgcgcaggtactggcgacatttgagcatccgacactcaaacgcaacctgattgccatcaaagcgctgaatcactgcgcaatgctggatgatgtgctgcatgttgagctggtgatgccgtttgtctggaagcgcccgtttgaagcactaattgaagcaaaaaccaaagaattacgcaaagtgaccggtgcggcagcggtggactggaaactgcgtcatgatatcgcgacactgcgccgggccaatgatctgccgggcattaacggtgtccgcaatattctggcggtcagttccggcaaaggcggtgtgggtaaatccagcactgcggttaacctcgcgctggcactggcggcggaaggggcgaaagtcggtatcctcgatgcggatatttacggcccgtccatcccgaacatgctgggcaccaccaaagagcgcccgacctcaccggacggccagcatatggccccgattatggcttacggtctggcctccaactctatcggctatctggtgaccgatgataacgccatggtctggcgcggtccgatggccagtaaagccctgatgcagatgttacaggataccctgtggccggatctggactatctggtcatcgatatgccgccgggcaccggtgatatccagctgaccctctcacagaacatcccggttaccggggcggtggtggtaaccacaccacaggatatcgcgctggtggatgccatgaaaggtatcgtcatgttcaagaaagtgaatgtgccggttctggggattgtggagaacatgagtgcgcacatctgcagtaactgcggccatgtcgagccgattttcggcaccggcggggcagagaaactggcggaacgctatcacaccaaactgctgggacaggtgccgctgcatatttcgctgcgtgaagacctcgatcgcggccagccgacggtgatgcgtgacccggacggcgagtttgcggatatctaccgtgagatcgccgtaaatgtgacggcagaaatgttctgggaaggggataaaatcccgacggagatcgctttccgcgcagtataagcgggatttatttctgctccggcatgtccggaaagtcaaaaagaccggcgcagtgatgtgccggtctttttttcgggtggccataagagcggttaccccgaaataatgaggcaggatgcccgattatgctggaatctcacgccgttactccctataattcagcgccgggcggacacgttttgttactcacggccggataagcattaaaagaggccgcagcagaccgtttcggtttttttctctcctattttcaaaccgggttatttcaattatggctgacacagcacagcagcagtgcactatcatcggcatcaccggcgcatccgcgtcaggaaaaagtctgattgccaacacgctttatcacgagttacgtgctcaggtgggcgatcacaatatcggtgtgattccggaagactgctactacaaagatcagagcgatgtgccgatggaagagcgcatcaaggtcaactatgaccatccgggctctatggatcacgaattgctgttacagcatctgaaaacactgaaatccggtaagacgattcagttaccgcaatatgattacgccgagcatacccgcaagccggaatcggttctgttcagcccgaaacgggtgattattcttgagggcatcctgctgctgacagacaaacgtctgcgtgagcagatggacttctccattttcgtcgacaccccgctggatatctgcctgatgcgccgcatccgccgtgatgtgaatgagcgcggacgcacactggattcggtgattgcacagtacaataaaaccgtccgtccgatgtacctgcaatttattgaaccaacaaaacaatatgctgatatcatagtgccgcggggcggtaaaaaccgcgtggcgattgatattctgaaagccaaaatcagtcagttctgcgagtaagccgccgacaacgattaacccgcgtttatccgccggtgataaacgctgagttttataaggatgataccatgcgactttgtgaccgtgacattattcagtggcttgatgacggcagactgaccatctccccgcgtccgccggttgagcggatcaacggggcgaccgcggatgtccgcctcgggcatcagttccgggttttccggggccataccgccgcgtatattgatctcagcggcccgaaagaagaagtgaatgcggcgctggaaaatgtcatgagtgatgaaatcaccctgactgaagatgaagtgttctacctgcatccgggggaactggcactggccgtaaccctggaatcagtcacactgccggacaacctggtcggctggctggacggtcgttcatcactggcgcgcctcgggctgatggtccacgtgaccgcacaccggatcgatccgggctggcacgggcaaatcgtactggaattttacaactcaggtaagttacccttggcactgcggccgggaatggtgatcggcgccctgagttttgagccgttatccggctccgctgaccggccgtataaccgccgcagcgatgcaaaatacaaaaatcagcagggagctgtgggcagccgtatcagcgaagattaaacggcggacagtactgtccgccagcgggtttaacagagaatgggaaaggaacagggattatgaaacgatttttcaccacgctgattattctgcttgtcgtgatagcggcgggcctcgcggccttaatcctgctggtgaacccgaatgatttccgcgactatatcgttaacaaggtgaaggaagacaccggttacgagctggtgatgaaagatgatatgcgctggcatgtctggccgaaactgagcatcatcaccggtaaaatgtccctgactgcccccgatgccgccgaaccggtggtaactgccgaaaatatgcgcctcgatgttgaactctggccgcttctgtcccatcagttatcggttcgtgaagtgatgcttgacggcgcactgctgaaaatcctgcctgaaaccgaatcaaaagagaagaaaagcgctcctgttgcgccgggtaatcagaaagcccgcccggtgcctgtcgaacaggaaaacaaatggtcgtttgatgtcgaccgtatccgtatcgccaacagtctgctggtctggcagacagaagacggttcgcagatcaacatgcgcgatattaatttctctctcgagcgtaatacccctgaacgctatgtgatagcgctgaacagtaatattctgcgcaatcagcaggaactctctttcagcctgagttctgatattgacctctcccagtacccggtacaggtcagcggcaatattaaccgcctgaattaccgtctgtccggtgccggtctgtatgccaacggcatcaacggcaacggtacgaccacctatacctggcacgaagcggtcggccaggcaccgcagtccctgatcctggaaaacctgaaactgagcgctaacgaaagccagctcagcggtacagtggaagcggcactcggtgaaaccccgcgttatgatatccagctgacctcctcaaaactgaatctggataacctgctcggttatgagcgtgccgtacatgcagaaaacggggagaaaaccccggttgccaccaaaccggcggtggttaccaccggcagtgatgcggataaatatgatctgacctttatgaaccacttcaatgccaccctggcgctgaatgtggattccctgatttaccagggaatggaaatcggccagctgacggtgaaagcagagaaccggggcagcatcacggaaatctccaaaatgaccggcaacgtgttcggcggccgtttctctctgccgatgacgatttattccgaaaaagtccctgcacagctgcgcatcaaaccgctgttacagaatattgatgtcaaaccgttgctggcagcgtttaaaatgccggaaaaattcaccggacgcctgagttttgacggcgatctgcgcggtaccggttatgaccaggacgcggtcttaaataactggcgcggtgatgtggctctgaccatcactgatgttaagctgctcggcctgaatattccgtatcttattcagcagtcgctctcccaggcgacagataaagtggcgcagccggaatcgatggatgctatgactgaagcgaaaaaactggaagctatcggtaccctgaataacggtgaagtgaaaatcagtaaaattctggcggtatccgatgcctttaatattaccggcagcggccggacaaacctggtgaaacagaatctggatgtgaacctgggggttcagatcttaaaaggctgggggaaaaccaatgacctggtgacctggctgcagtctgtccgtattccggtggtgctgttcggcaactgggataatattcagtataagttcgaagtggaaaacctgttgcgtaatcagatacagcaacgggtaaaacaggcagccggagagctgctgaatgaaaaaaccggaaaggatctcaaagctgtggaatccttgcttaaccggttataaattcgcggacgatttatacaaacagagcagtgacgataatttatattgtcactgcttttttaatgccggaggccggaatacttaaatgatacgggtaataacccaggttcattgacgcatatcatttaatctgttcccggttttcggcagagtgcattaatcatttttataaataaaaataccagacaggagcagaaatgttagatcttcttattggtgctgtcgtcgccgtcggcgtcgggcgctatattattaaagggtattcagccacaggggtgctgatggtcgggggcttactgcttctgatcatcagtgtcatcatggggaaaaacatcctgccgtccgccgccacctccaccggctggggaccgacaaacattattgagtatgttaagtacttgctgatgaaccgcggcggcgatctcggtatgatgatcatggtactgtgcggctttgcggcttatatgactcacatcggtgccaacgacgtggtcatcaaaatggtctccaagccgttacaggtcgtgaactctccgtatctgctgatgatcgtggcctactttattgcctgtctgatgtctctggcggtttcctccgccaccggtctcggtgtgttactgatggcaaccctgttcccggtgatggtgaacgtggggatcagccgtggtgcggcggcggctatctgcgcctctccggcggcgattatcctggcaccgacctccggtgacgtggtgattgcggcagaagcctctcagatcccgctgaaagagtttgcgttcagcctgactctgccgatttctatcgtggcgattgtatctatggcgattgctcactatttctggcagcgtttccttgatcgtaaagaagatatcaaatctgagatcctggacgtcaaagaaatcaccaccaatgcgccgaaattctatgccattctgccgtttatgccgatcatcggcgtactgctgtttgatggtaagccgttcagcatcggtttcctgagccatatcgtgctgcctgaattacacatcatcacgattattgtcggctgtattattctgtctgccatcattgaattcctccgtggttttgacggcaagaaagtctatgccgggctggatgtctgctaccgtggtatggcggatgcctttgccaccgtggttatgctgctggtggcggccggtgtgttcgctcagggcctgagcaccgtcggctttatctccggtctgatcagcctggcgcagtctttcggttccggcgcaatcatcatgatgattgctctggtgattattaccatgctggcggcgatgaccaccggttccggtaatgcgccgttctatgcgtttgtggagctgatcccgcgcctggcacagcagatgggtatcaacccggcgtacctggtgatcccgatgttacaggcatccaacctcggccgtaccatgtcaccggtttccggtgtggtggtggcggttgccggtatggcgaaaatttcaccgtttgaagtggtgaaacggacatccgttccggtgcttgtcggcctgctggtggtgattgtcgccactgagttcctggtgccggtaacactgtaaaacgacacgggccgcagcggttatccgctgcggcttttttgtatcagtacggaaagagtgaggttggctttggataagatttttaccggtgtggtgcagggcacggcgctgattttaaaaattgaagaaaacaatgatcatctgattcatattgtgcagtttccggaggagttgttaacggggctggcgattggtgattccgtatcgtataacggctgctgcctgactgtcgcagcgattgataacannnnnnnnnnnnnnnnnnnnnnnnnnnnnnnnnnnnnnnnnnnnnnnnnnnnnnnnnnnnnnnnnnnnnnnnnnnnnnnnnnnnnnnngccatgtcgggttttatcttttcaccgataccctgctgaaaaccgcgctcgggcggctggctgcgggtgataaggtgaatatcgaaagagtggcggtctgatgatataaaaaaaccccgtatctgacggggtttttgctctgtaaggggcgttaattacacacggttaaaggcaagaatacggactgaacgcaggtcagcctgagactcgtcggcaattttctgagtagcttgttctaatgcatcccggggtgacacaccggcttcggtttctgtgatctgatgtccctgtaaagtgtctccgttacgggcacgcactttgtacgatacaaaccaataatccatatcatcacctgcttctgtcattaatcgtttaatcaccatagcggtttacgtcactgattaatgtgaccggaatcaatcatttaattgtttttctgtccggacggcagcgcatcagcctgagccgcgatatcttccagaatcgtttcccgctcaaagagcaattgttgttcacggcttgaagagcaggtgaacagcagcaggataagcaggccggttgcggcggcggaaatcagccatgaacggcgatccattttacggttacggacaccggaggcagcagaatacagccaccccagcacagcaccgcaaatcagcccgctgaaatgggccacattatccgtcaccggctcctcatcatccggcactgcactgagtaccgacagcacgatcaggacaatcatggtgatcagcagatttttataacgcaggctgtccgcgacagacacggacggatctttccgggcccggataagatacatcacggtggcaccggcaagtcccataatggcgccggatgccccgacgccgacagtcaccggaatgccggacagcggaggcatatcgttctgagcagcctgccagagtgcgctggtaaaggatgcggaaataccggtgaacagatagataaacagcattctcatcttaccggtcagtgcttcacagttaatgccgaacaccagaagggcgatgagattgacgcccagatgaaacggatcggaatgaagcaggatgctggttacatagcgccaccagtcaccggtcagtgataactgatacacactgccgcctgccagcagcatattgtagacctggtctgtcagcggcgaagcataattcacctgccagatataagccccggtattgagcagggcgaggaaaaaggtgagcagcatggctgagagccggtactccggccgtgaaggcagaaccacatcaccccagggatttatgttattcattattattttgcggataatttgatttgattaagtctatttgaggggcaggcgggctgtaaacaggaaaaagccgggataattatcccggctctgactggtgcggatagcggcaggaattaattattttccagccattcggtgtggaacacaccgtctttatcagtacgtttataagtatgtgcaccgaaatagtcgcgctgtgcctggatcaggttcgccggcagtaccgcgctgcggtagctgtcataataggcgatagcggcagagaaggtcggtgtcgggataccgtgctgaacaccgtagcagaccacatcacgcagtgcctgctgatattcatcggcaatctgtgtgaagtaaggggccagcagcaggttagccagtgccgggttttccgcatatgcgtcagtgattttctgcaggaactgggcacggatgatacaaccggcgcggaagattttcgcgatttcgccgtagttcagatcccagttgtactcatcagaggcaacgcgcagctgtgagaagccttgtgcataagagacaattttacccagatacagggcgcggcggactttctcggtaaactctgctttatcgccgctgaacgcagccgctttcggccctttcagtactttggaggccgcaacgcgctggtctttcaggaacgagatataacgggcaaatacggattcggtgatcagtgtcagcggcacgccgaggtcgagcgcgctctggctggtccatttaccggtacctttgttggcggcttcatcaaggatcacatccaccagatagttgccgtcttcatctttcttacggaagatatcttttgtgatatcaatcaggtagctgctcagttcgccgttgttccactcactgaaaacggtggccagctcatcattgctgatgccgagggcatttttcaggacggagtaagcttctgcaatcagctgcatatcgccgtattcgataccgttgtgaaccattttgacataatgaccggcaccgtcagcaccgatataggtcacacacggctcaccttcagcctgtgccgcgatctgtttcagaatcggggcaaccagttcgtaagcttctttttgtccgcccggcataatggacggccctttcagtgcgccttcctcgccaccggaaacgccggtgccgataaagttaaagccctgtgcggacagctctttgttacggcggatggtgtcctgaaagaaggtgttaccgccgtcgatcagaatgtcgcctttatcgagatgcggggtgagggacgcgatggttttatcagtggcttcaccggctttgaccatcagcaggatacggcgggggtttttccggggggcaacaaactcttcaatgctgtagctgggaaccagtttttttcccgggttttcagcaatcacttcatcggttttatctgaagagcggttaaaaacagaaacagaataaccgcggctttcgatattcagtgcgaggttacggcccataacggccataccgacaacaccaatttgttgtttggacatgaagactccttcaggaattgacccgtgactaacgacgatttcgttagctgactgttaatttcgtcacagtttaacgcatgtaaaggctgcgtggtagcgattgatgcaaacggtatcgtcatagcgcacaacaggaacagcggcaaagtgcggaattttttattgctatttggccgcacaatccgcattattccggatgcagcataagctgtgtgaataaaaggtaaaactaaccgtatggaatggatcgctgatccgtcgatttgggccggcctggccacattaatcgtactcgaaattgttcttggtattgataaccttgttttcattgccattcttgccgataaactgcctcctgcactgcgtgacaaagcccgtataaccggtctgctgtgtgcactggtcatgcgtattattctgctgttcagcctctcctggcttatcacgctgaccaaaccgatgtttacgatgttcggccatccgttcagtgcgcgtgacttaattatgctgatcgggggtctgttcctgctgtttaaagccacaatggagctgaacgaacggctggaaggcggtgagcataacgacgggcagcagcggaaaacctcaaaattctgggcggtggtggcacagattattgtgctggacgccgtcttctcgcttgactctgtgatcacggcagtcgggatggtggatcacatcggtgtgatggtcacagcggtgattatcgctatgctgctgatgatctggggcagccgtccgctgacccgctttgtcaatgagcacccgaccattgttatcctgtgtctcagcttcctgctgatgatcggtttcagcctggtggcggaagggttcggttatcacattccgaaaggttacctctacgcggcgatcggtttctccatcatgattgagatgctcaaccaggtggcaatttttaaccgccgtaaattcctgcgcgggagaaactctctgcgtcagcgcacggcggaagcggtactgcgtattctgagcggcaagcgtgaatccgcagaactggataaccgcacagcggatctgatttctgataatcaggaaatttttgacccggaagagcggcagatgattgtccgcgtgctggggctgtcgcagcgtaacgtcaacagtattatgacctcgcgtcatgatgtggagatgctgcggattgatgcgaccagtgatgaaatcgcggcgctgctgattaaaaatccgcacacccgcgtggtgatcaaaggctcggcggatgatgatgaactgctgggcgtggtgcatgtgatcgacctgctgcatcagcgtttacagcaggacacgctggatctgcatgcgctgatcaaacagccgctggtcttccctgaacagctgtcattactgaaagcgctggagcagttccgccaggcgcagacacactttgcttttgtggctgatgagttcggctatgtcgaaggggtggtgacactgacagatgtgatggaaaccattgccggtaatctgccggtcagcggtgttgagaatgatgcccgccatgacattcagtttacggatgataacagctggatcaccaacggctttatgccgctggaggatttaatcaactatattccgctgacactcgatgaaaaacgcgagtatgaaacggtggccggtctgctgatggagcatttgcagcgtctgccgaaagtcggtgagcagattaacattgacggctgcctgtttgagccgctggaaattcagaatcaccgtattaaccgtgtgaaaatcacgctgccggaaaatccggaagaccgtgacgactgactgttaaaatgataacgccgccggaaacggcggcgtactgaaaagatgttcagctgtcagcggtagatcagggtaaatccggccgtggtctgaatcagcccctcacgaatttgcggctctgtctgataataacgtccgctgaccgcaaaatgatagataccccggataatttcaccgccttttaccacatcccactgagtatcatcatcaatataaaccggcatatctgtgccgagtggtttgacattattatcaattagtacctgtacccctacaccttttgcggcattctgtccggtcaggttgttcagtaataccccctggcggcgcagcgcggcggaggcttcattaccggcggtgccttcaaaaacagaggcacggataccctgaataaagttggtgccgccgcagtcgatatacacatccacggattgcgggccgttttccccgtaggccgtgctgccgggaccggagaactgccctgatgccactttaccgaggctgatgatctgctcgcggttggaaaaacggtactgacaggactctttcagatatttcactgcgatattactggtttttttcagcggaattgaccatcttccgtccagtaccaggtttccggccgggtcataaaccgaaatagccaccggataaggtgatgcaatatgcaccggtaaaaatgaaagcccctggctatcatccggctgttcatcagttcttaccagtgtcactttgacgcccagtgcaaactggttttgtgatgtacagggaagatcaatatcggttgcaccatttacgcctattttactgtagcgggtaattgatgggttaacgtatgttccggaaatttccccgccgatatccagtcggtaancccgaaaattcccccgccgatatccagtcggtaacccacgcccgggatattggactgaattacagcatacccgtctttctcacccagaattgttccgataccttctgttgtgacagttgctcgataggtttcaccacgggtgcagcggaagcggggcgatgaataacttaagtgaaaatgcgggatatactccgtttcaatcaactgtccgttggtattccgtataggatcgccaaaccggtaactgcctgagttaaaaacacctattgtggctttgatatcctttgccccccgccagacaggggcaacgtggcctttaatgtccgttactgtgctgaaagcggctacttgtgcactgaccatcatggcgaagacaaaaagcagtgatttaattctcatcattaattatcccgcaggtcgctgtcacgaccgacactttatcattcatcaggtatttgcgattaatctcagtcaggtcaatcacacattgctgtccgtcggcggcactggtatccacgcggacggttgtcattttttcattcagattgaggaagattttcccgccctgaccgacaaacgtcagcggctcattttccggcccgtacactgttgcacccagcggtaacagatttccattagaatcgcgggttttcagtaccaccggcgcaccgatacgggtatccagctcaataaatatcgcgctgccggagcggggaattatcgtccgttttgattcttccaccgtgtaattctgccccaggtcgcgggtttcgataccgaccaggtttttgcggtaaggcacaaggtttggctggatggcataaccggcactgtttgtgtgtgtatccgaccccaggacctgtgcattttcaatgccttccgctttaataatggcgaatgaatttcccagcgtattggcaaacagtaatccgccgctgtggccgacaatggcaccggacgcactcatacttaatgtttttgagtcaggataatggctgtaatccgctgagaaatccgcaatgccggttttataacggccgcctgctgtggcgtaacggctggtttcatcctgatattgatcctgtccggcggataatgagtaatcaagagaatccccgagactgccgctgacaccggtaccgatattccggttattgtcggaattgagataattggcggtcagataggtgttatttccggcagacagcggaatgctcagtgataatgaaaagagggtgtcattattatactggttatcggttttctggagagaagcgataaccccggcatcatacacggtggtggtataagacagggtgtactgcttactggtttggctgctgttccagtaatcggccgttgaaccgctgacactgacactgccggcgttatacggcaggcgctggctcatcgacagggtgtactgggttttcagtttataggcattattctgctgctgttcatcatactgataatagccgtgattcatctgcatcgcgttataaacgctgacatagtttttggtatcaaactgaatggaagagaggttgatataggtttccgttgacggaaatgttttgctgtaactgagcttataagaattcccttcaagggttttatcattatttttcagtgtggctttggcgtggatcacttcaccgttaaaagcaccgaccggggtattaatggtcattccggccgcgccggatacataatcgttactgaataccgtacccagtgaggcagaaatacggttgctgacaccgtaacgtaatgaggcgtcagttaccggatcaccgaataccgtattacggtagcgcagtttacccacgccgacatcgaaatccagtttacccggacgggtaaaggctaaaccgctctgtaccgggatccgcattttctgaacactgccgtcggattcaataatatcgaccagcagatcccctgaataatagattggcaggagatcatttatttcgaacggcccggcaggtaccacggtgttgtaaatttccgttccggaatccgcaagatagacctttacctgcgcctgggttttggcgatcccctgaatcaccggggcaaacccggtctcacggctcgataacatactgttatcattacgtaaacgcacaccccgtaatgaactgccgttggagaaaaccgagccggaataaaaatccccgagtgtcagttttccttttaccgaatcaatatcccgttcaagccaggtcataacagcggtgtatttttcattatttatctggctgtcattacggaaacgccatttggaaaaattaatgccggaattcagcgttaatgaattggtggtattggaatagccttctgagcgggtggtatagcggttaaaaaaataattggtaaatataacagccttaccttcatcccagttaaccgggttactttccggcggaaccggtttcagtaaatcccgttgcgggacagaaagatgcagttgctgtttactgaaaataaattcaaatgcggattcagggatcagatcagataaataaaagcagctgttttcatcctgcgtttccgcctgtttatgaaaggcatcaacgagtgaattgattaatcccattgaatcaaccaattctggtgttaagcagacctgcaatttttcagctttattattttccagcttaatcaggaatttcccggtattctgatcgttgacataaacatcagtacggtataacccggtcatctggtcattatcggtggtcaggcggcgtaaatcgacatccccgctgaccgcatagtttttaataaaggccgggttaaattcataatcatcgtcatcatcatcagcaaatgccacactgaatggcagcgtggcggaaaaaacaataacaggaagataaacaggccatttcatacgcgtttttttacaaccttaattcacggttttttcagcgtctgaactgccgccggaatcattgacataactgaatttaatgaccgcggatgacggaactgtggttaaccggcttatttttgcctgtgtgctgccgccgaaaggtgccatcatggcaagacccggctgtacatcatattcctgttgattaacaatcactttggctttatccggcgtgatataaaatgcactgttgtttttagcggataaccagatgtccgcgccttgttttgttattgtccagtcagttttatcaacggcggaattataatcagcggcaatcgcggaagggcggtaaaagagtttgaattttgataagacagaaatctgcaggctgttttcaatggttttgcttttcggcggaacatccagaatattgagggtgaatattgtttcacgatcagcaggaagcggttcgccggtatacagaatacggacggtctgcacatttcccggtttaattttaaataacggtggcagaacgacaaaaggagtatcttcaatatccgctttggtgacttctttaccggaacgtttctcagaaaaaccggttgtcagccagacctgactcagcgctgttttttcaccactgttttcaatattaacggatatttctttatcatcggaaggatatacaaaacgggttccggtcaccacaatagcggcgcttgccggaatagccaccaacgacagaaagacagctatcatctttttaatcatattcgctcttatatactcttattttgatgagtggaatacagaaaaggaaacagggtgattagaacaaattcatcaccctatttccattatattttataaataaggattatttgtaaataatttcaaaatcaacgttagattccactaaacccggctcagaaacacctacggcataatacttagcaatatagtttaactggacatttccttccgctaatttagtaaagccgacattctgattgtctttatccatacccagtttaataaactggtcattctggttatacagcgcaatattgacgtttttggccgttgttgcaccaatacctttggtattcagggtcttggttgtcaaatcaatgttcgggccgacaaaacttaaaccgacgtcagtcacggaatctgctgccgcacatttggataattcaatggtgaatggggtagtacctgtggtatcaccgacattctgtaatgcgttggcactgacttttggtaattcaacggttttatctttatttgaaccttcaaccacacagctttgttttaccacttcacctttaaaggtaattttaccatcagccgcaacagcacctgctgaaatagcagtaaacaggatagcagtaattaaattaatctttttcatggaattctttctcgtcgtcgtaataatgaatttggttatatttttgggtaagtaacttaacttggaaatactctaacacaccccttcatacctttaaaattgatctggcgcaagtttcaaattggtaaattttttatctgaaaaaatgaccatttatggaatttaaatcccgactgaatcgcttcaaatggtttgaaaaactaaattaagtccgtagtggcgctataaaacaaacatagatgcggatcgacgagaaaactttatgttcacgagggcgtgatgaaatgtaactcattgataacaaatgagtggcataaaaataacaccagtaaatattaactatacatgtactaataccacatcttattttgtttatttagaataatgctaagtattaatgaccaatatttaacacgcaattgattgcctgtgtttaaataaaacaatgacaatgtgtttccggatgagacaagcaggtttattttttattgctgagtcttctgatgtctttgcggcaggtttttaatggccataactgaataattaatttttctgatattgattaccggccattccggttgttttaattatccggaatgaataatcatttttaaaaaaggaatatttatttttttattacggcaggtaatagctaacatgttgttaaaatgatgtttttacttatcttatgcgttaattatgcaatgtccgtgttcaggaagggtaggtgatcagattttgacacacaataattttacattccccgctttctctgctttatttttactgtcaatcgtataccctgcaaaccctgaattgtggttatgtatcagatttctgtaaggataaaaaaccgcctatgtctgttgtgacactgatccttgttttcctgctggctgtgattgccagtgtgtttatctcccgtctgctgggggacaaaattccgctgccttttattcagattgctattggtgcggggttatcactcttcggttttgatgtggcgtttgagccgcatctgttcctgttcctctttattccgccgctgctgtttctggatggctggcggatcccgaaagaagcgctgttcagtgatatcaaaccgattttctcgctggccatcggcctggtgtttttcaccgttgtcggcatggggctgtttattcactggctgatcccggcggtttccctggcggttgcttttgcactggcggcgattttgtcaccgacagacccggtgtctgtggcggcaatgactgtcaatgcgccgctgccgtcccgtatggcccatattctggaaggggaatccctctttaatgatgccagcggcctggtgtgtttcagttttgcggtaggtgcggcactgaccggaacgttttctctgccgtcggctgccgggaaatttatggtggtggcgctgggcgggattatggttggcctgctgattgctatgtttatcgggaaagtgaaccagttcctggtgcagcgcaccggggaagacccggccattcagattatgatcagcctgctgatcccgtttgtctcttatctggcggcagagcacctgggtgtgtccggcattctggccgcagtggcagccggtatcgccatgcactatgagcgtattgtcggccgtatgcagtctgctacccgcatgcagagcaaggcggtctgggacaccgtgcaggtcgcgctgaacgggatgatctttattctgctgggtgaacagttaccgggaatgtggcgctcagtgccgcaggtggcggcagatgccggggcttccgcaccgtgggtgctgctgctgtatgtggtgattatcacctttggtctggcggtgctgcgttttgcctgggtatggattgccatgacactgacggttttccgccagcgccgcaaaggtaagcagtctgatatgccgcatctgcgcctgatggcgattatggcaaccgccggtgtgcgcggggcgatcacccttgccggtattctgaccctgccgctgctgatgaatgacggttcaccgttcccgcaccgggatctggctatctttctcgccatgggggtaattctgttttcactggtgattgcggcggttgcactgccggtgctgaccagagggctgaatacggacttaccgcatgataatgaagagctgaatgcccgtttcaccctgaatgaagccgcaatgagtaatctgcgggtacagatggcggagccgctggaagacattgatgaaatgacactgcgcacagaagtggggactcacttgctggagatttacggccgtcatcttgacagtaacagtgatgaccagaccgccgggtttgactggcacaatgtgatccgcatggaacggcggatgtcactgacagcgcttcaggcggagcgtgatgccctcaaacagctgcgtaaaagtaagaatatcagtgagcacacttacacccggctggtgcaggaactggatctgaaagaagaggcgctgaaactggcgctgcactgatcgccgcagaaaaaagatcagaagacccgccgagtgcgggtcttctggctgagtgtggacgtatccggttttcggtcagggccatgtgcaggaacccgcggtaaatgacgttaatccggatttctttcaccagacggcgttcggacgggaacacggatgaattcagtaacaagacggacatattggcttagccttgacagaaaatttaacttaaggttaatttcatattttctaactaaggacgttgttatggcacatccgatttatttgacgttaaccggtaaaattcagggactgatttcagcgggatgttcatctgttgattcaatagggaaccgttatcaggccggacatgaaaatgaaattctgatacttaatttaaacgcaggggcgttccgggcgcaaaatgccgcctataaagagctgatattcacgaaaccgatagataaagcatttcccctgctttactcttgcgtcgataataacgagattctggaagcaaccttcaaatgctaccggacaagtcagcacggacaacttgaggtctacgccacatataaacttacaggcgtatcactggttgatgttgatgatgttcacgcgaacttaatcagtgaaggtagtgacgacccctatcagcgcgtcaaaatgagatatacctctatctcaagagaacatacaaaagccagtacctcaacatacagcattaacagtgaaatgatttaacaggcaacgataaaggatatgtgctatttgcacatatcctttgaaataacgtatttagttggtgcgtgaattgattttttataacatttgacataaccgcgtgatgttaaatcatactcaacataaaatgagaaaacaaaactaaaaataataccaaacatcgctattaccgcaagagagttggttattttattatttacttttagttttctctttcgatatgccaccatgaatattaaatatgataaccacgaaagaaaaggaaagcaaaaaataagaaaacccactacaaatgaaaatgatatgatgtcagctttaaaaaaatactcaacatagccacttgctgaaccatatacaccaattgctataaagaaaaacaaaatggcagaaataaaatacatcttaactggttttatctcatccacggctgtacctgccaaagttcgtgaaaaaattatcagcatgctatctgccatcaccatcagaccttggtttacgctgctttttcagctctctgataatggattcacttattcctaaataatcatccaaagcatataaaccataagaaataaaagcacctgcaacgaataccccaaaagctacaacaataacactccctgcagcaaaggcactggctgttgttagtactccgacagctattgttcccagcttaatacttatcaaaagctttgccatatccatagtcacgttcacaaaaaaatctgtcaacgtatattcatccttaaatataagctcaacaacacgataggccagagaatacacaattgaaaatcgtgttgctttgactgaaatgtcattctgcccctgggttccgatgcctatataaagtatttttgcattgtctgccaaataccgggttgcattaagaaaggttctgactccggcatgaccggatagacggatataaacattaccatttttccctacgtattccgtagctttaatacctatatccttaaattcattaataatccgaaaaaccctgcctgactcataaacgctgcctgcgaaattggaaataaaatcaccgacaccaaacaacgcttctttcgctgacgaaaagggattcgaagtattggtatttattaaaacatactccgcttcctcaaccgtaatcagtgcggcaacattctcgtcatcagtttcatcaccaattattgattttattttaagcagattagcctgatgatgtaattcatcataatcgggtctttcctcaaaaccgtacggcgtctctgatgaaatcactgttccgcgtacggggtcgtatttatatcccatgtaacctccctgattatttcacttaggttatatcatgagctaattatgtacaataaaacacgtcaaaaatcgccctgacaatccatttttcacaatgaaactccctgcgatgccttaagtgacatagccgatatataaatgttttataaaaaaggaaccttatggttcctcagatccgctgcgcagcgggtctttttttacatcacaacactgctgcgggtatgtgcctgcagaacccgtgaggcggtttgtgtcatggtatcgttgatttcatcgagccagtgatgcacctgctctgcggataactgcaatgacgggcagtcccggtccttctggttgttctcttccagcagcagcaccagttcggtatccagcagggactggatcatatcaatccacagaccgatttgctgattcagcggtttcccggccggagaggtgatgcagtagcggtttagccgttcagcggcggtatactgaaaatcatcccgcagtgccatccgctctgccagcgtggcggtttcaggcgcgggcagcggggtaccgagacaggtaaactcataactgtcttcccgggtaaacagactgtcattcagccggatccgcttttcctcataatgcatcagcacttcacgcagcagagcgctgaccgcaaaaaagtggtcggttttatgaaactggctgccgttaagatacggtgcacttagttgctgccgcagggattgctcatcttcttccggcgaggagacaaaacgcctgcgggatttctgtgttttgaaccatcggcgccagcggtggcgcgacagatacagcagcaggctgagtaacagcagataataaagtgagtctaaaagttcgtcctgcataagcgccttcccaagcaaaaatcagagttcacggcggacaaacgatactgtttcaggatcggcaatccgctgatagtcctttgtattcagaataatggagcactccaggctgccggcattaaaagccagctcactgaaacgttcaaataacatcggatcggcaacgagacggagatcagggtggaagctgaacggcgggatagcaccgaacacacactgtgtcagttcagctgtctctgcagggctggcgagagaggcgcgggtgccgccggttttttttgccagtgcctgtaaatccgcctgctgatcagaaggcagaattgcgaggatatactgacggacaccgtttcccttgatatgacaaaccagtgctttggcaccctgaccgtggtgtgtgccgcgcactctggcgacttcttcggttttcccggcggaggtatgatgcaccacacggtagcgggcattatgttcatccagccgggcggtcagtttctcaaaaatcgggttcatatcactcacagtctctgcatttgttgccaatatcctgcctattatagaaggttacggcaacaaaaacagcggacaaaaaaggatttcccccgctttcggattaacggtgacgggagcgtagtttttcaataacagcggccagatccagatccgcatcctggagcagtaccagcaggtgatagagcagatccgctgattctgacgtcagttccgctttatcgcggacagtggcggccagtgcggtttccactccttcctcgcccactttctgggcaatccgtttggtcccggcggcatagagttgtgctgtgtaagagctgtccggatccgccgttttgcgggatttgatcacggactccagttcatacagaaaaccctgggctgtctgcgccggagcaaaacagctgttggtaccctgatgacaggtcgggccgaccggggtgaccagcgcgagcagtgtgtcgttgtcacaatctttaaacaggtcttccagattaaggaaatgcccggacgattcccctttggtccacagccgctgtttggtacgggaataaaacgtcacgcgtttttcgctgatcgttttgtctactgcatcgcggttcatgtagcccagcatcagcacatcaccggagacggcgtgctgaacaataaccggcagcaggccgccggttttctgccagtccagttgtgcgatttcctgttccgtgagcattgtgtgttactcctgtattctgacaacgatcccgtcgcgggcaagtccgcgtttcaggtcgccgatattaataatttgtttgtggaagacggaggcggcaagtgcgccgtccacaccggcctgtaaaaacgcatcacggaagtgatccggatgaccggcaccacccgaggcaatcagcggtacctggcacacctcacgcacttttttcagctgctccaggtcgtagccgttgcgcacaccgtcctggttcatcatattgaggacgatctctccggcgccgcgctgctgcacttcctgtacccagtcgagggtgttacgggaagtggcgatggtgcgtttttcatcaccggtaaactgatagacctgatagtttccgctttccgcatcgtgccaggtatcgatcccgacgacaatacactgcacgccgaagcggtcagccagccgggtgatgagggtcggatcactcagcgccggggagttaacggagattttatccgccccgaaactgaggatcgcggcagcatcttcggtactgcggatcccgcctgcgacacagaacggaatatcaatcacttccgcgactttggcgacccagcttttatccaccacacggccgtcagaggaggcggtgatatcatagaataccagctcatccgcgccttcttcggcataacggcgggcgagggggacgatgtcgccgatgatttcgtgattacggaactgaacccctttgaccacctgtccgtcacggacgtccaggcagggaattatgcgttttgccagcatgcgatagcctccggtaatgtcattttgccgtcgagcagcgcccggccgacgatcacgcccgccacaccggtggcaggcagcggggcgatatcactcagcccgccgataccgccggatgcctgaaaggaaatctccgggaacgcggcacagatttcctgataaagcgccacattggagccggccagggtgccgtctttcgagatatcggtacataatacgtggcgcagtccggcagaggcgaaatcacggatcacgtcttcgatggtctgttctgaatcttcctgccagccgctgaccgcaacccgttttttaccgtccgcgccgatgcgcacatccagcgccagcacgatgcgttctgctccccagcgggcaaaccagcgttttactttttccggggatttgatcgccgtggagccgaccaccacgcgggcagcgccggcttcaatcagtgccgccacatcttcttcagtgcggataccgccgccgatctgtaccggcacgctgacaccggccagtaaggttttcagcaatgcgatctggcgtttggccggatctttggcaccggttaaatccacaaggtgcagcagttctgccccttcgcgctcataagcctgcaaacggctgagcggatccgcgccgtaatcgcgctgttttgcataatcgccctggtgaaggcgcactacctgtccgtcaattaaatccagtgcgggaatgatcatgacgctttcatctccagaaaatttttaatcagtgtgatgccggttttacctgaacgttccgggtggaactgcacgccgtaaaaattatcacggcagagaacactgctgaaagcctcaccgtacgtggtggtggccgccgtggcgtcactgaccgggcaggcgtaactgtggacaaagtaaaaatagctctgcggcgcgatatcacggaacagcggcagatcggcagtaaattcgacggtattccagcccatatgcggcaccggcaggccgtccggtgtcattttctgtaccggagtatcgatcaggccgagcagatcaatatttccctcttcgctggtggtgcccagtaactgcataccgagacaaatccccagcaccggctgggtcagggaacggatggtgctcaccagtccgcgctctgtcaacttttccatcgccgcacctgccgtccctacgcccggcagaaacactttatcggcctgccggataaggtcagggtcggcggtgaccagcggctgataacccagacgctcaaccgcgtagcggacggaggcgatattggcacagccggtatcggtgatcacgatgcgcatcacaacaccccttttgaactcggcagaacattaccttccacacggatggcctggcgcagtgtccgtccgaacactttaaacaggctttcagctctgtggtgatcgttcttccctttggttttcaggtgtaacgtgcagcccatggtgtaggagagcgagcggaagaagtgctcaatcatctcagtgctcaggtcgccgacacgctgatatttaaaatcggctttgtattccaggtgcggacggccggagatatccagagcgcagcgggcaagacactcatccatcggcagggtaaagccgaaacgggtgataccgcgcttatcgccgagtgccagtttcagggcttcgcccagcgccagtccggtatcttccacggtgtggtgatcatcaatcaccaggtcgccgctgacctgaatattgaggcggaaaccgccgtgggtggcaatctgatccagcatgtgatcgaaaaagccgacaccggtgcggatggtgctgccgccttcgcggtcgagccatacttcggtgagaatatcggtctctttggttctgcgctccacgcggctgtaacggtcacggcgggtcagctgctctgcgatactgttccagtcagtgtccggctggccgtaacgcaggccggtaatgcccatgttttccgcgagctgaatgtcagtttcacgatcgccgatcacatagctgttttgcacgtcgatcacacccggcagcagatatttctccaccagggtagtttttggtttacggcagttgcagttatccgccggtttgtgcgggcaaatcagaatctcatcaaaggtaatgccctgagaggtaaaaatctgcatcatcagctggtgcggagcatcgaagtcggcctgcggaaagctgtcagtaccgagtccgtcttggttggtgaccatcacaaagcggtatccggcgtctttcagtttcagcagcgcggggatcacatccggctcaaaggccagtttgtctaatctgtccacctgaaaatccaccggtggttcggtgatcagagtgccgtcgcggtcaataaataaaacgttctgtgtcatggtatccgttgtcctcagattatggcatttcaagcgcggcgatagcggcgatcacccgcaggcattcagcccgggtgccgacagtaatgcgcagacagttttccagcccgcgttgtttgcgctggtcacgcaaaataattccttcattccacaggctgcggaaaacccgttccgcatcacggaaacgcaccagaatgtagttggttttgctcgggaaaacggtttccgtcagcggcagcttttgcagctcatcacacagcatctgccggttgcggcagatttcagtaacgcgctcctgcatcacggcaatgccttccggcagcagggcttcggcagcaatggctgccaccggggatgacagcggatacggcgcgatcactttcatcagcacgttaataatatccgcagaggccagtgtgaagccgcagcgcagcccggcgagcgcaaaggctttggagagcgtgcgcaggatcaccaggttcgggtattctttcagccacgatgccacgctgaactccgggcagaactcgatataggcctcatcgaccacaatcagtgcccggttgtcgacgatatcaaacagataacgcagatcctgttcgcggatcgggttgccggtcgggttgttcgggtggcagacataaatcactttcacgccgctgagactggcggcaatgctgtccagatccagctgccagctatcgagtgacggcaccactttctgtgcgataccaaaagtttccgcactgacactgtacatgccgtaggtcggcgggcagaacagcaccgcatctttccccggctcacagaaggcgcggatcagtaattcgatgctttcatccgcgccgcgccccgcgataacctgctccgggctgacaccggcgtaagccgcatagcggttgatcacattcgcaggctggcactccggatagcggttcagattgcgatccgtaaaggtgaagtccggtgcctgcggatattcgttggcgttcagccagacatccccgttaccgccgaggcggcgtgccgactgatacggcgtcagtaactgcacattttcgcgggccagtgccatcgcgctgaatggtttgttcatcggttgttttcctccgctttcagggcattcatccgcagtgtcacggcatttttgtgcgcggtgagcagttctgccgccgccagggtttcaatcgcgtctgccagaccggataacccggccggggtcagcttctgcacggtcatccgtttcataaaatccgccagtccgaggctggaataggtcgaggtataaccataagtcggcaggacgtggttggtaccggaggcataatcgcccgctgattccggcgaccagtcaccgaggaacacggaaccggcgctgttaatggcaggcagcagggcatccgggtcgcgggtctggatgattaagtgctccgggccgtactggttgctgatcgccacacaggtgtccaggtcgcgggcaataataatgcggctggcggacagggcctgacgggcaatctctttgcgtgataataattccagttgtgaattggtttccgccaccacgcgctgtgccattgcttcatccggggtgaccagcaccacctgagaatccgggccgtgttcagcctgggagagcaggtcagcagcgacaaaggccgggttggcgccgctgtcggcgatcaccagtacttcagaaggcccggcaggcatatcaatggctgcaccgccgatagtctggctgacctgacgtttcgcttcggtcacataggcgttgcccggcccgaaaattttgtcggtggcaggaatggtttctgtgccgaatgccatcgcggcaatcgcctgggcaccgcccacctgatagatagtctccacaccgcaaagttgcgcggcatataaaatttcatcagccaccggcggtggtgagcagagaatgatccggcggcaaccggcgatttttgccggaacagccagcatcaggactgtggaaatcagcggcgcactgccacccgggatatacagcccgacactgtccaccggacgggtgaccagctggcaactgacgccgggctgggtttccacatcaatcacatccgggatctgcgcctcgtgaaagcgggtgatattggctttcgcagtcgccatggcggacttcagcgaatccggcagacggtcagcggcggcggcaatttccgcagcactgatttgcagttctgttacctgtgttttatcaaagcgggcactcagcgcgcgcagggcgttatcgccgttttcccgcacatcacggatgatgtcactgaccacgcggctgatatcaccggatgctgccatcgccggacgcatcagggcatccgcctgctgctgtgcatcaaggttttcccagcggatcaaggtattaaaggtcattgcggtcattgtcatcactccatcattttttcaatcggcagaaccagaatggagctgcaacccagggctttcagtttctccatggtttcccagaacagggtctcgctgctgaccatgtgcatcgccaccaaatccggctcaccggccagcggcagcagggtcggacgctctgcgcccggcagcagggcgatcacttcgtccagacgttctgacggggcgtgcatcatgatgtatttggattcacgcgcctggatcacaccctggatacgggtcatcattctgtcgataagctgctgtttggcaggcggcatttcaccgtcgcgctgaatcagacaggctttggagcggtaaatcacttccacttcgcgcagaccgttggcttccagcgtggcaccggtggaaacgaggtcacagatggcatcggccagaccggcgcgcggtgccacttccaccgagccgttgagcagacaggatttaaagcggatacctttctgatcgagatagcgcttgagcaggaacgggtaggaggtcgcgatacggctgtcctgaagacattccgcgccgctgtagctgaaatccaccggggcggccagcgagagacggcaggtgccgaaatccaggcggcgcagcgtgaagtaacgcgggttttgtccctgtgcctgacggcttaataactcttcttccagtacgttttcgccgatgataccgaggtcaaccacgccgtccatcaccagaccgggaatatcgtcatcacggacccgcaggatatcaatcggcatattctctgcgtaagcaatcaggcgctgctgttgtaagttgatttttatgccgcagcgcgcgagcaattcgcgggaatcttcacttaagcgacctgatttctgaatggctatccgtaagcgcgttttatctaacattttgattatcctttaattttataattctttaggtataaaaaaacccccggaaaaaagattcttccgggggttctctcttagcacgcatgccaccggaagctctgaacgtcttccggcaccaatcgcctgaaagactagtcagggtgatggtggtggtgatggctgaactggatgcgtgtcatgataatctctcgtcgtttatctgcctgttgctatcacggataatgttgtcattatggtgataacgatgtttataaattgcttgtctttcaacctatagaactcacccggactttgcaaccccttttttgcaaagaaaacagaaattaagataatttactgaaatcaaagaaaaataagccacagagaggtcatgcacgatgaaaacagtttccatcgcggggctgggctggctgggaatgccgctggcactgcatcttgcggatatcggtatccgtgtcaaaggcaccaaaaccacgccggacggcacagaggcggcgaggatgtgcggtattgagtgttatatgctgaatctgacaccagaaccggaatgtaacgctgatgatctggatgcctttttgcagacagatattctggtgatcacattaccggcatccagaactgcgggcggtggttacctgtatgtgaaggcggtgcagaatctggtggatctggcggcggcgcgcggtgtgtcgcgggggatttttaccggttcaacagccgtttacggtaatcagaccggtaagctgacagaaaactcgccggtcgatccggtgacggaatcagccaaagcgattgttgagattgaacactggctgaatgagctgccgggcgtgtcagcggatattctgcgtctggccggtctggtgggggaatcccgtcatgcagggcgtttccttgcgggaaaaacggcggtgaaaggggcgaatcagccggtcaatctggtacatcaggatgatgtgattgccgcgatccgtttactgatccagcgtccgcacggtggccatctgtataacctgtgtgcgccgcagcacccgtcacgggctgaattttatccggatatgtcccgtcagattaatttgctgccgccggtgttcagggaagaagatatcactgaaggaaaagagattgacggcagccgcatctgccgggaactgggctttgagtatcagtaccctgatcccggccggatgccgatgacggagtaagtattaactgaccggcagtgccacgatatcgcggtacgccgggcgggtttcaatccgtgcaaaccagcgctcgatatgcgggaagtccggtctgtcgtgacacacttcccgccacggatagagcagcggcaccagtgccatatctgcgatactgaaggtatcaccggcgatataatcacgctgtgcaaggtcgtcattgagcatggcaatcaggcggttcagcgcctgtttcagctcctccacccgcgccggatcgcgctgctctgccggggttctgaccagcagccccatcatcgctttgatatacgggaacagactgccgtctgaccagtacatccattgtgccgcccgggcacggaattccgcattatgcggaagcagtgtgccgtcatcatatttatccgccagatagctgagaatggcattggattcccagagaataaattcaccgtcctgataggtcgggatggttttattcgggttcatggcgaggtattccggggtattgagaccaccgaacggcccgcccgcatctttctgctgataagtcagccccagttcagtcagacaccataagactttcttgacgttagacgagttttttctgccccagacggttatcatagtgactcctgttgatagatatgcgatgacgtgtgcgtattgtcggttattttgtgtcatgaagtgtaaatttttacacgaaatccccgtaacaggaagaatcgcgttaaagtgtcattggcttaccattcatgaaatgaatatagtattcattatcacagagttatcactcttatttttgtcacgatgtaccgggtttaaagagggaagagtaatgcagacagtaatcagttcacgggtaaccggtttaatcggcgggcttgctttcggatttttaagcatcggccacgcatttgcggaggaaacaccggttgcaccgcaggtggatgcaaaagcgtatgtgctgatggactataacagcgggaaaatcctggcatccgtaaatgcggatgagcgccttgacccggcgtcactgacaaaaattatgagcagttatgtggtcggacaggcgattaaagccggaaaagtgacaccggatgatatcgtcaccgtcggtattaatgcctgggcaaccggtaacccggtgctgaaaggctcttccctgatgttcctcaagcccgatgaccgcgtaaaattaatcgatctgaacaaagggatggttattcagtccggcaatgacgccagtattgcgctggcggaatatgtcgcgggcagccaggaaacctttgtttcgcagatgaacagttacgccaaacagattggcctgacaaatacccattttaaaacggttcacgggctggattccgaagggcagtacagtactgccaaagatatggcactgctgacccaggcgctgatcaccgatgtgccggatgaatatgttatccataaagagaaagaatttaccttcaataagatccgtcagccgaaccgcaaccgtctgctgtggagcaccaatctcaatgtggacggtgtgaaaaccggtcacaccagcggtgcgggacataacctggtggcttccgcgacagacggcccgatgcgtctgatctctgtggtgctgggtgcaccgagtgaccgtgtccgttttgctgaaagcgaaaaaatcctctcctggggcttccgtttctttgaaaccgtggcaccggtgaaagccgatactccgctgactaccgagcgtgtctggttcggggatatttcagaagtgccgctgggcgcggaaaaagacatttatgtcactatcccgaaaggcaaactcaaagatctgaaagccacttttgagctggacagcaccacgctggaagcgccgctggcgaaaaaccaggtggtcgggaaaatcaactttatccttgatgataaagtcgttgaacagcgtccgctggtggttcagcagcaggttgaggaagccggtttcttcggccgtatctgggattacattgtccgcttctttgccggactgtggcattccgtcttcggttaatcacaacagcctgccggttaacggaccggcaggctttctctccgtttaccgggcaaatccggtatcacgttcagacagtactcctgaaatcacgcctccattcttactgctgctattgttgtatgtcatctcaatgacctgcgaaggtatcttcctgcggaatttaatctgaattaaggaagaaaaacacggaatgcaccatcccgtgcggctattttttatcagagcggcaataatagacaggcagataaaacggcggtaacaacaggagagacgatgattcgtttatgtccggtcagtaaagataactgggaagcgtgtgtggatctggaagtacgggaggatcaggaggattttgtggcctccaatgtgtattccctggcacagcttcagtttgtgaataatttcagtgccgatgtgatttatgacgacgaaactatgatcggttttgccatgtacggtattgatgacgatgatggcatgttctggatctggcgctttatgctggatgcacagtttcagggcaaagggctgggtaaagccgcatttgctgctttgctggaaaaaatcactgcgatgaataacacccgggagcagccgctgccctggctgcggttgagttatgagccggaaaatgaattcgcaaaacacttttatcagcgtttcggctttaaggtggtgcagatgatggatttcggggaggaaatggcgcaaatgccgctatcttcataaggttattcccctttcaggcggcaatttatcatgctgtctgctgaattaccctgttgaaatccgtataagatccgatattacatcctgatatcggatttttttataaaaaaggaccggtatttttacacaccggtcaataaaggattaaagatatggggacaattgtgtttatcgcgctggtcattgccgtggccggaattgtgtggatccggcgggtatatctccggataaaccgccttcaggctccgatcaccgaagcttatgcggcgattgacggcatgctgcatcagcgggcggagaggatcggtcagctggtggatatgacggaaaaagccggtatccgggatgcaacgctgttttattcctggcaggatgcgtatccgcgctatacagaggcggcgacactggatgaaagtgtcagtgccgcaaatgatatcagcagtgctttttatcatattatgacgctgacagagacatttccggtgctgattgcggatccgcagtttgtccgtattcagttggggatctgtgatgttgaggatgcactgaatcccggcatccgcgcttttaatgaggcggtacttcagtacaatattgcggttcagcactatccggacaccctggtggccgggctgttcgggttcggacccaaaacactgctgctgatgtcctgatacaaaaaaccccgcaatatgcggggttttttgactttccggggaccggagttaatcagtcacacgggatcactttgattgccaggccgccctgtgaggtttcgcggtatttggcgttcatatctttaccggtttcatacatggtttcgataactttatcgagacaaacgcgcggctcactgacacggcgcagcgccatacgggcggcgttgacagactgaacagcggcaatggcgttacgttcgatgcacggtacctgtacctgcccggcgaccgggtcacaggtcaggccaaggttgtgttccatcgcgatttccgccgcgataaagacctgcatcgggctgccgcccagcagttcggtcagaccggctgccgccatggagcaggcaacaccgacttcaccctgacaacccacttccgcaccggaaatagaggcgttcattttgtacagtgaaccgatcacgctggataccaggaaatagcgggtataggcgttctcattcaccggacggatgaatttatcgtaatacgacagcactgccgggatgatcccgcaggcaccgttggttggtgcggtaacaacacggccgccggcggcattctcttcgttaacggcgagggcaaacatgttgatccagtcaacaacctgcatcgggtcagtggaagtgttatcactggtgaccagctgacggcgcagtgcagcggcacggcgtggtacacgcagcggccccggcagcagaccttcggtgttcacaccgcgctcgataccggctttcatcacgtcccagactgctgccaggtgagcagaaagctcttccttgctgtgcagcgccagttcgttctgcataaccagtgctgacagagacagcccggtttcgttgcagtgtttctgcagatcagccgcatactggtacggataaggcactttggtttcgctgtccgcagcctggccaaaatgctcttcatcgacgataaagccgccgccgacggagtaataggttttcttgtacagtaattcatcaccggcgaatgcgctgatggacatgccgttttcatgcagcggcaggttttctttatggaagttcatcccgttttcgcgcgggaaatccacttcatggcgttggtttgccagcaaaaggcgttcacgttcttcaacatccctgataaagcccggtatcgcgtcaatatcaacagaatccggcaggttacccgcaagacccataatgatggcgatatctgttgcgtgacctttccctgtcagagacagagagccgtacacatcaacctgaatgcgggtggttttttccagcagtccggccgcgataagatcatcagcgaactgtttacctgctttcatcggaccgaccgtgtgagaactcgacggaccaataccaattttgaagatgtcaaatacactgaccatattgctcgccccctatgttaaggcgtggattaatagtgtcgtgatgattcacgaagccgttacttttcagttccggctgattattgttgttgctgttgcccgccggagagggcaacagtcatttatttattaaccaaaaaacagctgatacagattgtagaacaccgctgaaattgcaatgagacccatcacaaccacaaacagattactcaggtgaccggcatatttacgcatcgcaggcactttgcggattgcatacatcggcatgataaacagcagcatagcgatgatcgggccgcccagggtttcaatcatacccagaatgctcgggtctaaggtggcaacaatccaggtggttaccagcataaacagtgcagtcagtttattcagtttagacggtgcaatgcttttgcccttggcgcgtaatgctttgttaaccagaccgttaaagccttcacgggcacccaggtagtgacccaggaatgatttggtgatagcaataaacgcgatgaatggtgcgatataggcaatcatcggnnnnnnnnnnnnnnnnnnnnnnnnnnnnnnnnnnnnnnnnnnnnnnnnnnnnnnnnnnnnnnnnnnnnnnnnnnnnnnnnnnnnnnnnnnnnnnnnnnnnnnnnnnnnnnnnnnnnnnnnnnnnnnnnncgcattttcgccgtactcttcacgcttggcgacagcaaaggcagagataatcggggaatggttaaaggagaacaccattaccggaatcgccagccacagcgttatcagcagaccatgaccggtgacactggccgtattgctgtcgaaagtgagggttttgaatacatctgtgctccagtgcgggatcagatacagcgccagcaccatcagaaccgccacaaacgggaataccagcacactcattgccttgacaatcgcggcctcaccgaagcggataatacacataatcccgataatcagtaccagtgacagaataatgcgcggcggcgccgtcataggcatctggttaacgataaagctttccacggtgttggtgatagccacactgtagaccagcagaatcgggtagatagcaaagaaatagagcagggtgataaggccgccggctttggaaccgaaatgctcttccaccacttcagtaatatcttcgcccggatttttaccggacaggacgaagcggcacatgccgcggtgtgcgaaaaaggtcatcgggaaggccagcacggccatgatgataagcgggaccagcccgccgataccggcgttaatcggcagaaacagtacgcctgcaccgatagcggtaccgtacagtccgagcatccagacggtatcggacttacgccatttacgataatcattgctggtgtcagtcttgctgaccacaacctgcggttgtgttgtatccatagaagtctccaaaatgtacaacaataacaacaattaaaattttgcacgctgatctgtgcatttattcgtctctgaaatagggtctatgtacgtaaccagataaaaaaataagtaaagctaaaaagtcaccggcaattgcttaccggtaaaaataataaacagcagcgacctgatatctgtaatggataaataaaggtctctgcattaattcatattcaaaagtacctgaaattgataactctctttctgatggtgaaaatatactgtttttcagtggaaaataccgtgatcgcagtctcaaatgctataaatcacagtaaaacaggctctgttgcaagatttgataaaattgttaatccgggtttacggaatggagtatgccgaaacggcataaagggattgcgtgctctgtaataatgcggtttttgtcggtattctatttaattaaattaatttattcatatattaataaatatatcatccgcataaatcgcattatttagaaatagcgaaagcctgatttttacaggactaaaaaccctgtttaagttgtggtttatttgtgttatttgttgtttttaatatggaaaatattttttgcttaagtgcgtgactgtaccggatgtgtgctgagaggcgagcagcataaaatatggctttatataatgatcactctgtatatctcagatgattaaaataattattttaatcacgaattaagttacttgcgtgatactggtttcatataaaacaaaaatgttaaataaataccagaataatattctgcgaacaaaaatagtactgccggcagtgaaaaatatggttaaaaaaagatcgccggcggcaattaaacagcgataaaaaaataccggcgtgcgggccggtatcacgccggtatcagcagaacccggcaggttgcccgccggagaggccaaccgtcatgtacttatcagccgaaaaacagctgatacagattgtaaaacaccgctgaaatggcaatgagaccgatcacaaccacaaacaggttgctcaggtgaccggcatatttacgcatcgcagggactttgcggataacgtacatcggcatgataaacagcagcatggcgatgatcggaccgcccagggtttcaatcatgcccaggatgctcgggtccagtgtggcaacaatccaggaggtcaccagcatgaacagtgcagtcagtttattcagcttagacggtgcaatgcttttacctttggcgcgcagtgctttgttaaccagaccattaaagccttcacgggcacccatgtagtgaccgaggaacgcgttggtgatcgcaataaaggcgactaacggtgcgatataggcaatcatcgg

SEQ ID NO: 22 - DNA, 179416 bp, unknown
  Altogen 322075 strain
  misc_feature (43630)..(43630): n is a, c, g, or t
  misc_feature (55514)..(55521): n is a, c, g, or t
  misc_feature (76828)..(76828): n is a, c, g, or t
  misc_feature (104008)..(104008): n is a, c, g, or t
  misc_feature (113868)..(113868): n is a, c, g, or t
  misc_feature (134309)..(134311): n is a, c, g, or t
  misc_feature (163928)..(164022): n is a, c, g, or t
  misc_feature (177184)..(177312): n is a, c, g, or t
tcaaatccggctcccgcaaccaaccttcatatcattaacaaaatcggacgcggggtggagcagcttggtagctcgtcgggctcataacccgaaggtcgtcggttcaaatccggcccccgcaaccactcttctgacaaattctctgtcaacttttcctgaaaacacacaaaactcatccctgaaaaagatttttttcagtgcataactatgtttgtgctgtatctgtccgtttcacaccacatccttgtgatgcacaatctctgtgataaaccgtattttcagttgcgccgcgcgacagccccgccgttggcaaaatacgccttaatccccaggaaaatagaatttgccatctcctgctggaatttagccgttttcagcagacgctcttcctcaagattactgataaacgccgtttccacaagaatcgacggaatatccggcgctttcagtaccgcaaacccggcctgatcaacagtgcgcttatgcagtttgttgacatttcccatccgtttcagcacttctgaaccgaatttaaggctgtctttgatactcgcactctgcaccatatcaaacatggtctgatcgaggtatttatcaccgcttttgctgacgcccccgattttatccgcatcgttctgggtctgagccagatattttgcggtattactggttgccctgcgcgtcgagagcgcaaagaccgacgaacctctggcagagcggttggtaaaggcatccgcatggattgagacaaacagatccgcccgcattttacgggctttcgccacacgcaccgacagcgggataaacacatcctcgttgcgcgtcatgtaggcacgcatacccggctcgcgatcgataagcgatttcagacgacgggcaatctgcagcaccacatctttttcgcgggttttgtatttcccgatagcgccggggtcttccccgccatggcccgggtcaatcataataacgaccggcctgtcctgaccggctttacccggtttcggcgtttcacgcggcaggctttcttcgagatcaccgcggttgtaatcttccagcagtgccagcagaggatcgtcttctgtcgcagcaccatttttcggataaaaatcaagcaccagacggtttttaaactcagcgaccggggtcagttccagcacctgcgggctcatcgcctgtttcacttcaaacaccaggcggacagtctgcggatcattctgaccgacacggatcagcttcagatgcggatcgcgatcctgcacctgcttgtccatccctttcagcacactgttgaggtgcacatttttcagatcaacaacgatacgttccgggttttgcagtgaaaactgcttatatttcagcggatgatccgactcaatagtcacacgggtataactggatgccggccagatacgcaccgccacaatctgtgacgacgccgcaaagccgaacgggctgatactcagcagacaaaacgccgcagctcctttcagtaacagacgacgtgacgcatcatgttcagaatgactcatgaaaaaatatccatagcgtaaatcaaatcaacaataaccggtgcgggttatgaaaaccggaaaataaagaagcagaacaatttattccgtaaataatttaaacggcactttatctaatcatttgcgccctgtcattatgcatttttggcttatatggcgataacgcggcataaaacccggtgaaatcttaaccggcgaccaaaatttacgcttgctattcctttgcaaaaagaataaaaatacataaattacgaataaaaattcatttgcgagggtgttatgaaagagcgcagtatcgaactggtggacggattccgtcagtcggttccttatattaatgctcaccatggcaaaacatttgtggtgatgctgggcggcgaagctatcgagcatgaaaatttccccggtattgttaatgatatcggcttactgcacagcctcggcatccgcctgattgtggtgtacggcgctcgtccgcaaattgaaaaaaatctgctggcccatcagtgcgagccggtttatcacaaaaatacccgtgtgacagatgcgcggactctcgagctggtcaagcaggcagcaggacagttacagctcgatatcaccgcccgtctgtcgatgtgtctgagcaacacaccgctgcagggcgcgcatatcaatgtggtgagcggaaactttgtgatagcccagccgctgggcgtggatgacggtattgattactgccacagcgggcgtatccgccggatcgatgaagatgccatcaaccgccagctcaataacggcggtatcgtgctgattggcccggtggccgtttctgtcaccggtgaaagctttaatctgacctccgaggagattgccacgcagattgccgtcaaactgaaagcggaaaagctgatcggtttctgctctgcgcaaggtgtggtggcggatgacggcgggattatctccgaaatgcacccgaatgatgcagagcactatgtacaggcgctggaaggcagcggcgattattactccggaaccgtccgtttcctgcgcggcgcggtgaaagcctgccgccggggcgtaaaacgcagccatctgctcagttaccaggaggacggcacacttatccaggaactcttctcccgcgacggtatcgggacacagattgtgatggaaagctcggaacagactcgccgcgccaatatcaatgatatcggcgggatcctcgagcttatccgcccgctggaacaacagggcattctggtgcgccgctcccgcgaacagctggaaatggaaatcgacaaattcaccattattgaacgcgataacaccactattgcctgtgctgcactctatccgtatccggaagagaaaatcggtgaaatggcctgcgtggcggtgcatcctgattaccgcagctccgcacgcggcgaggaattgctgcaccgggtcacacagcaggcaaagcagatcgggctggaaaagctgtttgtgctcaccacccgcagcattcactggtttcaggagcgcggctttgtcccggcagaaattgaaaatctgccgatcaaaaaacaggcactgtataactatcagcggcgctcaaaaatcctgatcctcggttttcagtaatccgccggactaacgtaaacgcccgctcagcccgctgtaccgctgagtcggcgttttcaccgcccgcttaacacactcttcccggctgtatatggtcagaaactgtttcgcccgcgtcagtgccgtatacagcaattcacggctgaccagcggcgaaggctgcaccggcagcaccagtgcggtatgagcaaactcagagccctgtgatttatgcactgtcatcacatatgctgtttcgtgtgccggaaggcggctcggccggatactccggatagtgccgtccggcagccggaaatacacccgcagctcatggttttcatccgtcagcatgatcccgatatcaccgttgaacagccccagcgggctgtcattgcggcttatcatcaccggtttgccgtgataggcgcggtgccggtgtatcagcggacggcggatatgcccctgctgatgcagcagccgttcaatgcgctcattcagcccttccacgccgaacggcccctcacgcagtgcacagagcagccggaactgactgaaggcatcaagcaccaccgcagggtcggcatactgttttaccagtgataaaaacggcagataggctttcatggtgtctgtcagtacctgagcatacccgtcttcatcctccagcggcacataacggacatccggccgctgcccgccgagaaccgccatggtttcccggacatcgccattgttaactgcggtggccagttgcccgatgccggaaccggcatcaaaacggaaacttttacgcagcaggcagagatgatcctgcacattgaccgggtgcgccggtgatttatccggcagcacacagccggtcattgcctccagcgcctgccgccgctgtggtgtgtaaccggattcagcaaaacggcagatatcccccagcaccgccccggcttccaccgacgccagctgatctttatcccccagcagaatcagcatagcgttctccggcagtgcatcaatcagtgctgccatcatcggtaaatcgaccatagatgcttcatccacaatcagcacatccgacatcagcgggtttttctgatgatgacgtaaccggcggctgtcaggctgagcgcccagcaggcggtgcagggttttggcctgatccggcatcatgatccgctgtgcatccgtcaaatcaagctgtgcaatcgcctcacccagcgattccgtcaggcgggctgctgctttgccggttggtgccgccagttcaatcagcagcggttcagcggcggattgcaccagtgccgccagaatacgggcaacggttgtggtcttaccggtcccgggcccgccggaaataaccgcagtccggctgctgactgccaccgctgcggcaattttctgccagtcctccggttcttccgtaccgaacagtgcatccagaaccgggcgcagtttctctgcctcagcagaaacctgctgaggccgggagaaaaattccgccacccggcattcatactgccacatccggtgcagatacaaattctcttctgacagtacaaccggtgagggaagtgagccatcactaaccgcatcagaggcagacagcgccgcttttatctccggcagtcccggctcattcagttcccgccagacagactgcatgatttccgcatgccgtccgccctgttccgctgcgggaataatccgcgacagcggcaggcagacgtgtccgccaccggtttgtgcactgagcagcgcaaacacaagttgcagcagcggatgactgtccggtgccagcatcgcggcaaactgacagtccaggggacgcaggatctgcgctgcacataaggtttgtaagtgagtattcattaaccttcctcccctttgaacagggcatccagttgctccgtgaatgcctgctccgggcgataaaaccagatcccccggccgggatggtccggtgtcatgccgcgcagaaagaggtaatacacaccgccgaaatgcgtctgatagtcataatccggcaaccggtggcgcagataacggtgcagcgccagcgtatacagttgatactgcaaatcatagcggtgttccagcatcgcctgcgccagtgcgtccggctgataatctgcgtgactgtcacccagatagtttgatttatagtccgctatgtaatatttaccgtcgtgataaaacacaagatcaataaagcctttcagcatgccggttactgccgcgaaatccagcggcggtgcctgtgctgacagcggatcatacagccgcgtcagtgcatccagtttttgcgcggtcaggtcgccgtctatcggcaggaaaaactgcatttcatcctgtttataacgtaccgggattgcactgagcaccggcccttcagcggacagcggcgtattaaccagatccgtgaaccaggtttgcaggaacggtgcccattcagcagagaatccgtatgacagtaactgctcagtgagccactcaagtgagggctcactatcaaattcaagctcttcaaacaggctgtgcaggaatgtccccgccagcgcgccgcgcgggaaggtaccggcggtctgttccgttccggtttcgtcctgcgcttcaccgagcgtatccgtatccagtgacgggctgagggagcggatcatcgccatcatctcttcctgccggtcctgtgcatacacagtgccgccggacgatgcgccatagctcaggccgctgtaactggtcacacgccagcggctgctgacagaccgggtaaacggcctcaccgccagagacggcggctgtgacataccgggctgccacagttgcagttgcggttctgttatccgggtaacggcaacggcgctgtttccctgacaaaaggtatcaagccgctccgccagggttttgctgtcacatgcctgcccgttctgaagcagataccccagcccgttaagatgcaggtcggtattacctgtttttttgcggttccctctgataatcggtgcaacacccaggctgcaatggtaaaccgcccgcgtcaccgccacatacaacagacgcaaatcctctgccagacgttctttatccgccagggcaagctgtgtttcatccggtgacagtgtcaggcacggctcgaagggggtttcatcatgataaagccgctgaccgcccgcctgaaaattacagataaacggcagccacaccagcgggtattccagccctttggacttatggataatgcaaatctgaaccagatgctgatccctttccagccgcatctgctggctttccgactgcgcatccgggcgtaatacctgttgtgccagccagcgcaccagcgcatgttcattttccagcgtcagtgatgtttcctgaagtaactcactgatatgcatgatatcggttaagcgccgttcaccgtcctgccccgccagaagattttccgcaatcttccgctgactgagcacccggcgcagcatcggcagaacgccctgctgctgccagatctggccataaccggcgaactcatccaccagccggtcacgggcagcttcatcctgattcagggcatcaatttgtgcagcattcagaccaaataacccggatgccagtgcgctgcgcaacagccgttctttttccggattcagcaccgccaggagcagccacagcaattcgcgggcttccggtgtgtcaaacacactgtcgcggtttgagagaaaaacagacgggatcgcccgctggttaagggcatcttttatcagttgtgcttcccggcggctgcgtaccagcacggtaatatctgccgcactgaccggacgttgtttcccgggctgaccaatcagtgccgtgccgttttgcccggcatccagccagtcgcggatctgcccggcacacacacccgccattgtccgttcataatcaccactgctgaccccctctgcggcctgccaccagaactgcaccgcaggttgtgtttttccgccgataataaaagcggcatcatcattatccggtgcggaactgaccggctgaaacgggatctgtttaaagcagaagggctcatccgcctgtaaaaacagcttattgacgctgtcgaccatcgtcttcgcggagcggaaattagtccccagggtgtaatgcgcactgacatcccgccgtgctttgatataggtgaagatatccgcgccacggaaggcgtaaatcgcctgtttcgggtcaccgataaacagcagcccgtacggatctgccgatgtgccgttatcaccggtgttttcctgatagatagtacggaagatccggtattgctggggatcggtatcctggaattcatcaatcatcgccaccggaaaacgtctgcgcagtgtctgcgccagcagagcgccgttttcctgatgcagcgcgttatccagccgggtcagcaaatcatcaaatcccatttcgccccggatctgtttttcctgcgtaatggtccggcggatctcatacaccgcacgggtaaacaggacatcctccagcgtcagtgcctgctcagtcagttcctcaattgcagagaacaccggatgtgagggcggcgtaccgccttttttggttttttcatccagcactgcctgactgaaacgttctatatttttcggcagtgcataatgtgtggtttcggtttccttcgcccagtcatcaatgccggcaatccatccgggcactaggttggcgcggtaactgcttttattcagatcagagttctgaataagactgacaaaatcaacatcactttcccgccagcactgtttgacctcatcaatcgcggcgataattttttcatggcgggaaagtaatgtttcatccgattccggcgcatctgtaattcccggcagttctccctgcagccagggataaatatcccgcagcagcgcctcaggatcagaccagagctgtgtaatggctctggccagttcaaccggcagcgggtaacaatgacgccgccagaaatcctcacaggcctgtttacggacaggatgctcatcctgaatcagcgtttgttcaaagagcacgccggattcaaaggcgttgtgtgtcagcatgcgctgacaaaaaccgtggatggtaaaaatggcggcttcatccatctgccgttcagccagcagcaggcgctgagcagcattttgtttatcctcaatcagcgccagaagcgggccgaacccgtaatcctcacccggttccccgccttcttcatgacgcagacaggcaatccgcagcttatggatgttctcacggatacgcccccgcagttcattggttgccgcttcggtaaaggtcaccaccaggatctcttccgctgataacggccggacaaacgccccttcaccgatacccagcagcagacgcagatagagccgtgccagggtgtaggttttccctgtaccggcagaggcctcaattaaccgctgcccctgcagcggtattgtcatcgggtttaaagattcagccgccatcgttttaccggatttcttctttaacaggtaacagcgcctggaaagcggtgacagacggatacgtcgtccatccggccggtttcgcgtaatcatccgctttgccgccggtaccggtcacctgagagtaaagtgccagtccttttttcgacatcaccgcgttctcatagaatgtcaccacatcctgtttggtcatttttttcaccgccgcaatcgtctgctcgcgggtgttgaaatcaaagtaattatttttgaaatcaaatgaataacgggatgcttcttcctcaaaggtttccggcggctgtgtcatttcggtcagcaatgcattgcggtatttatcaaactccgcattatccagtgctttcaggcgtttttccgcattgatataaaaatcatcaaagcgttgtgacagataagccggattcttttcattgctttgcagcaggaaaccgatcccccactggcggccgaagttcgggttaaatgcaaacagggcataccccagctgttcctgtgtccgcagctgatcatagaaccaaggatgcagaattttcgacagtacagacgagaatgcagcaccttccgtccgtgaataaccgtccggaataaagatattggccagcgcgttatccgtgctgttggctttttcgtcaaagtttggtttcagggctttatcaatcacatagtaatccccgacccaccattccgtaccctgtgaaccgagctgagcctgagctttcgatgcgatctgttcagcttgcggtgctgtcaggttaccgaacacaaacatctggagcgccccttcacggataagacggtcacggtactgcgtgatgtcactttcagtaatggtatccagtgctgcgaggcgttctttatcttcaaaataaggtactgatttcagacggctgaacggacgcattgccatttcataggctttgccgttatccgataccgcaacctgctcacgataccaggatttcgcctgcgcaagctcagatgctgccggagtaaaggactgatattcagtcactgcagtggtcagcagttccggcagatgctgggaataaccactgacgctgatattcagtccgtcatcatcactgatattgatccccattcctgccacgctggcctgataactgagctgattcagtttcagttcactgacataactgagcagtgcactagtgacaacatctttggctgttctgccggcattccggttacgcagttccagcgcaataattgccttcggctcatccgcaaaatagcggctcggcatatagaacagacgcagttttgcagtgtctgtcagttgtgccggtttttgctgttcctgttgttttatcaggtcaaaattatccggaataaacgggttcagtgcaggcagagagaaacggaaatcactttcagatttacgccatttatccagttgagcggcagtcactgcatccacctgataaggcgcatcaacgaaataagcttttttattgctcggttcctgcgggctggtataccagacgcgggctttttccggtgttaaatccgcaaggcgggctttgatggcggcaggatcccagtcatccgccagatagccgacattcaggacattttttaccggatattccatcatcgtatttgccagtgattccacataattcatatcacggacaaccgagttgtaacggaatgccagcatattcacgcgggcgatttcatcgaaatagtctttattaatccctttttctttaatcagattcaggtacgcaaaaacagcggcggtaatttcatcgcgcttcgccataccctcatcagtcagtgaaacagagataataaacaccccctggttacgtgccagggttgaggatgccgatgcactgacattctccgccagcccgttggatatcagccagtttgccagcgtgccttcactgcggcttcccagcagatacgcaatataggtatctgtctgcttgcggaaatctttgctgttgttgtcgatgacaaactcaaaatccagcgatttctgcggctgcgcaggaacatagtgaatgattttctgctgctcggctgcagtgatcagcggaacggtaatctgcggaacagctgcgtggcgatccggaatcgtgccgaacgtctcattagccagttttgccagttcttccggggactccggtccgtagataacagctttcatcagattagatgaataataggtattataaaacttcagcagctcttcatgcaggatgctgccgggcttatctctcagggtttccaggttaccgccggaaaaacgggaaatcggatgtgccgggttccaggtttctgcccggacctgatacatacggtgcccgtctcgggaacgcgccatggtcagctcggcgttaaccgcattacgttctttatccgcattcaccggatccagcagcggttctgccagggcatcagccagccgctccgttgcccctttcagcgcattattttctacttcaaaatagaagtcagtgtaattggaaccggtactggcattatggctgccgccgtgcttcgccagataatcactgaaattaccgggttcagggaaacgttttgaacccatcagcaccatatgttccagatagtgcgcaagacccgcctggctctgcggctcatccatactgccgatagccagactgaccgccgccgctgatttgcgcgcggttttatcggaaatcagcagaaccgtcatattatttttcagggtgattgcctgatactgacgcggatcgttggcgcttttctcaatctctccgggcagaacctgccagttattctgggcaagtgcattggcaccggtaaaaaagaaaagcagcgtaaaaataaactgcactagttgtttaggcatcagcctcattctccctgttcttctgatgttgaaacatcggcaaaaagagttgttgtgaaaattgctttattgcatccataagtgcttcatcaaaatggcggaatgcacggacgacataatcgtcctccgcctcaccggtaaactgatatcctccctgcagtgtctgcagaagcagtaaaccggctttatgttggagtgcatcatcatcagagagttcaccggtattctcatccgccagtgtggtcagccatgcccagccgcttttgacaaagacgggcaatggctcattcagaccacggacaaacacatccagcagcggacgcagatagccctgcgcctgctccgccgtcagcggctcaaagatccacaccgtatcaccgcgcccgtacatccggctgtactgctgtcgtccgctcaggctgtatgtcaggtgttcaatccacaaacgcagcccgtcagcggcggtaagtgccgccggacgccagcggagcagcccgttctcctgaactccggtcagttgcccgctgtaagtatacggcccggtaacatagtgaaacgactcaatatccgattctgtccgtgcattgcggattttctccgccagaacatccatttcctgtaattgttcttcccagtaaacctgtgcaaacgccccggccggcagttcccccgccgccttcagtatgcggaagacccgctcttccggttcgccgtccaccaacgcatcaagcagccgggtgttaaacccgtaacgctgtaaattatcaacactgaatggttcttcttccggcagagccacatcctcaatatcaaaatggacattcagacgctgctgaaaaaatgccctgaccggatgacggtaaaatcgcagcaactgatcaatggttatttccgttatatcttctgacggaaccgggacattaaacggcccttgcgcttccccctgccgtaatgctgccggtaaccactgcggcgaaaagctctgaaattccgcgccttcccggtagttatccgccgcaaacgggacacgggtgtgccggacaatcagatgattttccagcgcttcccggctggtatccaggtcagcaaaccggtctttctccagacaaaaactgaggccggcatattccagcagttcactgaccagcactgacgggttccgctcttcattatcgcggatagatcggccgatataactgatatataaatattcttttgctgaccccagcgcctccaggaaaagatagcggtcatcatcccggcgtttgcggtcacctctgcggcttttttccgccataagatcaaaccccagcggcgggattgtcctcgggtacacaccgtcattcatacccagcaggcaaataaccttaaacggcacagaacgcatcggcatcagcgtgcaaaagtttaccgcacccgatagaaagcgctggctgattttctcgtcatccagccgcagagagagctcatcccggatcagtgcaagcggaacatcgccgtcataacaggctttcacaccctgatccagtacctgctgccactgctgtaacaccatactgagcaccggttcagtatccggtgttgtcatgaaaaaggcagacagcagttcagaaccggtttcacgccattgtgccggtgtccgcggctcactcagtattttctgccactgccgcaacgtatcaataaaagcagccagctgtccgacccggtccgctgacataccggaaacctcgtcatacggcaggatcccgcgccaggttccttcctcctctgccattgcatagcccagcagcatgcgctccagcccgaatttccaggtgttctggccaaaaaccggcagtgagaaagattcaatattatggtcatccagcccccagcggacaccggatccgctgacccagcggcgcagaagcggtaaatcactctcatccagcccgaactgctgcgccaccgccgggacttccagcaggctgagcacatgctctgaggtgaaacggctctgcggtaattccagcagtgtcagtactgcctgtaataccgggtgagcctggcgggctttacgatctgagatagcaaacggcagatagcggttttcgttcccctggccaaaaaccgcctgaatataaggagaataactgtcgatatccgccaccatcacaataatgtcgcggggagtcagtgacggatcattctccagcaggttcagtaaatagtcctgcagaatctctgtttcccgctgcggactgtggcaggaatggaatgtcagggaacggtcattatccgcaatcacccgccgccgttcactggtgacaaactcctctttgtttttccccaccacactgccgtcttccagattaagaatatcctgctgaacagcagacagcagtgtatctgccgggcgatcgacaaaggccttaatagcatgaatttcttcaatatcttccagaaaaaacaggttatcccggccgggacgcccccacgatgccagcagcggattaccggtattctgttccccgtcagcctcaaaatcgaacagtgaaggtgcatcctcatccgatttaaaccagctgacggcttttttatcccaatagctttgcggcttgcgcgccagcatacgccgcagtgcagccgggctctgtaaatcgccccagtaatactggcagggattggtaaacatcagatggatatgggtatgctgcccgagcgcccgcagagcctgcagatagacaggcggtaatgcggagatgccgcagataaagaggcggggcggcagattggcaacaatctccggatcaccttcattgagtacatcaataaaacgctgataaagattggcacggtgccattccggctgccccaggctgcgggtcagtgtctgcaaatcccgccacaggcatttctgccaggactggttctgactcagcccgtcaatcagttcattattttcccacgccgtcagccagtccggccggtagacaagatactggtcaaataagtccgcaatacggcctgataactgatgcagtttgcgtttatccccgtcatcatcaagataatggcgcagcggggcaaaatccggatcatcaaggcgctgcggcagcagtgacatcagcttccaggtcattgcgcctttactgaaggcactctccttcggaatgtccggcaggacacgggtaaacatatcccagataaatgtggcgggcagcggaaatgttatattcgcggcaatacccagtttttctgccaggctgatttgcagccactgagacattcccgggctttgcaccagcacggtttcaggacaaaaaggatcattaattttatcattatcaataatatggcatatcagatctttcagcaggtccagatcattggagtgataaactgtaaacattgtcctgtccttacatacattgccatctgccggcggttaaccggcgctctcccggagagaccagcccgatagtaacggaaatacagcccggtgacacattttcctgataactttcccatttctgccgggtagataaatgtgtctgcatcatctgccgtaatattccgggatcaaccgtaaaacgcatcatctgatgcagatgacgtaccgtgctgacatccgcatactgccgctgttttccgctgtgcagcagctgataatagcgtaataatccggtaatcagaatcgcaaagataaaggcacaaatcatcacttccggtagcgacattccgcgttcattcattgttttctcccgtttcagtatgccggttgcagccggattttaaatccggcgggcaaaaatcactccatccctgcggcagggctgtcaaaatcatgttgtctccttcttcccgggcactgaccagctgataatgcgtgatattttgttcaaaccagggagaaaacatgctgccctgtaataacagcttgttggctctcagccgccgcaaacaactcttcagttccggatcaggtgctgtccggcagtaaaactgtgtttcgttcagtgctttccgggaccacaccagtgtcagcccccattccagtgcggaggccgctccggcatccgcccggtaaaatgccgtttcgtcctgaccgttacgccactccgcctgataaaagcgatgcaaaacagacagcatcatcagtgagatccccagcaacagcataatcatcagcaacagggcatttcctgcggagtgaccggctttctccccgccggatctacaggtggtaattaggcatgacaatcaggctttctccggttcgctgtattaagggcatgtcccgcccggtgagtgtcagagtcagtttcaggccatgttttccgtacagttttaccggcgtgaccagaaaccgggaaacattcacatagcggctatccgtaaccttttgccagccggtatcccggcagctgcgggcgtcgcgcgtccattccagtgcctgcttattcagacggtagccgaaatgctccccgattttacggacattccgctcccagcggccattgtgattgagatcgtaagcaacaatgatgcaactgccgtctgtctcgccgcgccgggcggcaatttccagcggtttgccctgacagtgcccccggcagaatgccgtccgccggagatctttttccagccgcaaaagagtttcccgcattatcgtatccagcttgtattgccggtatgtgttcagcacatcccgccccagagccggaaaaaaacgggttaccgagaccagaagaatcgcactgacagccattcccgccagcatttcaaatagcagtgaacccttttcccgccttttattcagcatgacggtactccggatatcgtgcccggcgtgcacaaccgtatacgacccggggccgagataatcagttttatctgcccctgcgtattttccagtaaaaagctggcagcagaggcagtatgccgggttccccagaacaacacggtaccggttgtgccggaaacaatccggacactttccatcggtgtgaatccttccggatcatcatcacaccgtactgcggatacctgatgacaggcccggcttttttcaccaaacgtaaccgcgattttccgtgtttcgttcagataggttgctttcagtttatggctgctgagatattgctgaaacaacgcagccgtttctgtcagataacgccgctctctgtggctctcccatgaaatattaataaatgaaacaggtaatgccataataaataaaacaataatgacttccatcagcgatatcccccgttctgtctgcatgtattcatccgttcgttttctctgccgaaaaaataacggatttaccactcccggaaagacaaaaccgaaaaaaatgcgatgcaacaggaaaaaaattctgcggaatactgcaaattcacattcgtttttcgtgttgtgcggaaaaaaattatttgccggaaaaaaaagtgtggagtgaacaaaatgaaggcgctaaaaagtacagacaccaccgctctttaacaatccggaaattaactgataaaaaaaccggccgccggtactgtatttgaatatcagtaccggtgagccggacatcatcagataaagaataaaaaacccactaatgatttttataaataacaaaagcatcaacccaaccattaatacaattgatatatttaatattgatgaaaaatcaaaataatattatcttgtattaaaaaaatgaaaataatgttataatataaaaaccatatactgcgtcaacaggaaaacgaaagtggaacaatatttagacattgcaaagcggattctggaggaagggaaatggattgagaataaacggacaggcaaaagatgcctgacaattattaatgccgatttcacttaccacgttgacaaaaatgagttcccgctggtgaccacccgcaaggcattctggaaagccgcaattgcagagatgctgggttacttacgcggatatgacagtgccgctcagttcagagccatcggctgtaatacctggaacgccaacgccaatgaaaataccgactggctggcaaacccgaaccgcaaaggtgaggatgatatgggccgcgtttatggtgttcagggacggcaactgaaagtatccccgacagaagcacagtatgatttattattatcattaagtgattccggcgataaagaaggtgttaaaacactgattaatgaactgcgaaaaaatacattcgatcaactccgtaaagtctatgataatttaaagaaaggaattgatgaccgcggtgaaattatttcattctggaatcccggtgaatttaatcagggttgcctgagaccctgcatgttcatgcatcatttctccgttcttgatggcacattatatttaaacagttatcagcgcagttgtgattatgcactgggttatgttttcaatgcgccgcaatgttatttcctgttggctattatggctcagataaccggcctgaaatgcggtaaggtttatcacaaagtggttaaccttcatttatatgaagatcagctggaattaatgcgtgatgtccagattacacgtaagccatttgcatcaccaaaactgcatattaaccctgagattaaaacgctggatgatttaatgacatgggtaaccaccgatgacttcacagtaacagattaccagcaccacgacccgattaaatatccgttctctgtctgagaaactattaaacagcggcacataaaaaaactgcatcagttacgatgcagttttttattactcactgaagcctgatctattccggtgcgttctgttttccggtatcactctgctttttattacccgggcatttgtatgcccataccatcatcagtacgccaataataatcatcggtacagacagaatctgccccatgctgatcccgccgaataaaccaagctgggcatccggctggcggaaaaattccacaatgatacggaacaggccgtaaccaatcaggaacagacccgacacgctgcccatcgggcgggatttgcggacaaacacattcagaatgataaagaggacaataccttcaagcagcatttcatacagctgcgacgggtgacgcggcagaacgccgtattgctcaagcaccggcatcagagatggatcagcagcagccagtttcacgtcttcactgtaagacgtcggaaacagaatggcccacggcgtatcgagagtcacacgtccccacagttcgccgttaataaagttaccgatacgccccataccgagaccaaacggaatcagtggtgccacaaagtcagcaacctgtaaaaaatgacgcttcgtgcggcgggcaaaccaccacatagcaataataacgcccatcagtccgccgtggaatgacataccgccatcccagactttgaacagatacagcgggttttccgcaaacaacgggaagttataaaacagcacatagccgatacggccccccaggaaaacacccacaaacccggcatataacagtgtttcaacttcactgcgtttccagccgctggcgggtttgtctgcacgccggttggccagccacatggcaaacacaaacccgacaagatacatcagcccgtaccagcgtaacgccaccggccccacagaaaaaataacaggatcaaaatccggaaatgccagataagtgttactcatcgtacctcacactgtgtgttgtatccggctgcggttacagctctgcctgccgcagaccgggatatatgactgtaaggacggaaacaccttatgccccgggatgtgccggttaagcactgcctcggataagctgtcccagccccttgttctcaataaacagttccgctttttcacggatctcagccgctgtctgcgcatccagcaatgatgccagcagcggctccagtgctccggcatccagatgccggagcagatacttaatacgcgggatactccgcccgttcatactcagctgacgatatcctaaaccaatcagtatcattgcacctaacggatttgccgccatttccccgcagaccgagaccgggatccccagccgggtggtttccgtccggacaaaattcagcatacgcagaaccgccggatggagcgagtcatataatggtgcaacatgtgtattattccggtcaaccgccagcagatactgggttaaatcattcgtaccgacagaaataaaatcaatatattgtttcagttccggcagcataaacagcaatgacggcacttccagcatcacgcccaccggcggacgttccacccgttccccggtcagtgccgagacttcctcacaggcacggtcaagcagacggatagcttcttccacctcagcgagcccggaaatcatcgggaataatatcttcagattattcagcccgatattagcccgcagcatggcccgcaactggataagaaaaatctccggctgatccagcatcacgcggataccgcgccaacccagacacgggttttcctcgctgataggcatatacggcagctgcttatccgcaccgatatccagtgtccgcaataccaccggtttcccggcaaagagttgcagcatatcctgataacggactttctgctcttcttctgacggaaaaccattatggacaagaaacggtatttccgtacggtacagtccaatcccgtcaatacttttgacgattttttgctcatacttcaggctgagcccggcattcagctgaacggaaacccgttcgccgcttttcagtgcagctgagcggctgagctcatcctcggccagctggctgatagcctgctcctgctcaataatctggctgaattcctgtgctatcagcggctccggttcgatatacaccacgccccgatagccgtcgaggataagcagacggttgtgtaacagctccggctgaatatccgcgcccataataaccggaatacccatcgctctgaccagaatggcggaatgggaatgtgttgccccgtcacgcaccaccacaccggcaagctgttcctgcggcagctctgccagcaggctggcactcagctcatcagccaccagcacaaagcgttccggccactggttactgccggtaaaattatcatcaagatggaataacagccgctgcccgagtgcacgcaaatccgtggcccgctcccgcatatagctgtcctgaagcccggcaaaccggcccgcaaattgctcaatgaccgttttgactgcccattcggccacaaaaccctgctccacaatactgtacaacccttttttcagttgcaggtcgttcagcagatgagagtagagatcgaaaatagcggcactctctttttgtgatgcagcattaaaacgcttgctgatacgacggcactctgccgtggcatcctccagcgctttattcaggcgggcacgctcctgcacgcggtccagcgccgaagcttcagaaacgttctcaagcaccggctgtgaacggtcttcccagccataggccatcacaatcccggaagaaaccggaattgcctggatccgggtctgacggaactgcccgaacaaccctttggtttgtgcctgagccagcagcacggcaagctgcattgccagagtgacaataaaagactcttccgtttcactgaacaggcgtttttctctctgctgcaccaccagcacacccagtaactgacggcggtaaaccaccggcgcaccgagaaatgcacgcaggttgtcttctttaacctgagggagatatttaaaaccggggtgttcgcggacatccgcgatattgataagctcagcgcggcggccgacatggccgaccacaccttcgccgaaagcaaggctgacagcacggccgcggggctttttcagcccctgcgttgccatcagataaaaacagtgatgctgattatctgccaggtagatggaacagacatccgttcccatcgcctgacaggtttctttaaccagaagctccagcgcttccgcgagatcggcggcggcagccactttttcaatcacttcacgtaaacgcgtcagcatccgttccccctaattctggcgccggcgacggtagggagacggtgcccgcacagccgtcgcttcgctgttggcaggcatcacaacggaagaaaactctttcattacgcggcggtacacatcacgtttgaaagagaccacctgacgaacaggataccaataggtgacccagcgccagccgtcgaattccggcgacttgctgcgggtcacattgacctctttgtcctcgcagagcagctgaagtaagaaccagcgctgcttctgaccgatacaaaccggtttggtatcccaacgcaccaaacgtttgggtaatttgtagcgcagccagttgcgggtgaccgccaggatacgcacatctttacgcgttaaaccaacttcctcatacaactcacggtacatggcctgttccggtgattcgccgggattgatacctccctgaggaaactgccacgagtgctgtccgtagcggcgggcccataaaacctggccttccttattacaaattacaatcccgacattcgggcggtagccatcatcatcaatcactcgactacctcagaaaaaaactgaaagatagccaattgtttcacactcccatcatggggtaaacctctgcactcaaaatccttcagcccgccgcatttccggctctgacggaagaaaaacaacacaccgcgttaacggttccggacagtggcaaattcctgagaaaaacactacactattcctctctcaacggggtgcagctccggctttccggccggtgttgctgagataacacccgaggaacctgatccggttaataccggcgtagggatttgagccgccactgctgacagcacagcctgtcgccatcatgctgcactcagatcctttgccaatccttcccttacaggagcgcaaagtgttacagaaactgaccagaaatatcatcgcaggcggccttgccgctctgttctctttccaggcggctgcggataacagcaagccggttctgactgtctatacctatgactcatttgttgccgagtggggaccgggaccggaaattaagaaaaactttgaagcgcaatgcaactgcgaactgaaactcgtcggtctgagtgacggcgtgacgctgctgaaccgtctgcggatggaaggtaaaaaatcacaggccgatatcatcttaggtctggataacaacctgatgcaggcggcactggataccggactgtttaaagaaagcaatgttgatcagtcaaaactggtgctgccggtcaaatgggaaagcaaaacctttattccttatgactacggctggtttgcttttatctacaacaaagacaccctgccgaacccgccgaaaagcatgaaagaactgcttaacagtgatcagaagctgaccattatttatcaggatccgcgtaccagcacaccggggctgggattactgctgtggatggaaaaactctacggggatgacgtggcggcacagtgggccaaaatggcgaacaagaccctgacggtcaccaaaggctggagtgaatcttacggcctgttcctgaaaggtgaagctgatctggtactgagttatacctcttcgccgggttatcacatgctggcagataacaaagataactatgctgccgcactgtttgaggaaggacattaccttcaggttgaaatggcaggtgtgctggcctcctcagaacacccggcactggcggaacagttcatgcagtttatgctgacaccggatttccagaaaacactgccgaccaccaactggatgtatcctgtaattgatatgccgctgccgccggtttacgacaaaatgccgaaaccggcgaagacgctggaatttgatgcaaaagaagtggcgaaagagcgcaatcagtggatacggatatggcaaaacgcagtcagccgttaattgccgcgtacctgataccgggtgcactcgcatccggtcttcttctggtcgttgctgtcagtgccttcggggcgctgtggtttaacacaccggacacggactggcagcagatatgggatgacagctacctgtggcatgtcgtccgctttaccttttggcaggctttcttatccgcactcttttccgttatcccggcggtttttctggcccgtgcactctggcggaggcgtttcccgggacggactatttttctgcggttatgcgcgatgacgctggtactgcccgtactggtggcggtattcggtattttatctgtctacgggcgcaacggctggctggcacatatttccggttttctggatctggactataccttctccccgtacgggttacagggcattctgctggcgcacatcttctttaatatgccgctcgccacccggatgctgtatcagcaactcgataatattgccacggagcagagacagctcgccgctcagcttaatatgaatgaatggcagcatttacggattgtggagtggccctatctgcgccgtcagttgctgccgactgcggcactgatttttatgctctgctttgccagttttgccacggtgctggcactcggcggcggcccggcggcaaccaccattgaactggcgatttatcaggcactgaattatgactttgatatcggccgcgctgcgctgctggcgctgatccagctggtgtgctgcatcgggctggtactcgtcagccagcgtttgtccggtcatttttctgtcggctttacccagtcactgcaatggcgcaacccgcaggacactctgccgcgccggctgactgacggcctgatcatcctctgtgccctgctgtttctgctgccgccgttttttgccatcatcgcagacggcctgaatccgggattgctgccggtactgcagcaaccagcgctgtggcgggcttttttcacttcgctcggtattgcactggcttccggttttatctgtgtgctgctgaccatgatgctgttatggagcagccgtgaactgcggctgaggcaggcggtcagagcaggacaggctatggaactttccggattggtgatcctcgccatgccgggaattgtactggctaccggggttttcctgctgctcaacagtacgaccggcaccactgatttgggtgcgatcccatacgggctggtgatcctgaccaacgcgctgatggcggttccgtatgcactgaaagtgctggataacccgatgcgtgatctggctgaacgctataacccgctctgtctctcactgaatatcagcggattcaaccgactgaaactgattgaactgaaagctctccgtaacccgctggcacaggcggtggcatttgccagtgtgttgtcggtcggggattttggcgtgatcgcgctgttcggcaatgaagatttccgaacgctgccgttctatctttatcagcagatcggtgcttaccgcaatgcggatgccgcggtcactgcactgatcctgtttttactctgtttcgggctgtttaccgttctggaacgtctgccggggaaacgcccatgattaattttgatcatattctttaccgctatcagcaacagactatgaattttcatttttccgtagctgccggagaaaaaattgccattctcggcccgagcggcgcgggtaaaagtaccctgctgtcactgatcgcggggtttcagtttgccgaaagcggcactattctgctgaataatgaagatcacacccgcaccccgcccgccagacgcccagtatctatgctgtttcaggaaaataacctgtttgctcacctgacggcggagcagaatatcgccctcggttttcatcccgggatgaaactgaatgcggagcaaaaaatgcaactggaacagatcgctgaacaggtttcgctgacaccactgctgaaacggctgccgtcacagctttccggcggtcagcgtcagcgggtggctctggcacgctgtctggttcgttcccagccggttttgctgctggatgaacccttctccgcactggatccggcgctgcgcaatgaaatgctggcactgctggaaaccatctgtgattcacggcagttgacactgatgatggtttcccacaatacagacgacgcggccagaatcgcgccccgcgcgatggtggtggataacggcaccattgcctttgacggcagtaccgccgctctggtcagcggtgaggttccccaggctcagatcctcggtatccgtccgtaaaccgcaccttaaatactgtatatatccacaccactctgctatagttatttttttcatcagcagaacggacaaaatgatggcagggcacaacagttttccctcccgtcaggtggcagcaccggcggaagccggttttattctgacccgtcactggtctgataccccgcgcggtattgaagtccgttactggctggcaacagataacgggccacggcatgtttctgttccgctgcagcaggctgtcggctttgtcccgcaccgggagctggcggaaagccgtcccttcattaacaacattcccggcgccacactgacagcacgcccgctgaaggatttccgtcaggatgatgtcagtgccgtttactgccggcagtaccgccagttacagcagctggaaaaacagctcggcgaacagcatctgcatctttatgaagcagatatccgcccctgcgaacgctatctgatggaacgctttatcaccgccgctgtctgggtgcagccacagccggatggccatgtgctgatgaaaccgcatccggattaccgcccggcgctgaaaatcgtttctctggatatcgaaaccaccgagttcggtgacctttactccatcggactctccggttgcggggctgatacggtatttatgctcggcccggagaacggcacaccgctgaccaatccggatttcaggctggagtatgtcccgcgccgcccggatctgcttcaccgtctgaaccagtggctggcggagcacgatccggacatgataatcggctggagcctgatccagtttgatctgcgcattctgcagcgtcatgcggaaaagtatcagatcccgctgattttcggccgtaataatgccccgctctcctggcgggagcatggcttcaaacccggccaattttttgccggtgctccggggcggctgattattgacggtatcgatgccctgaaagccgcgacctggcagttcccgtctttcagtctggaggcggtgtctcagacattactcggcgagggcaaagacagtgattccccgtatgatcgcatggatgagatcaaccgccgtttccgcgaggataaaccggcactggcacggtataaccttcaggactgccgtctggtcacccggatttttgagcacacccacctgacagaatttctgctggcgggggctgccgtaaccggcctggcaccggatcgcatggggggctctgtcgccgccttcacccatctttatctgccgccgatgcaccgtaaaggctatgtcgcaccggatcccggcgaaaaacccggtgagccgataccgggcggctttgtgatggattctgccccgggattatatgactcggtggtagtgctggattttaaaagcctgtacccctccattatccgcacttttctcatcgacccgattggtatggtcgaaggtcttgccgcaccggaacaggcggttcccgggtttaagggggcgtatttttccaggaaaaccaactgcctgccggatatcgtcaaccgaatctggcatgagcgggacatggctaaactggcaggggataagccgctgtcacaggcactgaaaattattatgaatgcgttttgtggtgttctgggtgccgccggatgccgtttttatgatccgcgcctgacctcctccgtcaccatgcgcggacatgacatcatgcgcaaaacccgcgcaattattgagtctctgggttatcaggtcatttacggcgacaccgattccacctttgtctggctgaaaagtgcacacagtgaagcggatgcggaacgtatcggacactggctggtggaagagatcaatcaatggtggcagacacatttaaaggatgaatacgagctgacctctgccctggaaattgagtatgaaacccactaccgccgctttctgatgccgacgatccgcggaactgacctcggcagcaaaaaacggtatgcggggctttccggggataaaatggtctttcgcgggctggagacggtccgcagtgactggacaccactggcacagcatttccagcaaactctgtaccggctgattttcgataaaatgccgtatcagcagtttatccgtgattatgtccgcgacacactcacaggccgctacgatgaccggctggtgtaccgcaagcgcctgcgccgtccgctggcggattatcagcgtaatgtgccgcctcatgtcaaagcggccagaatggcggatgagtataatgtccgcatgaatcgtccgccgcagtaccagcgcggtgcggggataagctatatcattacccgttccgggccgcagccgctggagattctgacggcaccgccggactatgagcattacataaataagcaactgatgccgatagccgacgccatcctgcctttcctggaggatgacttcaccaccttgttaaccgggcaattattgatgccattttaattttgccattttacaggtgacgatgcggatctaatggattaacatagcgcccctttactgcttttaacgccggagcagagtgatgcagctgacgctgctgttctgactgccggtgtttttcccggtgaatacaatgccgtttttgtatcaccggtaatgatgtccacagcatttttctaattagccctgaataacagaatcgagccaaaaatatgccgtttactcttggtcaacgctggataagcgatactgaaagcgagctgggattaggtacagttgtatctgtcgacgcccggatgatcacccttcttttccctgccaccggtgaaaaccgtctctatgccgcagccgatgcccctatcacccgtgtgatgttcaacgaaggggataccgttaccagtcacgaaggctggcagctcagtgtgaccgccgttgaagagagcgacggattattaacctataccggacagcgtaccgataccggtgaggataatgtccgcctgcgcgaagtgtttctcgacagtaaactgacatttaataaacctcaggatcgcctgtttgccggtcagattgaccgcatggatcgctttgcgctgcgctaccgcgcccgcaaattcctgagtgaagagtaccgccgtgctaccagcggcctgcgcggcattcgcgccagtctgatcccgcatcagttgtttatcgccaatgaagtcggtaaacgccacgcaccacgtgttctgctggcggacgaagtgggcctaggtaaaaccattgaagccgggatgattatccaccagcagttaatggccggacgcgccgagcgtgtgctggttatcgtgccggaaagccttcagtaccaatggctggtggaaatgctgcgccgtttcaatctgcggttttccctgttcgatgacagccgctataccgaagcacagcacgagagtgacaacccgtttgatactgaacagctggtcttgtgctcgctggattttgtccgcaagagcaagccgcgttttgaacacctggcggaagccggctgggatatgcttgtggtggatgaagcacaccatctggtctggagcgaagaagcgccaagccgtgagtatcaggtgattgaaaccctggcagaaagcattccgtctgtactcctgctgaccgctaccccggaacagctgggcatggagagccactttgcgcgtctgcgcctgctggacccgaaccgtttccatgatttcgaaacctttgttgccgaacagcagaaatatcagccggttgccgatgcggtcactctgctgctcgaccgcgcaccgctgaccaaagatcagcagaatgccattcatgacctgatcgccgaacaggatattgagccgctgctgaaagccgccaataccgacagtgaagacggcgaaaatgcccgccgcgagcttatcagcatgctgatggacagacacggcaccagccgcctgctgttccgcaacacccgcaacggagtgaaaggcttcccgcgccgcgaactgaaagccattaaaatgccgctgccggcacagtatcagactgcgattaaagtcgccgggatcatgggcagcaaaaaaaccacggaaatcaaagcccgtgagatgctctatccggagcagatttatcaggaatttgaaggcgaaaacgccacctggtggaacttcgacccgcgtgttgaatggctgctcggcttcctgctggcaaaccgcaatgaaaaggtgctggtgatctgtgcccaggccgcaaccgctctgcagctggagcaggttctgcgcgagcgcgaaggcatccacgctgcggttttccatgaaaatatgtccctgctggaacgtgaccgggcggcggcctactttgcctccgaagaggaaggcgctcaggtgctgctctgctctgaaatcggttctgaagggcgtaacttccagtttgccaatcagttggtgatgttcgatctgccgtttaacccggatctgctggagcagcgtatcgggcgtctcgaccgtatcggtcagaaacgcgatattcagataagcatcccgtatctggaaaataccgcacaggccgtactgctgcgctggttccacgaaggtctggaagcctttgaatatacctgtccgaccggccgcaccatctatgaccgctattacgacagactgattaacctgatggctaacccggcggatctcagtggttttgatgagtttatcgcggaatgccggaagacccatgatgttctgaaacaacagctggaacagggtcgtgaccgccttctggaaatgcattccaacggcggcgaagccggtaatgagctggctgctgaaatcgcggatcaggacgaagataccgagctggtcacctttgccctgaatctgtttgatattgtcggcatcaatcaggatgaccgcagcgataacatgattgccctgactccgtctgaccatatgctggtaccggattttccgggtctgccggaagacggctgcaccatcacctttaagcgtgaacaggcattgtcccgcgaagacacgcagtttatcagctgggaacacccgattatccgcaacggtctggatctggttctgtccggtgataccggcagctgcgcggtctcggtgctgaaaaacaaagcgctgccggtcggcacactgctgacagagctgatttatgtggtggaggcacaggcgccgaagaatctgcagctgacccgcttcctgccgccgacgccggttcgtctgctgatggatgtgaaaggcaataatctggcgtctcaggtggagtttgaaagctttaaccgccaactgaatgccgtgaaccgtcataccggcagtaagtttgtcaatgcggtacagaatgaggtacatcaggtgctgcgtctgtccgaagacgttgttgccggtcaggctcgtgagctgattaccgcagcgaaaacaatggcggatcagcaccttacactggaacacgaccgcctgctggcactgaaatcggttaacccgaacatccgtgatgacgagcttgatgccattgaagaagaacgtcagcaaatcctgtcacatctggatgatgctaactggcgcctggatgctatccggctgattgtcgtttcgcatcagtaacctgtatcccggcagagaatatctgccgggtctctgatttggtgatcccatgctaatggaaccctataacccgcctgccgatccctggctgaacatcctctggcaggatgaaagtatcattgtggtgaataaaccaagcggactgctttccgtacccggccgtgcgcccgaacataaagacagtgtgatgacacgcattcagcgtgattatcctgccgcagaatctgttcatcgtctggatatggcaaccagcggtattattgtggttgcgctgaccaaagccgccgagcgggagcttaaacggcagttccgcgaacgggaaccgaaaaaaacctatgttgcccgtatctggggatgcctggagccggaaaccggtatggtggatttaccgctgatttgtgactggccgaaccggccgaaacagaaagtgtgttttgaaaccggcaaaccggctcagacaggttatgaagtgctggaatatgaggaaaatgccacgcgggtaagactgtttccggttaccggacgttcgcatcagttgcgggtgcatatgctggcactgggacacccgattctgggtgaccgtttttatgcacatgatgaagcaagagccgcagcgccccggctgcagcttcatgcagaggcgctgtctgtcacacatccggcaaacggcaagccgatgcattttacttgtaaatcagatttttagtggattaacacggtcaccgaattcattgaggcaagaatcaggcaaagtgctaatcccgctactccgataagaacacgggtattggccatggatcatatccttaacatatttaataaaatatttacgtaatttttcaactacatttatattttatagcaattatatgaaaagaatatgatccgctctgcactttcccggcaacacgttttacaccttaaaaacggtattaaacgggattatttaaagcctttctcttttttaatgagatcatatgctgcctggatagattgcgctttctctttcgccagctccatcatttccggcggtaatcccttcgccaccagtttatccgggtgatgttcactcatcagcttgcggtaggcgcgtttgatgacagtactgtcgtcgctttctttcacgcccagcacccggtaagcggcggcaaggtctgcggtctgatcgcggtaatagccctgctgagactgctgctgccaattgccgctatgtcccccgccgtgcatctgcgcctgcatcattgccagtacattttcaaactgatgacgcgggatccccagctcttcggcgatcaccaggagaacctggcgttcattcggatgcagttccccgtcaccaaacgccgcctggatctggatttccagaaacatgcgcagtaaatccgcccgcccgtaacaggcgcgccgtaactgacgcagtgcatcgcgcagcgggaaaccggccgctttaccttcacggaaagcattctgagcctgagtccgtgcactgccgtgcaactgcatgcgatccatcagagcggtggccagataaatgtctgactccgttacccggccttttgatttggtcagatgccccagaatctgaaaggttgtgctgaaaaagagtgcctgtctggactgattgttgctgaatgagccacccaattgctgactgcggactttatcaatcgcatgaccaataagaaagccgagaaaaataccccaaaaaccggcccctgacgccatgcctaataaaattccgatgatttttcccaaatagtgcatatactcctcaattcaacaatgcccttggcgcaattttgcattatcatactacccattctgtacgatgcctaacgccatttggatacgtgaacctgtttcacgcgcgctcttttttcgtgtaaattaggcttttggcgttcgggcaatgtgctaccgaggacggaattgcagacatacttatgaagaagagttatccaaccctgctggccaccattatctgggcagcgttatacagtcaggctgcacaagccgccacacttgccgagcaatgtatgctgggtgttccggtgtatgacgagccggttgttgacggtaaacccggtgattttccggttaatatcactgcacaaggtgtgtcaggcgaatatccgcacgcggtaaaatatgatggtggcgtcgatatccgctcaggtaaccagaatctgaaagcggaggaagtggaagtcacccagagcggcgaagaaaccaatcctgtccgtattgcgacagcaaccggtgatgtccgctattctgatccgcaaatccgtctgaaaggaccgaaagcgtggctgaatctcaataacaatgatgctgatgttgagaaaggtgattaccagatggtcggccgtcagggccgcggtgatgccgacaaaatgaagcttcgcggcgaaaaccgttataccatcctcgaaaacggggtctttacctcttgcctgccgggcaatgacagctggagcgtcaaaggctctgaggtcattattgaccaggaagagcaggttgcggaaatctggaacgcccgtttccgtgtcgccaatgtcccgatcttctacagcccgtacctccagttaccgatcggtgataaacgccgctccggttttctgatcccgaacggcagctattccaaatcatccggcctggaatttaccctgccgtattactggaatatcgccccgaattacgatgccactatcacgccgcactatttcagtaaacgcggcctgaaaatggataatgaattccgttacctgacacagttcggtacaggcacactggcctttgatttcctgctggatgactcgcagtataagaaagacaaagaagctgccggtgatgcagagtgggcgaaacgtgattccaatgaccgctggttattctactggggtcacagcgggtcatttgcccaggactggtggttctcctctgactacaccaaagtcagtgactcgcgctattttaccgatttcacttccgcttacggtaactccactgacggctacgccacacaaaaactggctgtgggtatccgaaaatcgaactggaatgccaccgtaaccgccaaacagttccagatcctgaccaacaatgataatgcaacatcctaccgtgctgagccgcagttggatctcaattattataaaaatgacctcggggtatttgatttccgggcctacggtcaggtctcccgctttaccagcgtaggtaaaaataatccggatgccgtccgtattcatgcggaaccgacactcagcatgccgctgtctaacggctgggccagtttcaatactgaagcgaaactgatggcaacccattatgatcaggatattcctgaagtactgaagaactccgaacttgaaaaaaatgttacccgggtgctgccgcagtttaaagctgatgcgaagatgatcttcgagcggccgatgttctttaatgacagcttcacccagacattagagccgcgcgcacaatacctgtatgtcccgtataaaaaccaggacaatatcaataactttgactccacactgatgcagtccagctacagcggcctgttccgcgaccgcatgtacagcggtctggatcgcatcgcatccgccaaccaggttaccaccggggtaaccagccggatttatgatgatgaattagttgaacgatttaacgtttctgtgggtcaaatctactactttgaacgtccgcggaccggtaaaactaccgttgtggacgagaaagatgaaaccggctcgatggtctgggcgggtgattccatgtggcgttataacgataactggggtctgagaggcggtattcagtatgaccgccgtctgggcagtgtctccatgtcaagtgccacaatggaataccgacaggacgccgagcgtctgattcagctgaattaccgctatgtggaccgggactatatccaggctatgcgccagaatgcttccggtaataacgcagagttacctgcttatcagaaaggcatctctcaggtcggtatcgtggccagttggccggttgcagagcagtgggcctttgtcggtcagtattactatgacaccaaagagagccagccggccagccagttagtcggtctgcaatacaatacctgctgctgggcggcaaacgtcggttacgagcgtaagattatcgactggaaaaatgatgccagtgagtacgacaataaaatcacgtttaatatcgaattacgcggtatgagcagcaattacagtctgggcagccagaaaatgcttgagcgcggtattctgccgtatgttccggcattttaaccgcctgagctgacacaattttcacatgccgtaccggcggtacggcgatacgaaacatgatgggatacttatgaaaaactggagaacactcattctcggcctgatgttcacggcaagcacagcatcattcgcagcaccgcagcagcttgataaagttgcggcagtcgtgaataacggtgtggttctggagagtgatgtcaataatatgcttcagactgtcaccatgaatgcccgcaatgccggtcagcagattccggatcaggcaacattacgtcagcagattcttgatcgtcttatcatggacaatatcgtgatgcagatggccggacagatgcagatctctatccctgaccaggcggttgacggcgctatcgaagatatcgcccgtcagaacaacatgacccttgcccagatgaaagatcgtctgaaacgcgacggcatgagctatgacaaataccgcagcgatatccgcaaagaaatgatgatggcggaagtccgtaacaacgaagtccgccgccgtgtggtgatcctgccgcaggaagttgattctctggcaaaccttatcagcacacaaaacgctgcggatactgaactgaacatcagccacatcctgatcccgctgccggaaaacccgacagaagagcagatgaatgcagcaaaagaaaaagtcaccaccattatgaatgaacttcagcatggtgctgacttcggtaaactggcgatcacctattctgcggatcctcaggcgctgaaaggcggtaatatgggctggagccgtttacaggagctgccgggtctgtttgccgagcgccttcagacagccaaaagtggtgagattgtcgggccggtgcgttccggtgtcggtttccacattctgcgcgtgaatgaagtccgcggaaacagccagccgatttctgtaacagaagtcaaagcccgtcatattctgatcaaaccgtcaccggtgatgaccgatgaccaggcccgcagcaaactgcagcagattgccgctgatgtgaaaagcggtaaaacctcctttgatgctgcagcaaaacaattctcagaggatccgggctctgccctgcgtggtggtgagttaggctggtcaatgcctgatatctacgacccggctttccgcgacgcactgatgaaactgaaaaaaggcgaactgagtcagcctgtccgctcctctttcggctggcacctgatccagcttgaagatacccgcaacgtggataagaccgaagcggctcagaaagatcgcgcttaccgtatgctgtttaaccgtaaattcagcgaagaattacagagctggatgcaggaacagcgcgccggcgcttacgtggaaattttagatggcagtaacaaataagctgaaacctgtcgttattacccccggcgaacctgccggggttggtcctgacctgacagtcgcgctggcacagcgcgactggccggtaaaactggtggtctgtgctgacccgcaactgatgcagcaacgcgcacacgccctgtcactgccgctcacccttgaaccttattcaccggatactgcctgtcagccgcagcgcgccggcacactgacgattctgcctgttgaactgaaagcgccggctgtcgccggtgagctcaacgtggcaaatgccgcctatgtgacagaaacactggcccgtgcctgtgacggctgtttacagggtgaatttggtgctttgattacaggcccggtgcacaaaggcatcattaacgatgccgggatcccgtttatcggccacacagaatttttcgctgaccgcagtcactgcaaacgtgtggtgatgatgctggccaccgaagaaatgcgggtggcgctggcgaccacgcatctgccgattttacaggtgccggcagccgttgaccgcacctgcctgcatgaagtgatcactatcctcaatcatgacctgcgcaccaaattcggtatcgcacagccacatatcatcgtctgcggtctgaacccgcatgcgggcgaaggcggccatatggggcatgaagagatagacaccattatcccggcactcgatgagctgcgggcacagggcatttccctggaaggtccgctgccggcagacaccctgttccagccgaaatacctggagcgtgcggatgccgtgctcgccatgtatcacgatcagggcctgcctgtgctaaaatatcagggattcggccgtgccgtgaatatcacgctgggactgccgtttatccggacctctgtcgaccatggcacagccctggaactggcaggtaccggcaaagcagatgtgggtagctttatcaccgcattaaatttagcgattacaatgattaaaaacagtcaatgaatacacgagtccatcaggggcattttgcccgtaaacgtttcgggcagaacttcttaaccgatcaatttattatcgacagcattgtcgcgtcgattaacccgcaacccggccaggcgattgttgaaatcgggccgggactggctgcactgactgagccggtcgccgatcgcatggacaaaatgacggtcattgaaattgaccgtgatctggccgcccgtctggccagccatccgtttttacaaagcaaactgaccattattcagcaggacgccatgactgtggatttcacggcactggcacaggaacgcggccagccgctgcgggtgttcggtaacctgccgtacaatatctccacgccgctgatgttccatctgttcacgttcactaacgcaatcagtgacatgaactttatgctgcaaaaagaagtggttaaccgtctcgttgccggtccgggcagcaaaacatacggccgtctgagtgtcatggcacagtattactgccaggtcgttccggttctggatgtgccgccgacggcattccgcccggcaccaaaagtggattcagcggttgtccgtctgatcccgcaccgcgaaaatccgtatgtactgaaagatgtcgcgctgctcagccgtgtaaccacgcaggcctttaaccagcgccgcaaaacgatccgcaacagcttaggtgatctgttcagtccggaaaccctgactgagctgggtattgatccggccacccgtgcagaaaatatcagtgttgcgcaatactgtctgatggccaattacctggcggaacatcccgcctcataggggattcatcatgaataacgacccgagaatttgtattcaggttcagagtgtttatatcgaaagtcagtctgaaccggatgcggaacgctatgttttcgcgtataccgtttctatccgtaacctgggtcgtgatcctgtgcagcttatcagccgctactggcgtatcactaacagtgaaggccgccagacagaagttcagggggaaggtgtcatcggtgaacagccggtgatccggcccggtgaagagtatcgttataccagcggcacggttctggaaacaccgctgggcaccatggaaggttattacactatggtggatcacgagggtgcggatttcatcagtgagatccctgttttccggctcgcaataccaacctttattcactgattttctatggcaacctatcttatcggcgatgttcatggctgttaccatgaacttcgcgcattactggctcaggctgattttgatccgcaggcagataccctgtggctgaccggcgatctggtcgcccgcggcccggattcactcgatgtcctccgctatgtcaaaagcctgggtgactgcgtcaggctggtgctcggtaatcatgatctgcatctgctggggatctacgcggggatcagccgtaacaaaccgcgcgatcatctgaacaaactgctcagcgcaccggatctggatgagctgatcaactggctgcgccgtcagccgatgctgcaggttgatcatgagaaaaagctggttatggcccatgcagggatcaccccgcagtgggatctggataccgctattatatgtgcccgtgaagtggaagcggttctcagcagtgatacctatccgctgtttattaatgcgatgtatggtgacctgccgaatgactggtcaccttccctcaccggcctgccgcgtctgcgcttttccaccaatgccctgacacggatgcgttactgtttcccgggcggacagttggatatggtctgcaaagataaaccggatcaggtttccgcgccgctgaaaccctggtttgccctgccgtcaaaactgccggaaggctacagtgtggcctttggtcactgggcgtcactggaaggcaaaggggcaccgcgcggtatctatgcactggataccggctgctgctggggcggacaactcaccatgctgcgctgggaagatcgctgctatttctggcaggaatcttttgcggtgcgggatgaggatgatgactgaccggccaccggtaacagacaagaaaaaagcagagccggtggctctgctttttttatatcagcattatttatgaaataatacgaatcaactgattaatcagctcttacggcgctctaagatttcaaagcagaaaccgtgagagtttgcttcatcagcgtcatgatattccataaaagtggagtcccactcatccggctcatagtcagggaagtaagtatccccgctgacttccgcatcaacgtgtgtcagatataaacgatccgccagcggcaggaactgtccgtagactttaccgccgcccatcaccatgatctcaccgtctgtttctttctgtgcaatcgccagtgcttcttccacagacttcgcccagaccacgcgatcatcattgcccggcgtacggctgagcacgatattgaggcgatccggcagaggacggccgatagattcataagtcacgcgacccatgatcaccggtttattcaccgtattacgtttaaaccatgccaggtcttccggcagtgtccatggcatcgcattttccatgccaataacccgatccatagctaaagcagcgatcaagctaatgttcattcatttcaccttagggctgagagaaattttgccgtcactatacgtaaactactcaatgccgtcgactgaattcagtgtttcatcaatacaaataatttatttgtcttcacacttgaaggtgagtcatacttttactctgcattcaggtctttttcagcaaggatataccacatgtatgacgccaccctgatggtcaccaccatcgctgcgctcggtatgatctccccgggcccggacttctttctgattgtgaaaaacgcagcccgttaccagcgtgccgccgccatgatgaccgcactgggcgtgctgtccgcgatcgctattcacatgacctactgcgtggccgggcttgctgtgatcatcaccaccacaccgtggctgtttatgatcctcaaatatgccggggcggcttaccttatctggatagggatcaacagcctgctggcgcgtgccggacatacccttgataccggagacggctcacatcagcgcatttcttataagaaagcctttatgcagggattcctctgcaacctgctgaacccgaaagccacactctttttccttgctatttttacccaggtactggatatcaattccggatttggtgaaaaactctggtatgctgctattgtaatgggactggcggtggtttactggccatcactggtactgctgattcagagtgctccggtacgccacggattggcgaaaattcagaaatatatcgataaggtccttggcgtcgtcctgattggctttggcgtccgggtcgcaatgagctgatgattatgataatgaaaacagataaatacacttttcagccggaatttcagaatgtgatacaggatgccgtacagtccctgtgcactgctctgccgggtgttctgcacagcatctatgtttacggcagtgtggcagaaggtcgcgctgtcccgggccgctctgatctggatctgaccctcgttttgcaccggccgctcagtgcggcggaaaaaaccattctccgcagtctggacaaagcactgaccgcacgccacagcagtgtgtcaaaaatcgggtttgataccggcctgctgtcagaagtgacctctgcggaagaacagccggtctgggcttactggctgggacctttctgcctgccggtctggggcgatgacctgacactgaaactgcctgtcgtgacactgaaccgtgagattatacacggcattaacggtgattttccggtactcgtccgtaccaacctgatgcagttacagaaaagcccgccgctggctgagatccggcggataaaacgggaaaccgcgcggcgtctgctgcgtgccacggcactggtgtggaatgattatgaaacctgcacttacccgctgccactgccgcagatggccggaaaagccatagcactgtatccggaaaagcgccacgcgatcaccttcctgctggggcagaccgaagaaccggataccggcatcattcagtttatcgcggttgccgggacattctcccgctggctgcgggatgaggaaaaacggctgctgagccgctgagaaaaccataaaaaaaccgctgattattcagcggtttttttatatccggtattttaatactgggaagacggctcaatttccagctgcccggtaactcctctgtccgcctgctccaggaactggctgtaatagaagaacgggaagtgggaatacgacggctgcatcatctgcaccagcaattcactgcgcccgtcaatccagacagtgtctttccagccgtaatcctgcggctgcggtgactggccgttatggttgatcaccttaaagcggacaccgctgatatggaacggctgcggggtatccgttgtgacaacccagcgctcccagttgccctgctgtgtgcggatatcggtgcggctcatatcccacatcgcgccgttaatccccggcggtgacaaactgagtgatacatcgcggttacggacaccggtcgtgatttgtgtcggatcctgaatcagggtggttggcaggttatctgttaccagcgagatcaggccggttgcgcggatagtcagcacattggtattcaccagtgtgtttgatgtctcaaacaggcttttaaaacgctctgtcagggtagcggattccccggccgtgatagtcagtgtttctgtttttgacatatcgatcagcacttcgcgccgttcgcccggcgacagggacagcacctcaaccgctaccggtgatggcagcaggccctgatcagaggcaatcatatagaacggacggccgtcactgagtttcagttcaaagcggcgggcgtttgcggcattgaccatgcgcagccggatccagcctttcgacacttccagatacggatcttccgcaccgttgacgatcagccggtcaccgataaacataccgtcactttctgtgcggtactccggtgaaccgaaggaatccaggcgtttatcctgaatgatcagcgggaaatcattgacgccgtactctttcggcaacggcagattacggctttcctcatcatccacaatccacatgccggcgagcccgttataaacgtgcggcgccatccggttcggggtattggcgtgataccagcaggttgctgccggctggcgcaccgggatcaccggcgaccagtctgtatttggtgaaatcagacgtgcggcacccccggcaaccgttcccggcaccagcagcccgctgacattgaccgcaaccggctctgacaggcggttgctgtaaatcattttgatgtcatcaccgttacggacgcggacagtcggcccgagataacggccgttaaagccccagacactggcctgagttttaccgttaaatgaccagtgtgtgcgctgcatcgtcagaaataacggctgtccgttgcggctttccagcaatggcggaacaggtaacggctgactgccgccctcatctgccgcgcggacagacagaggcagtgagcctaaacacacagctaagccggatgcttgaataaaccggcgccgactcagggtcatagcatctccgaaaaaaacgtttccatgatttttatgatttgtgccgaacacccgtaanagccggtgagcagacagagacatccgtgttatcgtttcatgaagggcatacgcttaacaacggagtgttaagcgtatgatatagcggatgaagagcaattcctaaacttatctatgataagttgcaaaataataaggctggtattgtataaccggcgtgacagtcacgggaatcaagcgtctttacgacccttttgtttttccatttcaatcacttccttatccagctccgcgatgcgtttgatcatcatctggcggcaatcttcagccagttcacgcacctgctcgcgggtatattttgaggtatcaaccggcggcagcatttccacaatcaccacaccgttattccagcggttcagtttaacgcgcccctgagtggtggacacacataccggcaccaccggcacaccggcggccattgccgcgtggaaagcaccggttttaaacggcagcataccgcggccgcggctgcgcgtgccttccgggaacatccagacagagatattgcgttttttgatctgatccgccacctgggtaatggtgttatgggctttgctgcggttgctccggtcaatcaggatattccccgaaatccagtacagctgcccgaaaaacgggatccaaatcaggctgcgcttaccgacagtcaccgtgcgcggctgtaccgcattcgacatggtgatcatgtcatagttgttctggtggttgcccacatacacacaggaaccgtagtgtttcgcttcttccggaatgcggtacaccattttaatgccgaaaacatgagaaagcttgccgtacatgcggccgaaggtcatcacatgcttcgggttacgcgggctggtcaggcagataagaatgccggccagactaccgaaaatacaataaataataacgatgatgatacgtaaaatggctaacatgcgtcccccgcaaaatggccttttaagaaaagcggggcaatcattgccccgtgaatagtatcgctgttaataccggatattacgccttcggctccggttcagaaatatcaatccgttcgatcttcttctgcataccgcgcggcagtgccgtaccgcggcgtccgcgctcagcacggaatttctgcagatcttccggacgcagcatcagtttacgcttgccgaaatgcagtgtcacactggcatccgggcggatcacaaacagatgtgccagaccgtcttccccggctgcggccgccgcagaggtaatggagataatcttgttccccttcccttttgacagctgcggcaggtcaccgacagggaacagcagcatccgcccttcctgcgatactgccagcagaaggtcgttttcctcgtcattcacctcaatcggcgtcatgactttcgcgttatccggcagcgtgatcagtaccttccccgctttgtttttcgcgaccaggtcactgaaggtacagataaagccgtaaccggcatccgaggccatcaggtacttctgattttcatcgttcatcagcacctgttcaaacacggcgcccggcggcggtgtcagtttgccggtcagcggctcgccctgaccacgggcacccggcagttccagcggatcgagcgagtaactgcgcccggtggaatcaaggaataccaccggctgattacttttgcctcttgccgcgccgaggaaggtatcacccgctttgtagttcatgcccgacgggtcgatatcatggcctttggcgctgcgtacccagcccatctgtgacagcacaaccgtcaccggttcggacggcagaatgtcatgctcgctcatggctttcgcctcctcgcgctcattgagcggggaacggcgatcgtcaccgtactgtttagcatcttcctcaagctcttttttcagcagcgtgttcatgcgccgctcagagccgagaatagcctgtaatttatcacgttctttggccagctcatcctgctcgccgcggattttcatctcttcgagtttggctaaatggcgtaatttcagttcgagaattgcttctgcctgagtatcactcagcccgaaacgatccatcagtaccggtttcggctcatcttccgaacggataatttcaatcacttcatcaatgttgagatacgcaagcagcaaaccgtcgagaatatgcagacggcgcagcactttttacagccggtgattcaggcggcggcgccccgtttcgcggcggtaaaccagccactcattgaggatctcaaccagccctttaaccgccggacgtccgtccaggccgatcatattcaggttgatgcggtagcttctttccagatccgtggtcgcaaacaggtgagtcatcacctgctcaagatcgatccggttactgcgcggcacaaccaccagccgggtcgggttttcatgatccgattcatcgcgcagatcttccaccatcggcagctttttcgcccgcatctgcgcagctatctgctccagcactttcgcgccggaaacctggtgcggcagtgctgtgatcaccgcattaccgtcttcaattgtccacaccgcgcgcatacgcacagagccgcggccggatttatagatcttacggatatcttccggtccggtgataatttccgcttctgtcggataatcaggacccgggataaacgccatcacctcttcgagagacagagacggcttgtcgatcagcgccagcagtgcaccggtcacttcacgggcgttgtgcggcggaatatccgtcgccataccgaccgcaatcccggtggtgccgttgagcagaatgttcggcagacgcgccggtaacattttcggctcctgcatggtgccgtcaaagttcggcacccagtctgcggtgccgtgtcccagttcactgagcagcacttccgcatattttgacaggcgcgattcggtataacgcatggcggcgaaggacttcggatcatccggtgccccccagttcccctgtccgtccaccagcgggtagcggtaagagaacggctgcgccatcagtaccatcgcctcataacaggcgctgtcgccgtgcggatggtatttacccagcacgtcaccgacggtacgggcggattttttgtatttggcggagttgctcagccccagttcagacatggcatacacgatacgccgctgaaccggttttagcccgtcgccgataaaagggagtgccctgtccatgatgacgtacatggaatagttgaggtaggcattctctgtaaaattatgaagcgcctggcgctccacaccgtcatgagttatttcactcattcactctgttcctctgaccttttgtgccgtcacggggtgacatcacacatccaattccacccgatcacccttttcctgcagccagttacggcggtcttccgcacgtttcttgccgagcagcatatccatcaccgacatcgtttcctgatagttttcctcactgatagtgagctgtaccagacgccgggtattcggatccagggtcgtttcacgcaactgaccggggttcatttcccccagccctttaaaacgctgcacattcggtttgccgcgcttgcggcttaatttatccagaatcgcatttttctcgctctcatcgagggcgtaatgcacctctttaccgaggtcgatacgatagagcggcggcatagccatatagacatgaccggctttcaccagcgccgggaagtgacgcacaaacagcgcacacagcagggtggcgatgtgcagcccgtccgagtccgcatccgcgaggatacagattttgccgtaacgcagggtgcttaaatcgtcgctgtccggatcgataccgatagccacggaaatatcatgcacttcctgagacgccagcacttcatcagacgacacttcccaggtattcagtatcttaccgcgcagcggcatgatggcctggaattcacggtcacgcgcctgtttggctgaaccgcccgccgagtccccttccaccagaaacagttcagtctgattcagatcctgggatgaacagtccgccagtttccccggcagcgccggacctgacgtcagctttttgcgcaccactttcttcgcggcccgcagacggcgctgagcgctggcaatcgccatttccgccagctgttccgctgcctgtacgttctggttgagccacagactgaatgcatccttcaccacaccgctgacaaatgccgcgcactggcgtgatgagagacgttctttggtctgaccggcaaactgcggatcctgcattttcacggagagcacatacgcacagcgctcccagatgtcatcagcggataacttcacgccgcgcggcagaatattacggaattcgcagaactcgcggataccgtcaagcagcccctgacgcagaccattggcatgggtaccgcccagcggggtcgggatcaggttgacgtagctttcggtcagcagttcgccgccttccggcagccacagcagcgcccagtccacctcttcgttgtccccggcatgtttgccggtaaacgccgcttccggcagggtcaccagaccgttgacgttttccatcaggtaatcggtcaggccatcctggtagcaccagcgctgttcggtctcgttcacattatctttgaaaaggatctcaacacccgggcacagcacggctttggctttcagcagatgtaccagccgggagacagagaagcgcggactgtcaaaaaactgctcatccggccagaaatgcacactggtaccggtgttgcgtttgccgcactgcccgatgacagccagttcactgactttgtcaccattttcaaaggcaatctgataaacctgtccgtcacggcggacagtcacttcggtgcgttttgacaacgcattgaccacggaaatacctaccccgtgaagaccaccggaaaactgatagtttttattggagaacttccccccggcatgcaggcgggtcatgatcagttcgaccgcagagactctctcttccgggtggatatccaccggcattccgcgcccgtcgtcaatcacttcaacagactgatctttatgtaaaataacttcgacagatttagcgtgaccggctaaagcctcatcgacgctgttgtcgataacttcctgagcaaggtgattcggccgcgtcgtgtccgtgtacatacccggacggcggcggacaggctccaaaccactgaggacttcaatatcctctgcgttataagatgattgcgtcatgttggattatcggtttttcgctaaaaaataaacaaaatacgtgaatgatactggcgataataccagtccctgataaatttaaatacgatttttcattaatggccgaggccgaggaattcaattatctgcggaaaatagcgctgaaatccggtaaaggcgtggtttccgccgggttcaatcgtctgtttgcatgccaccagatgggtgaccgcctggcggtaatccagcacttcatcgccggtctgctgcaataaccagatcaaatccggtgattcgacaggatcggcaaaaatcgcccgtaaatcctgcatatgatgcggttcgagtgtataacgctcgccggtgtaagggttttgattttccccgaggtagtcctgaagtaaatcaaacggatacactgccggattgaccaccacagcggggacatcaaacgcctgtgacagccagagggcaaaatacccgcccagcgacgacccgacaattccggtgtcctcaccagccagcgagttcatcagatcttccaaaaacagtgcggcttcatccggatagcaggggatctgcggctgtaacatccggatcgccggatggtgctctgccagccacgctttcagcatcgtccccttctctgacaacggggaactgttaaaaccgtgcagataaaggagcgtcgccatcagtaaccgtccgaacccagatcggggctgaattcatccgtatccagccggaacagctgtgtggtcagcgacggattatcaccggtggtcagttccagataacgccagcccggagcggcggtatccagcgtaaaattggtgcagtgcggtttgaactggacacaggtcgacggcgtggccagcatgcggataccgttccacatcacatccagatcctgatgaatatgcccgcacagaataccttcaatattctgatagcgggtcagaacctcagccagcatatgcgagttgcgcagactgtgctgatcgagccaggtacagccggatgccagcggatggtgatgcagcataacaacagtatggcggtcaggctgctgcgccaggcagttatccagccagataagctgatcatcactcagttcgccgtgcggcacactctgaacctgactgtcgagcagcagaatctgccactgatccccgagcagcacctgcttggagggagagataccggcggcggccagctcctgcgccatggacggctggtaatcatgattccccggcagccagacacacggcgccggtaaacgggcaataccgtccgtaaaccgctgataagcccgggtgctctgatcctgaaccagatcaccggtggcaacaatcaggtcggccggtaactgctgttttacgatagcatccagcacggcatggtaactgtgcagggtattaatgcccagcagcgtgtcggtttcgccggcaaaaagatgcgtatcggtaatctgtaaaattctgaccgcagcgccgtcagccacgggcaagtgcaacggggtttccaatcgatgtccttgttattttaacaactaacatataatgataacgtgtttcggcggagaagatctgcaatcccgcacacaattccccggatgcgtataaaaaaatccggattatttatcccgccacgttgtgcgtatacgttcatagtgcagtgtaagccactgaattgcaatgacagttgctgcgttatcgatcacacctttttcaacccattcatacgcctgctcacggctgaccacatgaacacggatgtcctcattctcctgcgccagcccgtgaaccccgcccgccgccgtggtatccgcctcgccgatatacacatacatccgctcggacgtcccgcccgggcttgaaagataactcagtgcaaaggtacagcggccgattttcagccccgcttcctcttccgcttcacgccgtaccacatcttcagcggattccccgcttttatcgatcatcccggccacggcttccagcagccagggcgtctgactgctttcgatggccggcagacgaatctgttcaatcagcacaatttcatcacgaaccgggtcatacggcaaaatcactccggcattgccccgttcgaagacctcgcggcggatttccgggctccagccgccctcaaataaccggtgacggaaacggtattcattaatcttaaaaaatcctgaaaacagggttttcttactgattatctccacgtcatcgctgctgaacgcaaaaggtaatccggatgtgtgtttcatactattttctccgccaatacatcaattatcagtgataatggcctttttcctctgctgagataaagaaattttcatcccgttgaggtaaagttaatctaatttaacgcagaaggcacaaacggctacctttattagcgagcggactctgctagaattagagccatttggtgcttcccgtgaggcaactgacagattagcgctgtgcaaaaaggaatcctaatgaagaaactgctttctcttctcattgctgtgagtgtggcaggtttcagctctgtcacccaggctgaagacctcctgcaggtttatcaaaaagcgaaagagaccaacccgaccctccgtcagactcaggctgaacgtaatcaggctttcgaaaaaattaacgaagcccgcagtccgttactgccgcagttaggtttaagcgggggttatgattacactaacggttaccgtgattacaataaccagaacagtaatgcactgaatgcacagctgaaactgacccagacaatttttgacatgagtaaatggcgtcagctgaacctgcaggaacaaactgccggaatcagcgacatcacattccagagcgcacaacagcagctgattgtggataccgccgttgcttactttaatgttctgcgcgcgctggataccctgtccttcgtacaggcacagaaagaagccgtctaccgtcagctggatcagaccactcagcgtttcaatgtcggtctggtagcgattactgacgtacagaacgcccgcgctaactacgacagtgttctggctcaggaagttgccggccgtaatgatgtcgaaaacgccattgaagcactgcgtcaggtgagcggtatttattacagcgaattagcctccctggatgtgaaccgctttaaaaccaatgccccggatgctatcgaagccctgctgaaagaagcacaggaacgtaacctgaacctgctgagtgccacactgagccgtaacctggcgaaagagcaaatcagcctggcagaatccggtcattatccgaccgtagcactgagcgcaggaaccggcgtggttaacaccgacctgagcggcagcggcaatgccgggaaaccaaacagttatacaggccagagcaccatcggtgtgaacgtcagtatccctctgtacaccggtggtgccgtgtcatcacaggttgatcaggctcagtacggctataccgctgccagcgaaaagctggaagcgacactgcgtcaggttgttcagaccacccgctcttcttacaacaatatcaacgcctcaatcagcagcgtgaatgcctacaaacaggttgtgacctctgcggaaagctcactcgatgcaaccgaagccggttatcaggtgggtacgcgtacgattgtggatgtgctgaacgccaccactaccctgtatgaagcgaagaaaagtctgtccaacgcccgttatgactatctgattaaccagctttatatcggtcaggcacgcggtacgctgaatgaagacgatatcctgcgcctcaaccaggtgctgggtaaaaccatctccacatcaccggcgtctgtggcaccgaccacccgctgatcctgatgtttgtatgataaaaacccgccttccggcgggtttttttatacttttgctgtttttgcggataatacttctgccgggcagtgaaatgtcaggttatataccggaggccgcaatgtaattacaccggccgggcgtattccccccgtaaaaataccgcgataccggtatcttttttttctgttaatctgatttaattcacatcagatgcaaaaagcagattattgctttaatttcacacagttttcccctatcctagacagtaattacctcccataaaaccgtttccggatataacgacgatgacaatgaaacgcaccaagaatattaaccgcgacgctttccgcaaaacctggcgtcagtaccgcctggcacctgttgcggctgctgtcggcgctgttctgatgttaaccgcctgcgatgaagccgatgaaaccgttgcgctctacaccaccgcagagcagtgctccgccgcgaacccgtcacaggccggtgaatgtaccactgcctataacaacgcactggaagaagcagcaaaaaccgcaccgaaatatgccacccgcgaagactgcgtggcggaattcggtgaagcccagtgtactcaggcaccaacagagctggcgaataacagccagcagcagcaacctgcccaggcatccggcagcttctggatgccgctgatggccggttatatgatgggccgtatgatgggcggcggtgccacagcctctcagccgctgttcacttcccgtaacccggcaagcccggctaacggcaagtttgttgatgctaccggcaaaaactacggttctgccaccggcggacgcagcatgacagtaccgaaaaccgccatggcaccaaaaccggccaccacaaccactaccacacgcggtggcttcggtgacagcgtggcgaaacagaacaccatgcagcgctcatccggcagcagcaattcatcttcccgttcaatgggcggctgatttacatgaaacgcgtagcgattagcgagcgccctgactggcgcgggaaagccgaggaattcggcttccattttcatactatgtacggcgagccgtactggtcagaagatgcctgttatcagttttctatggcacaaatcgatgaaatcgaggaagtgaccagcgaactgcatcagatgtgtcttcaggtggtggataaagtcacacaaagtgacgagctgatggcccgttttcaaatcccgaaacactgctgggatttcgtgcgtgagtcatgggcaacccgccagccgtcgctttattcacgcctggatctggcctatgacggcgttaacccgccgaagttactggaaaataatgcggatacaccgacatcgctgtatgaatccgctttcttccagtggatctggctggaagaccagattgccgccggtaacctgccggaaaatgccgatcagttcaacggcatccaggaaaagctgattgagcgtttcggggtgctggcggaagagtacgggttccgttatctgcacatggcttgctgtcaggattccgtggaagatcgcggaactatccagtatttgcaggattgtgcacaggaagccggtgtcaccactgattttctgtttattgaagatatcgggctgggcgatcgcggtgagtttactgatcttcaggatcagattatcagcaatatgtttaaactctatccgtgggaatttatgatgcgggagattttctccaccaagctgacagacgccggtgttcgctggctggaaccggcctggaagagcattatttccaacaaagccctgctgccgatgctgtgggaaatgttcccggatcacccgaacctgctgcctgcctattttgcggataaaccgtatccggaaatggagagctacgtcatcaagccgctgttctcccgcgaaggtgccaatatccgtattatcgaaaacggcaaagaaattgccgccgcggacggtccttacggcgaagaaggcatgattgtccagcaattccattccctgccgaaattcggtgacagctataccctcgtgggcagctggctggtgaatgatgaatctgccgggatctgcatccgtgaagataaagagcttatcacccaggatctctcccgtttctatccgcatgtcattattgactgacgaatagtctccggctgatacaaaaatccccggtacatcagatgtaccggggatttttttatgacaaaagaaatcgtcagccgactttgattgtcagcatactcagtgagccggattcaatgccatccaccggtacggtgaccggctcgctgccctgccgcataccgagaatatagagcagcggcagatagtgctccggcgacggattcgaccgtttgccgtcttcacgctcaagtgcattcaccagcagatgcggccgggcgtcgctctccaggttatcacgcacgaaattattaaagctcactgcccacggatacggttcggcctgtgcattctgccagtccatttctcgcagattatgcaccacattaccactgccgagcaccagcacaccttcatcgcgcagtgccgccagtttacggccggtatcataatgccattgcgccggtttgctgccgtcgaggctgagctgcaccaccgggatatccgcatccggatacattttcactaggatcccccagctgccgtgatctaacccccattcgccgtgatcttccccgatattatcatcactgagcagatcttttacccgcgacaccagcgcagatgatccgggagccggatattccgtttcatgcagcgcgggcggaaaaccgcgaaaatcatggatggggcgcgggggtgcggcagatgtcagccacgccnnnnnnnntgcgcgggtgtgcggcagatgtcagccacgccccttgtgtataccagtgcgcggaaatcaccagaatggcggacggacgcggcatctgttctcccagctgccgccaggtttcggtataacggttggtttccaggacattcatcgggctgccgtgacccgcaaacagagccggtaatcgtttcattgctgacctcacacaaaaattgttcactgagatcagtgtatgccattccgggatttatcacgcagggtaatcatgatggagttattcaaaaaatatgacgggagtgcggagacaaaaatgccgctgtgtcagcagcggcattctcaggatttcagtcttgttcagttactgaccctgtcagtgatgtcagcccgctttcgccattaactgttcgcggtactgcaccaggtcatcaatcgtcacaaccggcatatcatgagcttttgcaaacacaatcacttccggtgcacgggccattgagccgtcatcgttggtcagttcacacagcacaccgtacggcttcagaccggcgagtgtcgccaggtcaacagaggcttcggtatgaccgcggcgggttaacacaccaccgttctgtgcacgcagcgggaatacgtgacccggacgattcagatctgccggaacagcaccatcagccaccgcagcgcggatggtggtgacgcggtcagccgcagacaccccggtggtcacaccgtgtgcggcttcaatcgtgacggtaaagccggttttgaactggctggagttgttctccaccatcatcggcagctcgagctgctgacgacgttcgtcagtcaggcacaggcacacaataccgctgccgtgacggatggtcagcgccatctgctcaacggtgatggtttcggcggcgaacaccatgtcgccttcgttttcgcggttttcatcatcgagtaccattaccccctgtccctgacggatagcttcaatggcacgttctgcacgttcaatcggattgccgtaatctgataacagcgtctgattcatggtaaataaacctcatcgtaattaaaaatgattaccagaaccagggcatcttaggagttgcatacatatcataacgccatgttataaaaccatgccgcaacaggtttttacctgtgcagataattgatgatatgcgatcggacgggcggatattgcccggctgatgctgactctctcccatccggactataaccgtcggccccggaattacaccggatctgctgaccttcaccgtagtgaagcgctcgcgggcttcattcgcaatggaatgtttaccgccggtggggactttcaccccgccctgagatagcagagttactatacctccaacgagtgagcccggccagtggttatttttaccgggggctcaaaatgagaactcagactggttcagaatcccgtaacaggttactatttgcggcataacgatcctccggctcagaaaggaaaaatcatgattgacccgaaaaaaattgaacagattgccacacagctgcaaagcgcgctgccgaaaggtgtgcgggagatcggagcggatatcgataaaaagatgcgtgccattttacagtcacagctcggcaagctggatttagtcaaccgcgaagagtttgatgtgcagactcaggtgctgctgcgcacccgcgaaaaactgtcgcagatggaaaaacgtctggcagagctggaagcgcgcctggcggaaaaaggcggcgagtaatgacaacaggagatacgccgtgcgtatctcctgcataatcaggcggttactttgatttattgatcgtattgatgatattggtggtggaaatgccatcctcaaaattgaggactttcacttccccgcctgcggcccacacttcctcactgccggcgatctcttccggacggtaatccccgcccttcaccagcacatccggcagaacagaagcgatcagacgctgcggcgtatcttcctcaaacggcaccacccagtccacggcacccagcgcaccaagcacaatcatccgctgctccagcgggttaaccggacggctttcgcctttcagacgtttggtggaggcatcactgttcaccgccacaatcaggcggtcacccagtttgcgggcgttggcaagataagagacgtgccccgcgtgcagaatgtcgaaacagccgttggtcatcaccactttctcgccgcgctgacgggcatccgccactgcctgatgcagctctgcttcggtcatcacaccaaagccgttatcactgcggccgcgtacggcattttccagctcaaccggtgatacggtggatgtccccagcttaccgaccaccacacctgcggcggcattggccagcgcacaggattcgtccagggttttcccggcggccagcgaggttgccagcacaccgattaccgtgtccccggcaccggtcacatcaaacacttcctgcgcctgtgtcggcagatgcagagcaggctgtcccggacgcagcaggctcatgccctgctcggagcgggttaccagcagtgcctgcaaatcgaaatcacggataactttcaggcctttttcttcgatatcagcattatcagtgcatttcccggccacagcctcaaactctgacatattcggcgtcagcagggtcgcgccgcgataacgggcaaagtcggtgcctttcgggtcgatcagaatcggtacgccggatttacgggccagtgcgatcatctcttccacatgcgccagtgcgcctttggcgtaatccgacagcaccagcgcgccgatgtgcggcagcgcctgtgcgatacgctcaagcatcggctgcggatcgacatccgaaaaaccttcttcaaaatccaggcggatcagctgctggctgcgggataacacgcgcagcttggtgatcgtcgggtgtgtcggcagaccgacaaaatcacagcggactttcacatcattcaggcgctcggtcagtgcgcgggcggcgtcatcaataccggtcagccccacgaggcgggaatttgcccccagagacgcgatattcatggccacgtttgccgcgccgccgggacgctcttcaatttcagtgactttcaccaccggtaccggggcttccggggagatccggctggtcggcccgtgccagtagcgatctaacatcacatcaccgacgactaaaactgcggcattctgaaaatccgggagtgttactttcattccctgctccaccttatgaataacgaaattattactgataatatcacaaaccggccgccgggcagaaaatccgcgtgcggccgccggtgcttattccccgagccagtgctgccagcgggcgcggacaaattcgcgctcagcggcgaattccgtcagcggcaccacgccggatttatcctgcaaagaaagatgatgcagcctgtcgcgcatcataatataggccgctgtcagccgcagtgactcctcttccggcatcacatcataattagccatcagctcaaaaatccggacattatcagaccagcggatcagcgctttattctccggcgcaaaacgcagcaccagatactgggcgataaattcaatatccgtgatcccgcccggatcggttttgatgttaaacacgctgtcatcacggctgccgagatgctgatacattttcttgcgcatctcacggacatccagtttcagctgtgcgttatcacgctgacggcacaaaatatcacggcggatgctgtcaaagcgggcggcaatcgcctcatctccgtacacctgacgggcacggatcagcgcctgatgctcccaggtccaggcgctgttctgctgataatccgcaaatgcctccagcgtgctgaccagcatcccggcttccccggatggccgcagacgggcatccacctcatacaacacgccggatgatgtgcgggtgctgaacagatgcataatgcgctgtgccagccgcagatagaactgccgcgcgtcgatttcacgcgggccggtggtttgtgtgccttcagggcaatccagcaggaacaccaggtcgagatcagagctgtagcccagttcccagccgcccagcttgccgtaaccgatcaccgcaaagcctttgtccccgtcgcgggtcagatgtgcaggttcaccatagcgtctgaccatctgcccccacgcctgctgcaccacagcaccgatcatcgcttctgccagccaggtaaggtgatcactcaccttcatcaccggcagcacaccggtgatatcttccgccgcaatccgcagcaactgcgcctgcttaaactggcgcagtgcctcaagctgctgctcctcatcgtcttccggaacccgcatcagatactgacgcagctcatcgcggtacgcattcagtggcagcggctggtagagtgaagccggatccagcagctcatcaagcagcagcggatggcgtgccagttgcacggcaatcatcggggatgctgcacacaaccgcaccacatgggtcagtaccacatcggattccagcagcagctccagataggtagtccggctgacaatgctgagcagcagcggtgtcaggcgctgtaacacccgctgtgcatccggttgggacaccagtttcgccagcagtttgggcagcaggtgatccagcacatcccggccgcgcggcccgatggtccgtttgccgagatcctgccggaacccctgtaaaccggtaagaaactgtgcggcatcatcttcattcagggaaaacagtgacgtgatatcagtcagttccggctcactctcccacagcgagataaatggctgtaaggcagtttcatcctcactttcctcatcatcctcgccgataagatcggtaaaaatctggtgcactgccgccattttactgttcagcaccgtttccagatccgcccacgaaacggcatccatcccctgtgccagacgagcctgatccagcggtgaatccggcagcgtctgtgtctggctgtcattaatggcctgcagcagattttccagccgccgcagatacgcgtaagcatccagcaactgtgcgacctgctcttcaccgagcagccccagacgggcaatttccgccagcgccgcatgcagggattgtgtctgtaatcccggctcacgtccgccacggatcaactgaaagacctgggtgataaactccacttcccggatgcctccggcaccgagtttaatattgttggtcagcccgcgccgccggacttcacggccaatcatacctttcatattacgcagagactggatcacactgaaatcgatatagcggcggtaaacaaacgggcgcagcatccggcgtagcgtctcactgtaagcggaatcatcacggccgaggatacgcgctttgaccatcgcatagcgctcccagtcgcgtccctgttcctgataataatcttccagggcggagaagctgaacaccagcggcccgctgtcgccgaacggccgcaggcgcatatccacgcggtagacaaaaccgtccgccgtggcgtgatccagcattctgataattttttgtcccaggcgggtaaagaactgcgcgttttccagctcgcggcggccaccctgcgtgacaccgttttccggataagcaaaaataagatcaatatcagaggagaaattcagctcgccgccgcccagtttccccatcccgaggatcagaagcggcattgcgctgccgtctgccgagcagggtgtgccccagtccgcacaacagcgctgataaagccagtcacgggcggcgataatcagcacttccgccagttcactgagctgacgcagcgtctcttctgtcgtgctccggcgcaggatctgcatgacagcaatgcgcatcagcatctgataacggaacaggcgcagcacccgcatcacatcctcttcctgtgcggcatccgccatcatctccgtcagacgggcggcataattctgccattcatccggctgcggtggggagtcgcggagggcggagagccagtccgggtggcggatacactgctccgccacaaaatcactgccggcaaaaatcagcgcttcctgttcagaatacggcaccagtccggtatcaagccgggcggttacccgctcagcggcttgccggagtatcggagtcagcggcagcatcaatgttccttttgttatcagattcacataacagctcaacacccggttacggcatggcaggcgccgtcatccacagtgcgaaaacccattgcgtgaaagccagtttacactgcaaccataccggactgaaacagacatccgcagattttgcatccgcttccgccagtgccgatgccacctcgggcagcggacagtcacggacaaaatcaggcactgcgccgggatagtggtccgccagtgtcagcagcagagaaagggtttgctgcaatgccggtaatgcaccgtccacatccagcagccaggcttcttccaggctctgccactgtttgatcagacggacaaccacatcggtcagcggggtctgcggatcccacgctgtgaacagctcaggcagttccggcaccggggctccctgagccagccagtagccgcgtgccgctttgctgcgcccggcaaggcgcaaccccggcaattccgccagggctttggcggctgtcagcaaatcagcggcagtcccctctttcagctccatctcaaattcacagatagggctttctgcttctccggcaaccacactgccctgatccagcaccgcttccaccacactgtgattgactgtcagcagccacttttcacgggcgaaatctgtggtaaaacgggcccgcagtgatgactgcagcgccgcgacatccgtttccggcggccagacatcagcaggtagtgccgctaaatccagttccgggcgggagagcggaatattatattcaggacgctgatgcaaaccgccgatatcatttccggccgttttcagggtcatttcatattcggtgtcacatccccggatccgcaaccccatatcccactgccgcagtgtgtcgtcagctgtttcaaaatagctgttggtcaggcggacagcacggaaatgctgatgatgaaaggcggtcagcgcggcgatcaccgccgtgatggcttccggttttaccgcaaatttcagttctgtttcgtaatcgctcatagacattcccgtaatcttataccgttatttatcgtcagtctgaccctgcattcgtgataaagatgacactcatttgctataaacagccggatttttcgctgtttatccactttatcccgtcatttattccgttgttaagagtaatctcatggctgtttaacgtttgcacccgcacacttaactcattagtatgctattcataaccaacgattgataaagcttatgacgatgaaaaaactcgccttactccctttgctgtttgcagcaaccgtcagcattaccgcccatgctgaagaaatccgttatgtctctgatgacctctccacctatgttcacagcggcccgagcaaccgctaccgcattgccggctcactcaattccggagaaaaagtcaccgttcttgatgtgaataatgagagcggttttgtccgtgtccgtgacagcaaaaaccgcgatgtctggttaccgaaagagctgctgagcactacgccgagcctgaaagaacgcgttccggccatggaagaagaaattaaaacactgcgcggcaaactcgccaatatcgacggcacctggaacgacaaaacggcggacatgcaaaaccgtgtggccgccagtgatgatatcattaataacctgaaaaaagagaatgacagcctgcgtaatcaggttgtggtcgcaaagaaaaaactggatgccatcagtgtgcaattagatgacaaacaacgcgatattatcctgcaatggtttatgtacggcggcggtgtagccggtgccggtctgctgctgggtctgctgctcccgcacatgatcccgcgccgcaagaaaaaagatcgctggatgaactgagcctcacagtaaccgcagtacggagaaacgcgtggatatttatctggtcggcggcgcagtccgcgatgctctgctgggtctgcctgtctcggacagagactggatggtcgtaggagccacccctgagatgatgctggcgcgcggctatcagcaggtcgggcgtgatttcccggtatttctccatccggatacccgggaggagtatgcgctggcacggacagagcggaaaaccggcgccgggtataccggatttgcctgttacagtgcgccggatgttacgctggaagacgatttacagcgccgggatctgaccatcaatgctattgcccaatcagctgacggcacactgcatgacccgtatcacggggcggatgacctgaaaaaccgggtgctccgccatgtttctgcggcgtttacggaagatccgctgcgcgtgctgcgggtggcacgctttgctgcccgtttcgccccgcagggatttgttattgcaccggaaaccctggcgctgatgtctgctatcacgcagcagggagagcttgcccatctgacggcggagcgggtctggaaagagacagaaaaagccctgaacagcccgtgcccggatatctatttcgcggtactgcgtgattgcggtgcgctggcggtgctgtttccggaacttgattccctgttcagcgccactgacgggcagaccggctatgacattctgaccgccgcactcctgcgccggacagtgcttctgactgacagtacagatatccgctttgctgcgctgtgcctttatctgagctgtcacagtaccgccgaaggaacagccgcaattcagaagatgtctgaacgcctgcgggtgccgaacccggcacgggatctggctctgcttgccacccgcgattaccggactgttcatgacatcagccatctgaccgcagacaatatcattgccctgtttgattcactggatgcctggcgcaagccggagcgcatcactcagttggctatcctttgtgaagcggattaccgcagccggatagcaccggacgcagcagattatccgcaggggcagttactgactgaggccttcgcgcttgcacagcaggttgctgtcaaaccggtaattgaggccggttttaaaggcgcggacatcaaagcggaactcacccgccgccgcgctgaggccatcagagagtggcaacaaaaaagccgttcatcatgaacggcttttttcatttcaggctgcggatgattatttctccgcagactccatacccactaacccgactttcagatatcccgctttgcgcagagcatccataatgcccatcagcgtttcataatcgaccgttttatctgcctggaagaagattgtggtttccttattggattccgtggtctgatccaggatctgagccagtgtttctttcgtgacttcctgctcacccaccaacagctggttatccgctttcaccgtcaggaagatcggtttttccggacgcggctgcggttttgccgttgaggcaggcaggttcactttaatatcaacagtcgccagcggtgcggccaccataaagatgatcagcagaaccaacatcacatcaataaaaggtgtgacgttaatttcatgcaattcgccgctgtcatccgactcttcgttaagacgcattgccatcagatattaccctgctttgctgtctgccaggtcgagatcacggcccagccataaaatagtgtgtgctgcggtatcacccaggtcaccacggtaagcggagatcatacgggcaaagatgttgtagataacgaccgcaggaattgccgcgaccagacccagtgccgttgccagcagtgcttctgcaatcccgggcgccacaaccgcgaggttggtggtctgtgagtgggcgatgccgataaagctgttcatgataccccatacggtaccaaacaggccgacaaacggtgagatagccccgatagtggccagatagccgttaccgcgtcccatatgacgggcaacaccggcaacgatacgctcctgacggaatgtcacacggtctttgatgccactcagatcacggcttttttctgatgcagtccgttcagtcacggcatcaagtaccagcatccgggtgacactctttttcccgaatgtatcagcgatggctgctgcttcatccagcgagcgggcatctttgatggccgccgcttcacggcggatacggcggcgggaagcgataagatcagcgcccttggcaaagaaaatggaccaggtaatcactgaggcgataataaggccgatcataaccgatttaacgataacatccgcgccctgatacatggaaatcacagacagctcagccgcaaagccacggttaccgtctgccggtgctgcgctgatttcctgcacaggaacctctgtcgcggataccggggccgccggttgttcaggcgtctgagcaggctgaccggcggttgctgccggcgcggtgacaggtgttgttgtcgctggtgtgacagctgcagtgttatctgcgaatgcactgccggttaaacataatgccaatagcacagaaacggtcaaattacgcatcagttggccttcaactctcttttgttatgaactctttctcagcaaaaaataaatcgtgttattcatcgctacccaaaaaacgaaacccgctgatcataccaaaccctgagcaatttgatagtaattatcattaccgtttaccaaaaaaatacgattccggcggaaaatttcacacggaatgctaagggttttcagtcatccgtccgggatcatcacaggtaaaacgcacaaaaaacgcacgcaggggcatgattcaccaacctccctttataccgccagtgaatcggaagaaaaacccgatcaaatcaaacgggtgagcaatttttgcgatacactgtctgtaccattgttccggatctcgttttacaggaaatctaatgtctagtttatcagagattgtgagtgcgctctggtctcacgattttgccacactctctaatcccgaagttctctggctggtttacgctatcctcttcaccgttattgtgctggagaacggcattctgcccaccgcgtttctgcccggggataccctgcttattttgtcaggcgcactgattgcgaagggcgtgatggatttcctgccgacactggctattctgaccgccgccgccggtatcggcagctggctgggttttgttcaggggcgctggctgagtgataccaaaaccgtcaggcgctggatgacgcagatcccgaaaaattaccatcagaaagccgaagtactgtttaaccgccacggcctgtatgccctgctgatcggccgttttctcggttttgtccgtactctgctgccgatgctggccggtctctcctcgctgccgaaccgccgtttccagttctttaactggctgagcggattcctctgggtggcaattattaccaccttcggttatgtgctcaatcagatcccgtttgtcaaagcacacgaaaaaacggtaatgaccgcactgctgctgatcccggtctttttcctgattgtcggtatcgcggcatccctgtatctgttgatccgccactaccgcagacgccgcgccctgcttaaccgcagacgacaccgcgtccataagaaataagataagggctcctgcgggagcctttttgctgccggtgtgccggaaagcacaatccggttcgccaccacgcccgccctgatttacactacacttaatggttatccgcttcatttttcctaatcttacccggagaaataatgaacaacttcactcttttcaccccgacaaaaattcgtttcggcaaaggccaaatcgccaaactcagcagtgaaattccgaaagatgccaaagtacttatgctgtacggcggcggcagtattaagcgtaacggtgtttacgagcaggtactggctgccctggacggttatgatgttcatgaattttcaggtatcgagccgaacccggcctatgaaacgctggtaaaagctatcgcatatatccgtgagcatgacatcagctatctgctggcggtcggcggcggggctgttatcgacggtaccaagtttattgccgctgcggtggattatccgggcgacccgtgggatatcatcaccaccggaggccgcaatatccgcagtgcactgccgattgcctgtgtgctgacacttccggccaccggctctgaaaccaactgtttttctgtggtcagccgccgtgaaaccggagataagcaatcattcggtcacccgctggtgcatccgaagtgcgccattcttgatccgcagaccacttacactctgccgccgcgccagacagccaacggcgtggtcgatgcctttattcacaccctcgagcagtatctgacgtatccggtgaatgccaaaattcaggaccggtttgcagaaagtattctgctgacactgattgaggaaggcccgaaagtactggcaaatccggaggattatgacagccgtgccaatgtgatgtgggccgccacccaggcactgagcgggctgattggtgccggtgtgccgcaggactgggcaacccacgcgctgggccatgaaattaccgcgctgtacgggctggatcacgcgcagacactggcgattgtgttaccggcactgctgcgggaaaaacgcaaaaccaagcgcgaaaaattattacagtacgctgagcgtgtctggcatctgacagacggttccgaagagagccggattgagtgcgccattgaagcaacccgcgttttctttgaagagctgggcgtaaaaacccgtttctctgattatcagattgatgacagcggcattcccaaactggttgccaagcttactgaacacggccagaccgccctgggtgaacaccaggacatcacaccggaagtcagtgaacggatctaccgggctgccgtctgatacaccataaacactgattggaggccacatgaacaaacctgcattagttaccttgtctgacggacacttaatgccgcaactggggctgggtgtctggaaagccgggaacgacgtggtcggctctgctgtgcagaccgcactcgaaaccggttaccggctgattgatactgccgcgatttatcagaacgaggaaggtgtcggtgaaggactgaaagcgaccaccgttccccgggacgagttgtttatcaccaccaaactgtggaacagcgatcagcaacatgccggtaaagcgctggaagcgagcctgaaaaagttacagctcgattatgtggatttgtatctgatccactggcctgcaccggcagaagaccattatgtctcagcctgggagcagttgattgaattacagaaatccggactgacccgcagtatcggtgtctgtaattttgatatcggccatttgcagcgcattatccacaaaaccggcgtggcaccggtactcaatcagatagagctgcatccactgctgcaacagcgcgagcttcaggcctggaatgcaacccattccattcacactgaatcctggagtccgctggcacagggtggtgaaggtgtttttgatactgatatcattcaggcattagcggcgaaataccagaaaacaccagcacagatagtgattcgctggcatctggatcgcgggctgattgtgataccgaaatcagtcaccccttcgcggattcatgaaaactttgatgtctttgatttccgtctggagaaagaagaactctcacagattcagtctctcgattcaggtacccgcttagggccggatccaaaagaatttaattaagttagttactgtcagaaagccatctgtataaattatacaggtggtttttatttattttataactgtttttcaagtaatcattcaataaacaaataattcataaataaaaaaggggaaatacacgaacgcaatatgtatttcccaaagcatggcaaatatagcaggattaattatccaaatttcagccttgctgtcatcaatataattaattcactatttattaaaaataaattcaaacgccaatatgaaaggaggagtatatgaaacatgacctttcagtcaccataacacagcattaccattcaaggttaaaagccatgttgtacatcacatcgttcgaaccggtgtatgcgacacctgtcttcacagcgatgttctcgttgaaccggtaaccggttcccactgctactgcctgagtggactggtatccgcccatcgccgcagtgatattcagtttaccgacaccgtacggctggaacagaccgttcagtgcggcactggccgccagaccgttatcaaggcgctcgttggtttcacgtaaatcattttccagtgaacgcagatcctggcggttcttcaggatatccagcgtgtttttgctgacatttgctgtatttttatctagttgccgtttgttttcgttagcaatatttgtggccgtaccggcttttttcgatgcgttgctgatacgggtatccattttagccacatccgcttccagcgctaaggttgcatcggtaatcgctgatgtcactaatttggctgacgccagcagctttttattttgctggagttctgttgcatgaatatcaagctgtttactattttcgctgatgctgatttcattagcatcggcttcataattcgcttttattgccatctcttcattaaattcaacctttgattttaataaatcaatgcttgttttcatttcagttgctgtaactgtcagttcctgcgtcagaagtgccgctgaatccgtattatcttgttcattctgtaaatgtaatgtattttgaaatactgtatttctcagatcattaacctgaaaattaacattttctatctcttttttgatcataccggggatagtgccgagaagctcattattgtgcaatgcttttcgcgctgtgatatccagttgtatatctaactgctgtgtttgactttccagtgcccctgtacgctcttctaagggcttaatgttgttttccagtaccgcagtcatatggctgccaacttcattttttactaactcagggaagatattttcggtatattccggtagtttattttctgtaatatctaccataaattcatttattttttgatctgttttttccacaagatcactgaccaatattactttgtcatccaattttcctgtgtcatccattgccagcctttgattcagggcgatttcctcatggagtttacctattgattcattattttcaataatgtaactacttatataattatagtgctgatttaattcagagatacccgctgaccggtcacctttggattttgtatctgcatatacaggaggctctccataatacagaggactaaatattacttccgttatcgttgaggttggctgatggttattcacagcatcttctgcgtatgcgaacaaaggtgtaataattaatgcaaacagactttttttcataggaccatcctgatacaggttaaaattaactaacccaaaatatactgataatctcatttgaaaaaaataaacagaatctaaacacaaaaaaaagcaaaaaatataattaggtaactattttgacagaatggaatcgaatcgtttttccggagaaataaaaaatccgccgcagcggattttttattaactaatgaccttatttatcagtaatcaggctgtgcatttcctgtactgaaatcactctctctgtcggatccatattcagagacagtgtggtggcaaagccgccgttcatcgtggtgtcgtaatgcaccttatattgcagggcactgcggcggatcactttggaatcctcaatcgcctgacgaccggcggtggtattcacaatataatcgtattcaccgtttttaattctgtcctgaatatgagggcggccttcgtgcaccttattcaccaggcgcgggttaataccggcttcacccagcacaatcgcagtaccgtgtgtcgcatccagttcaaaaccctgtttcagcagttttgccgccagatcgaccacccgcgctttatcaccttcacggacagagagcagcgcacggccttttttcttcagtgaggaagagctgccgagcatggctttggcaaaggcttccgcgaaggtgcgtcccacgcccatcacttccccggttgagcgcatttccggccctaaaatcgggtcaacgcccgggaacttgttgaatggcagcaccacttctttcactgagtagtacggcgggataacttcttttgtcacgccctgctgcgccagtgtctgaccggccatcacacgggctgcgactttcgccagcggcaccccggtggctttggagacaaacggcaccgtacgcgccgcacgcgggttaacttcaatcagatacacttcgttgtctttgaccgcaaactgagtgttcatcaggccgcgcacgcgcagttccatcgccagttttctcacctggtcgcgcatcacatcctggatttcctgactcagcgtgtaagccggtaacgagcaggcagaatccccggagtgaacccccgcctgttcgatgtgctccataatgccgccaatcagcacctgttcgccgtcgcagatagcatcgacatccacctcaatcgcatcgtcgaggaagcggtcaagcagtaccggtgcgtcattggagacactgaccgcattctggaagtaacggcgcaggtcggtttcgtcgtagacgatttccatcgcgcggccgcccagcacataagaaggacgcaccaccagcggataaccaatttcttttgcccgctcaaccgcctgctcaatattagagacggtggcgtttgccggttgtttcagaccgaggcggacaactgcctgctggaaacgctcgcggtcttccgcgcggtcaatcgcatccgggctggtaccgataaccggcacaccggccgcttccaggctgcgcgccagtttcagcggagtctggccgccgtactgaacaatcacacccgccggtttttcgacacgcacgatttccagcacatcttccagcgtcaccggttcgaaatagaggcggtcagaagtgtcgtagtcagtggaaaccgtttccgggttgcagttgaccatgatggtttcgtagccgtcttcacgcagcgccatcgccgcgtgtacgcagcagtagtcaaactcaatgccctggccgatacggttcggcccgccgccgagcaccataattttcggtttgtcgttgttcggctgcgcttcacactcttcttcataggtggagtagagataggcggtatcagtggcaaattccgccgcacaggtatccacgcgcttgtaaaccggccacagctggtagctgtcgcgcagtttgcggatttcagcttccgccacaccgaccagttttgccagccgcgcatccgcaaaacctttgcgtttcaggtgacgcaggaattccggggtcagaccgttaatcccgacttccgccacctgctcttccaggcgcaccagctcttcaatctgtaccaggaaccagcggtcaacgttggtcaggttaaatacgccgtcaactgacagtccggcgcggaatgcgtccgcgatataccagatccgctcgccgcccgcttctttcagctcacggcggatgcgggtcagtgcatccgggtcatccagattcactttcggatcaaaaccggtcgcgcccacttcgaggccgcgcagcgctttttgcagggattcctgctgagtgcggccgatagccatcacttcaccgacagatttcatctgtgtggtcagacggtcattggtgccggcaaatttttcaaagttaaagcgcgggatttttgtcacaacatagtcgatggacggctcaaaggaggccggtgtcaggccgccggtgatgtcgtttgacagctcatccagcgtgtaacccaccgccagtttggccgcgattttggcaatcgggaagccggtcgctttcgaggccagcgcggaggagcgcgacacacgcgggttcatttcaataacaatcagacgaccggttttcgggttgaccgagaactgcacgttggagccgccggtttccacgccgatttcacgcagcaccgccatcgaggcgttacgcatgatttggtattctttgtcggtcagggtctgtgccggggcaacggtgatagagtcaccggtgtggatccccatggcgtcgaagttttcgatggagcagacaatgatgcagttatcatttttgtcccgcaccacttccatttcatactctttccagccaatcagtgattcatcaatcagcagttcattggtcggggagagatccaggccgcgggtacagatttcctcaaattcttcgcggttatacgcgataccgccgccagtgccgcccatggtgaatgacgggcggataatgcacgggaagccgacatcatcggcgaccgcaaacgcttcttccatggtgtgtgcgataccggaacgagctgtatccagaccgatttttttcatggcgatatcgaaacggcggcgatcttcggctttatcaatcgcatccgctgtcgcaccaatcatttcgacaccgaactctgccagcacaccgtgacgttccagatccagcgcacagttcagcgcggtttgtccgcccatagtcggcagaacggcatccgggcgctctttttcgatgatttttcgcaccacttcccagtgaatcggctcgatgtaagtcgcatccgccatttccgggtcggtcataatggttgccgggttcgagttaacgaggataacgcggtaaccctcttcgcgcagggctttacacgcctgggcgccggagtagtcaaattcacaggcctggccgataacaatcggaccggcgcctaaaatcaggatgctgctgatatctgtacgttttgccatttttctgctcctgatcagtgacgggcgtttttcatcagttcaataaagtggtcgaacagcggggcggcgtcgtgcgggcccgggctggcttcagggtgcccctggaagctgaatgcaggtttatcgttgcggtgaataccctgcaatgtgccgtcaaacagtgatttatgcgtgacgcgcagtgttgcgggcagcgtcgcttcatccaccgcaaaaccgtggttctgcgcggtgatcattaccacattattttcaatgtctttgaccgggtggttgccgccgtggtgaccaaatttcattttgatggtctttgcaccgctggcgagagccagtaactggtgccccagacagatgccgaacagcgggatatcggtttccaggaagcgggtgatagcctcaatcgcataatcacacggtgccgggtcgcccgggccgttggagaggaaaataccgtccggtgccattttcagcacctcttccgccggggtctgtgccggtacgacagtcaggcggcagccgcgatccaccagcatgcgcagaatgttgcgcttggcaccgaagtcatacgccaccacatgaaacggcagctcttccgctgttttatccgccggtaagccgctgtccagtgtccaggagccctgtgtccagctgtatggctgcgcggtggtgacttctttcgccagatccagcccgttcagcccgctgaagctctgtgcatttttcagcgccagtgccgcatccgggtgctcaccggcgatgatgcagccgttctgagcgcctttctcgcgcagtaaacgagtcagtttgcgggtatcaatatcggcgatagccactacgttgcggcgtttcaggtattcggagaggctttcttcactgcggaaattactggtggtcagcggcaggtcgcggataacgaggccttgtgcataaacatccggggattcttcatcagcactgttagtgccggtattaccaatatggggataagtgagagtgactatctggcgggaataagaggggtcggtgagaatttcctgataccccgtcatcgaggtattaaaaacaacttcgccggtaacggcaccctctgcgccgatggcgcgtccgtgaaatgtggttccgtcttgcagaaccaggattgctgacttaaacaaaacaccctccggaggaataataaatcacaattagtgcatattaattcagatttggggctataaagcaatgccaaaatagaaatttaaccaaattttgacaaattgcggcgcattctaaagatcgaacgggcagttgtccagaaaaaatcgacttttttatatttttttactcatcaggatcaaaacaggctggctgacaggaataaaaccgcatcattgtcagctttatgctgaatttttgatgagatgactgaaaaaaaggctcacggccggaaaaagaggtgagaaaggcaaaaacagcgataaaaaagagagtaacaacgatgataataataaaaaacagaggtcagacacaaaattataaaaaaagaagagttaaagcagtgataaattaaaatatcactgctttatcaatctgttgttattcacactttattataaattttccagatcaagcacatccttcatggtgaataaaccgttctttttatcactcagccaggccgcagccttaactgcgccatttgcaaatgtcatccggcttgaagccttgtggctgatttcaacacgctcgccgatatccgcaaacatcgctgtatgctcgcccacaatgtccccggcacgcacagtggcaaacccgatagtgttccgctcccgctcgccggtatagccttcacggcagtataccgcgcaatccttcaggtcacgtcccagcgccccggcaatagattctcccatcgccagcgctgttccggacggcgcatccactttgtggcggtgatgtgcttcaataatttcgatatcggtatagtcgcccatgactttggccgccttttccagcagtttcagcaccagattgacgccaacactgaaattcgccgcaaaaaccacaggaatttgctgcgcagcctgtgcaatagcagcttttccggcatcatcaaacccggtggtgccgataatcatacctttgccgttcgcagtacagaatgccagatgtgtcagggtgccttccgggcgggtgaaatcaatcaggatatcgaaattgtctttctgactgttcagatccgccgtcaggatcacgccattgcgcccggtaccggccagttcaccggcatcggtcccggtgagagaggagccttcacgctcaaatgccgcgcccagcaccacatcatcattctgtgcaatcgcctgaatcagctggcgccccatgcggccaccggcccccgcacccgcgagccgtaacttacccatanacccgcaaccgcgagccgtaacttacccatatttgttatcctcagttttctgtctgtatgtcagcagattaacggctgtccggccggattaccagttacccgccgctatcatcagaaaatcacaatacagcccgccgattatcagtaaaactgtattcaccggactacagacaaaaaaaagcagaacctgcgttctgctttgctgtgtcagacttctttgatatccacccgtaactctttcgggacttcaaagataatattttcctcacgcccctcgagctgactgatttcatccgcccccagttcctgaagacggctgatcacctgctgcaccagtacatccggagcggatgccccggccgtcaggccgatggtatccacatcacgcagccagtcggggttaatgtcatcggcagaatcaatcagataagacggttttccgacccgctgcgccagttccgccagccggttggagtttgatgagtttttggagccgaccaccagcaccagatccgcctgacccgccagatcccgtaccgcttcctggcggttggtggtggcatagcagatatcgtctttacgcggcccgataattttcgggaaacgggcattcagcgcatcaataacttcagaggtatcatcgacagacagtgtggtctgagtcataaagctgaggttttcctcatctttgacgttcagcttccacacatcttccggagattccaccagatacatgccgccttccgggttgttgtactgccccatcgtcccttccacttccggatgcccggcgtggccgatcagaatcgcttctttgcctttgcggctggcgcgggcgacttccatatgcactttggtgaccagcggacaggtggcatcaaacagcatggtgagattgcgggaacgcgcttcctggcggatcgcctgcgagacaccgtgagcggagaagatcagaatggcgttatccggtacttcagcgatttcctcaataaaaatcgcaccacgctcacgcagatcattgaccacatagcggttgtgcacgacttcatgacggacgtagataggcgcaccgtataactccagcgcccgctccacaatactgattgcccggtcaacacctgcacagaacccccgcgggttagccagtaaaatacgcacgttcagcctccaaaccatcgcccggacgggcagtaaaacaaaaattcaacatttgcgcgctactataccagagccgtcccccggaccgtaatgctaattattgctctgtgtcttatgcagtgacgtcacggacgctgatatcaaacgtcacatcctgtccgcacagcggatggttgaaatccacctcgacagaatcttcagtaacggatttgataatccccggcatttcgctgccgttcatcgcggtaaacagcatgatcgtgccggtttccggcagacccgcttccaggaagtcggcggcggagaaaaactgaatcagatccgggctctgcttgccgaacaccgcctcaccgggcagtgtgaaggtttttttatccccggcggataagcccagcaattgctgctccagtgcatcagacaagctgccgtcaccgaggcggaacagtgccggtttgccttgtgcttctgtggaatccgccaccgagccgtcagacagtttcagggtgtaatccagtaatacgctgtgatgttctgcaacctgcatataattattactctctgtatcagataaaaaatatccgcctggcggcggatattcgggtcatcagtctgatgatgtcttgttctctggtttgtcgcttttcttaccgtcagggataaagctttcaataatgataagccccgccccgatgatgatccagctgtccgccaggttgaacgtcggccagtgccagtcaccgacataaaagtcgatgtaatccaccacaaagccgtgcatcaggcgatcaagcaggttgccgatccccccgccgataatcagtgcataggcaatattactgagtttattgcgcgcactggtgcggtacatcatcaccagtaatgtcacggagataccgatagccaccgctgtgaagaaccagcgctgccagccgccctgagatgcgaggaagctgaatgcggcaccgtaattccgcacataggtcagattaaagtacggtatcagtgatgtggattcatgcagcccgtaattggctaaaatcagctgctttgaaatcgcatccagtaccagtaccaggaccgccagccacagccagcgcaatccggtcgaacacagtggttttttcatttatcaggcaaacttacgttcttcaccgtttccggctacgtttgtcacacagcggccgcacagttcaggatgttcactgtcctgaccgatgtcggtcgcgtaatgccagcaacgcgggcacttactgccttccgctttgccgaagccgatgcgcaggccgtccagctcactgtttaccgcactttccggtgccgcagacagtggtttcacatctgcctgagaggtcagcagcacgaaacgcagttcattacccaggctgttcagctgtgccgccagggcatcacccgcatacagggtcaccgcggcttccagcgaaccgccgatcagtttgtcggcacgtgcctgctccagcactttgttgacttcaccacgcaccgccagcagcgttgcccagtaatcatcgttcatgctgtcctgtgcattcagcccgaacaggccgtcataccactcttcagtgaagacgtactgcggacgtttgcccggcatcacattccagatttcatcggcggtgaaggacatgatcggtgccatccagcgaaccagagcttccgcgatgtggaacagtgcggtctgacagctgcggcgcgccagaccatcgcttttcgcggtgtactgacgatctttgatgatatccaggtagaaagaacccatttccaccgagcagaactgcatcagacgctgcaccacttcatggaaatcataggcttcataggatttcaggatatcagcctgtgccgccagcgcgcggccgacagcccagcggtctgccacaatcatctcttccggtttcaccatatcggtttccggattgaaaccattgaggtttgccagcaggaaacgcgcggtgttacggatacggcggtaagaatcggcagagcgtttcaggatttcatccgaaacggcgatttcaccggagtagtcagtagaagcaacccacagacgcaggatatccgcgccgagtttgttcatcacgtcctgcgggctgatggtgttgcccagcgatttggacattttgcgaccctgaccatcgacggtgaagccgtgagtcaatacttcgcggtaaggcgctttgcctttcatcgcggtggacagcatcagtgaggacataaaccagccgcggtgctggtcagaaccttccagatacatgtccgcagaattgccgtggaactcaggacgggcatcgacaacggcaaagtgggtggatccggagtcaaaccagacatccagggtatccggcactttttcatagatatcggcatcgtcacccagcaggtcacgcggatcgagatcccaccacgcctgaataccgtgttcttccacacgtttggcgacgtcttccatcagttccagcgtacgcggatgcagttcctgggtctctttatggacaaacagagacatcggtgtgccccaggtgcgctgacgggagatacaccagtccggacgattttccaccatcgcggtgatacgcgcttcgccccagcccgggatccacttcacgcctttgatttcattcagagactgcggacgcagaccgttcacatccatcccgataaaccactgtggtgtggcacggaaaatgaccggcgttttgtgacgccagcagcacggatagctgtgcgagatattttcgctgtgcagcagtgcgcctttctctttcagcaggtccagaatgatgtcattggctttcagcacaaacacaccatccagtgacggataggtgccgctgacataacagccgttcgggccgaccgggttggcggtttccaggccgtatttctggccgatcacatagtcgtcaggaccgtggcccggcgcagtatgcacagcaccggtacccgcatccagggtgacgtgatcgccgaggatagccgggacatcaaagcccataaacggatgattaaaccgcagcagttccaggtcgctgcctttgcagtccgcttcaacagtccagctggtgataccggcgcgtttcatcacgctttccaccaggtcagcggccagaatcaggcgctcgtcgttcacacggactaactgataatcaaattccgggttcagggaaatcgcgcggttcgccggtaaagtccacggggtggtggtccagataaccagagaaaccggcagcccgtcatttttcacgccgaatttgctgtaaaccgcatccgcgtccgcagcagtgaaacgcacgtcaatggacggggaggttttgtcgtaatattccacttccgcttccgccagggaagaggcacaggaggtacaccagtgaaccggttttgcccctttgaccagatggccgttggcaatcacttttgccagtgcgcggatgatatgggcttcggttttgaagtccatagtcaggtacggatgatcccagtcacccagcacgcccagacggataaagtcttccttctggccttcaatctgctcttttgcatattcacggcaggcagcacggaactcagccggtgtgactttatcacccggcttgccaatcacctgttcgactttgtgttcaatcggtaagccgtggcagtcccagcccggaatatacggggaatcgaaaccggccatgcctttggatttaataataatatctttgagaattttattgactgagtgaccaatgtgaatgctgccgtttgcatacggagggccgtcatgcaggataaatgtttttttaccggttttggctttacggatcgcctggtacagaccttctttgtaccagcgtttcagcatatcaggttcgcgctttgctaagtccccgcgcatagggaaccctgtctccgggagattcagggtatttttatagtcactcattcgattctcagttccaatattattccgttaaacacataacgaggggttggattgtaaaaattcccttgccgcaatctcatcccgcgcgatttgcactttcagctcatcgagcgaggcaaaccgctgttcatttcgcaatttcttgcgcagtaccacatccggatgctgcccgtataaatccattgccgcatcaatcagatgaacttccagttgctggcccttgccctgtacagtcgggcgggagccgatattggccacacccggcagcggatgcggcccgaggccgtatacgtccacggcgtacacaccgtttaccggtgcggccagacgtttcagggggatattggccgtcgggaaaccgatggtgcgcccgagttcgttgccgtgcaccacgcgcccgctgatgcggtaagggtgcccgagcagtgcttcagccagcgccagatcgtcgttttccagcgcacggcggatggccgtgctgctgatccgtttgccgttatcacaaaaactttccgtgctgcggaccgtgaaaccatactgtttccccgcctcacacagcccgttaaaatcgccctgacgattttttccgaaacgaaaatcatccccgaccaccagaaattttaccccgagctgttcaaccagcaggtgtgagataaaggcatccggtgtcagtgatgcaaattgtttgctgaatttaacacacaataagtagtccacaccgtactgcgcaagatattttaccttatcgcgcagccgggtcaggcgtgccggcgctttatccggggcaaaaaattccagcggctgcggctcgaagatcatgacgaccgacggcagcccccggcggtttccttcccgcgccagatgtgacagtaatgcctgatgtccgcgatgaacgccatcaaaattaccgatagtcagcacgcaaccatggtgacgcgcacgaatattgtgagtaccgcgaattagctccatagccggctcaatacagtcaaaattagtccgattataccttgtccgccgcgtcaggttaacccactaatgcggctgaatcgcgaattctctgtacaaaaagcggggcatccccctctgcggaaagtgaaaaataatttttttcgtcagaatcttaccattccggtgacttttttccgtgtaagggctgtattcccgctgcgtaaactgataaaatccccgcccatcacaacgtacatttgcgtcgctgtacaacgacgcatatttgcacaaatccattgacaaaataaagcggagcaggcatattcctccacctttgtattgtcctcgaagaatatatttgggagttggaccttggctaatatcaaatcagctaagaaacgcgccattcagtctgaaaaacgtcgtcagcataacgctagccgtcgttctatggtgcgcacctttatcaagaaggtttacgctgctatcgctgccggcgacaaagaagctgctcagaacgcatttaatgacatgcaaccacttgtggatcgtcacgctgctaaaggcctgatccataagaacaaggctgcccgtcataaggcgaacctggctgctcagatcaaagcaatgtaatctgattgtacagacataaaaaaaccggctgatgccggtttttttatgtcctttttctgcctcagtccggtaaaccggcatccgcagctgactgcgaaccactgaacagtgcagagaaatccttgttacacacccgctgaaccgccggatgctggatcatacgctcggcaaaaatcacataatactcttctttgatggtatccactgttcccagctcgacaacatcactgtccgcaaaaatgcctttggtgtagagcgacggcgccacaaaaatcgcattgtgatacatcccgaatgctttcatcagtgccgcatcgtcaaattcacccagaatttccacttccaggtttttattgcggatccaggtcagcaactgacggccaagcatcgaacggcggccgggcaccagcagacggcgctcttccagacattccgggaacggcttctgcggcgcgggctggcggcagtagaaactcatactgcattccccgagtttcacggagaacagcccttcctgctgggtggaatccaccgggcagtcagagaggatcatatccagtttgtgctggctgagctgctccagcagcatttcgtgagtggattcaaaacagcgcagatggatttgctcatgctccatcaccgccgtttccagcactttgctgaccagacgttttgacagtgcgtccgcaaccccgacatcaaacaacagattggattcgcggctgtaagtgacaatatccagcatttcctggctcagcataaacattttgtccgcatagcggaacaccagctgacccagctctgacggcaccaggccacgtccctgacgtttgaacagcttaccgtccagacgctcttccagcgccttgatttggccggtaatggtttgcggggtgagatagagcgcttctgccgcccccaccaccgaaccttctttgcagacgtgccagaaataatagaggtgattgtagtttaaatgggagactcgcatagtttttcccggtacataccttatctttttttgatgattaactcggaaattctgttgtattcaccggccgcggaggccggtgaataacggattactgccggactgttttcttcggtaacacggaatggagcaggaacaacccggtaactgccgccatggtggaaccaatcagaattcccagcttggagtaggtgttaaatgcttccggaagcccggtaaatgccagtcccgcgataaagatagacattgtaaaaccgatcccgcataacaccgatacagcgaatatctggttaagagtaatcctctccggcagttttgcaaagcccagttttaccgaaatcagacatgcggtgaaaatccccagcggtttaccgacaaacagaccgagcaggatccccagcggcagtgtgcccatcagtgcatcaaaggaaattccctgaacactgacaccggcattggcaaaggcaaacaacggcaggatcagaaacgccacccacggatgcagcacatgctccagctcctctgacggtgaatgctcaccatctttactgcgcagcgggatcaggaacccgacgatcactccggccagggttgcatgcacaccggatttcagaatacacacccacaatatcagccccgcaatcatatacgcggcagtgttactgacattgcgccagttcatcacacacaataccaccaccatcagtgccgccagcagcagcgctgtcagtgaaacggttttggtgtaaaacagcgcgataatcacgataaccccgaggtcatcaataatcgccagtgccagcagaaagactttcagctctgtcggcactcttttgcccagcagtgccattacgccgagggcaaaagcaatatcggttgcggccggaatcgcccagccctgtgcagcggcagcatccccgccgttaaacagcagatagaccagtgccggggctatcattccgcccagtgcggcaatcgccggaaacatcgctttgtcgcgcccggccagagagccggtcatcagctccctttttacttcgagcccgacgaccaggaaaaatatcgccatcagagcgtcattaatccataataacaagggtttatcaatttccagtgccgcaaattttacagcaacaggaatatcaagaaacgactgatacaacgccgacaacggcgtattcgccattaccagcgcgatcagtgcggcgataatcagcagtatgccgcctgcggcttcgagttttaagaactgtcggataattgcggtcatgggttaactcctttaagactgtcggcgttaataatatgcaaacaattaactcgaaaaaagcagattattcagcaataataactcgataattcctgattaataagggtttgaatcacagaatttcctgataaacactctgtaattaactatatattaacattttggtttctgtgaagtgtatcgtatgatccctcataccggcggatattctgctgtcgttaccaccgctcactgaataaaacaggctatcccatgtccgccacgctgtttattgctgtactgtttgctgcctttttccatgcatcctggaatgcggtgattaaatttggtcaggaccgctttctgggtatcgcggtgatgaccatctggtccggtgtggtctcggttcccgccctgttttggctcggcttaccggatgcagccgcggtaaagtggctgctgctgtccgccctctttcacatcggttatgccatttgtctgagtaaagcgtattcaaagggcgatctcagccagatttacccggtttcccggggttgtgccccgctgctgacgaccctgtttgcggtacttctgtttggtgagcacctgccgttgctctctttagccggtattctgctgatcatcaccggggttatccttcccgcgctgaaacaccgggcctccgggcacgcccgcagcgggctgatctatgcggtgatcaccgccttttttaccgcctgttacacactctccgacggcttcggtgcccgcagcagcacagactcactgacttatattttctggttgttcgccctgaacgggctggtgatggtagtgatgggttttgcccgttaccgccaccatttcacccgtgactttctgcgctacagcaagcccgggctgaccggcggcatcctgcaaatattcagctacggcattgtgatatgggcgatgggacaggcgccgataatgattgtcgcggcgttacgggagaccagtgtactgttcgcgttgctgctctccgcgtatttcctgaaagaaaaactgactcccgcccggattctggccgcctgtattattgtggccggggtgattgtaacgaagctggggggatagtttcagccctgatgttatacagcgtgttcagcatcagcagatttatgtcacctgacttcacattcacttttgtcacatcagatgcagtcatctcctgacgggcaaactctgtccgggtattgcagacctgtgtcacgggtatgcttttcgcaacaccggcgctgtgtccggtagatacggaaggctgaacggcaaccagcccggcatgaataatggcggatccgatagtattcatcgcgttaatccctgttgataatcagagcaaaaacaataacgcgttcagataaaacaacttttacaaaacacacaaaaaaaccggccggaaaaatgatcccggccggttatataacatatctgacaatgacttatttggtcaggtcatcaaagaattttttcacgccgtcaaagaagcgttttgctttcggggtgttgttgtgaccgctctggccatccacagattcaccgaactcacgtaacagttctttctgtttttcgctcagtttcaccggggtttccaccaccacacggcacatcaggtcaccctgcattccgccgcgcgccggtctgacacctttgcctttcatgcggaacagcttgccggtctgggtttctgccgggattttcagcttaacgcgcccgtccagtgtcggtacttcaatttcaccgcccagcgccgcaaccgtaaagccaatcggcacttcacagtagagattgctgccgtcacgctcgaagatattgtgctggcggacatgaacctcgacatacagatcgcctgccggagcccccatttcgcctgcttcaccttcgccggtcagacggatacggtcaccgctgtccatccccgcagggattttgactgacagggtcttatagcgttcaacacgcccgtgaccatgacatttgctgcacggatctttgatgattttgccgcggccgtgacaggtcggacacgcctgctgcaccgcaaagaagccctggcgcatctgcacctggcccataccgtgacaggtcggacactcctgcggctctgtaccttctttcgccccgctgccgtgacatttatcacaggtttccagggtcggaatacggatctctttggtcacaccacgaaccgcttcttcaagggtcagttcgatgttgtaacgcaggtctgctccgcgtgccgcgcgttgctgacggcgaccaccaccaaaaatatcaccgaagacgtcaccaaagatatcaccgaaaccagccccgccgaaaccgccgccgccaaatccgccgccaccgcccataccgccctgctcaaatgccgcgtggccgtactggtcataagccgcacgtttctgtgcgtcggtgaggatctcgtatgcttcttttacttctttgaatttatcttccgcgtctttatcgccctgattacggtcagggtgatatttcatcgcaaggcgtttgtaggcttttttaatctctttgtcatccgcagatttcgagacgcccaacacctcgtagtaatctttttttgccatccgttttgtcccttaacacaagcacacgggcgcagagtttcctcaacgcccgtgccggttttcagtgattaataacagtcatcaccgcgcccgctaagggccttattttttgtctttgctgtcgtcaacttcttcgaattcagcatcgacaacatcatcatttttacctgcatcctgcgcggcctcagcacctgctgtacctgcctgcgcctgctgctgggcaatttccatcagtttggcagaagcgtcgatcagcgctttcgttttctcttcgatagcggctttatcttcgcctttcgctgcgatttccagctcactcaccgcctgctcgattttcactttatcgtcgcccggcagtttgtcgcccgcttcttcgatctgtttacgggtagcgtgaaccagctgatctgcctggttacggacctgtaccagctcttcgaacttacggtcagcttcagcgttggcttccgcatcacgtaccattttctggatctcttcctcgttcagaccggaagatgccttgatggtgatgttctgctcacggccgctgtttttgtctttcgcggacacatgcaggataccgtcggcatcgatgtcaaaagtaacttcgatctgcggcataccgcgcggagcagcctgaataccatccaggttaaactgacccagtgatttgttgtcaccggaacgtttacgctcaccctgcagaacatggatagttaccgcagactggttgtcttccgctgtggagaacacctggctgtgtttggtcgggatagtggtgttcttcgcaatcagcggagtcatcacgccgcccatggtttcgatacccagagacagcggggtaacgtccagcagcagcacgtctttaacatcaccacctaacacaccgccctgaaccgcagcaccaacagccacagcttcgtccgggttcacatctttacgcggctctttaccgaagaaatcagcaacggttttctgaaccagcggcatacgggtctgaccacctaccaggatgacatcattgatatcattcactgacagaccggcatcctgtaatgcaactttaaccggatccatagagcgtttaaccagatcttcaaccagtgattccagtttcgcacgggtcactttgatgttcatgtgtttaggaccggtcgcgtccgccgtgatgtacggcaggttaacgtcagtctgctgtgcggaagaaagctcaattttcgctttctcggcagcttctttcagacgctgcattgccagcgggtcgttacgcagatcgataccctgttctttcttaaattcttcaaccagatagttgatcatgcggctgtcgaagtcttcaccacctaagtgggtgtcgccgttcgttgccagcacttcataggttttttcgccgtcaacttcatcgatttcgatgatggagatatcgaaagtaccaccaccgaggtcgaagaccgcgatagtacggttacccacttcgcgatccaggccgtaagccagtgccgctgcagtcggttcgttgataatacgttttacatccagacctgcgatacggccggcgtctttggttgcctgacgctgagcatcgttaaagtaagcaggtacggtgataaccgcttcggttaccggctcgccgagataatcttcagcggttttcttcatttttttcaggacttcagcagaaacctgtggtggtgccattttctggccttttgcttccacccatgcgtcgccgttatcagagctgacaattttgtacggcatgatgttcatatcgcggcgcacttcttcatcgtcaaaacgacgaccaatcagacgtttgattgcaaacagtgtgttctgcgggttggtaacagcctgacgttttgccggctgaccgaccaggatttcaccatcctgtgtatacgcgatgattgacggcgttgtgcggtcgccttctgcgttctccaggacacgtgcctgattaccatccattacagcaacacaagagttggttgtacctaagtcgataccaataattttacccatctaaaggcctccgaataattctgttcgtcttacgctaccgatgtatatgaggttcaattttcacttttcaagaaaaaatttttcactcacccgtcacccggaatatttcctgacggtaccggacatccgcagcgttaaaggggattcaactgagtttcagtttccgatgacaagtagatggggccataaatgcattcatcaaggggaaaatgaaaaaaaaacagattatttaaaagaaaatgatgaaacactgaaaaatgccgcgctgacagtcatatcagcacggcattcacacagcacaatgcagggggttatcaggagctgaacaccatcatccgctgacggaccgccgctttccccatatacagtcccagcagcagaccgatcagcgaaagccccagcatgtaatacgccggtgccagcggggtccatttcagaaacagcgtgaccaccaccggcgtcagtccgccgaaaatggcataagaaaggttataggagaacgaaataccgctgaagcggatctccgccggataactgttcaccatcacaaacggtaccgcgcccaccacgccgacactgaatccggccagtccgtaggtcagcgacagcggcgtgccaggctctccggcggtcagataaaaatagccggtgcagaccgccagcagcaggctgccgaaggtaaagaccacggaagcacccagtttgtcacacagataacccgccaccagacaccccgcgcacagcgccagaatcgcggtcatattggcgactgaaaccaccgcttttgccaggccgaactctgtctgcaaatacgccggtgtcagcaggatcaccaccacaaccccggcggagagcagccaggtcagcagcatagagataacaatcgcttctttgtgattcaccaccacggttttcagcggcagctctttcgcgagtgctttttgctgtttcatctcctgaaagatcggcgtttccgccagccagcggcgcagatacagtgccacaaacccgaaaattcccccgaggaagaacggtacacgccagccccaggcaagctgctgcgcctcagtaaagagtgtcgccatcatcatagccaccagcgaaccgagcaggataccaaccgtcagacccgcggtcagcgtgccgcaggcgatgccgacacgatgcttcggcacatgctcggagacaaaaacccaggcccccggcacttccccgccgatcgccgccccctgcatcacccgcattaataaaagcagtaacggcgcggcaatgccgatagattcataagtcggcagcagaccgatgcagagtgtcggcaccgccatcagcagaatactgagggagaacattttcttgcgcccgaccaaatcaccgaagtgtgccatcacaataccgcccagcgggcgtacgagataaccggcagcaaagatcccgaaagtctgcatctgcaccagccacgcagggatatcaggcgggaaaaacagtttgccgatagtgacggcaaaaaagatgaaaataataaaatcgtagaattcgagtgcgccgcccagggccgcgagagagagtgttttatagtcctgccggttgagtgtccggggaatggtctgtgccatgggttcacctttcctgtctttacattgctgttatctttactttacataagtggataaccgcatcataggacaagaaaggtgtccgggggaatgttttttattttatgctgaaaacgcagtattactgcggctttattgctgatttaggacgaaacgccgcgacaatttcagggtcagtttcgatgtaaggcccgtcgagcaactgtatacaatacggtacacttgcgaaaataccggaaaccattactttgccgttttcatctttcagcccttccagggtctcagcgatagctttcggctgccccggcagattgaggatcagcgactgattgcggatcacgcccacctggcgggataaaatggcagtcggcacaaatttcaggctgatctgacgcatctgctcgccgaagcccggcatttcgcgatccgccaccgccagtgttgcgtccggagtcacatcacgccgcgccgggccggttccgccggttgtcagcaccagatggcagccgaattcatccaccagctcacacagcgtctggctgatcatcgcttcttcatccgggatcaggcgggtttctgtctgaaaaggcgtggtgatggttttttccagccatgcctgtaaggccggaatgcctttatcttcataaataccaccggatgcgcggtcagaaaccgagacaagaccgatgcgcaacacattgttcatagtcacctcaacgtcattttgactccggggcacagcatagcattgccgccggaaacaaaaaaggcagccttccggctgcccttcttatctgactgtattataacaattacagcagatcggcgatcattttttccagtttgccctggtctaccgcaaacttacggataccgtccgccagtttctcggttgccatagcgtcactgtggtgaccccagtagaactcagcttctgtcagcggtgcaggacgcgctttcacttcgcctttgtattccagtttgcgctcaacagcaccggtcgcttctgacagctctttcagcagtgcaggggcgatggtcaggcggtcacaaccggccagttccaggatttcacctgagttacggaagcttgcgcccataaccacggttttgtagccgtgctctttgtagtagttgtagatttcagtcactgaaatcacgcccggatcttctgccggtgcgaactctttcttgtcgctgtttgctttgtaccagtcgaggatacggccaacgaacggagaaatcagatatacacctgcttccgcacaggcacgcgcctgagcaaaggagaacagcagtgtcaggttacagttgatgccttctttttccagctgttccgccgcgcggataccctgccaggtggacgccagtttgatcaggatacgatcgttgctgatgccggcatcgttatacagtttgatgagacgttttgctttcgcgatacttgcctgagtgtcataagagagacgggcatccacttctgtggagatgcgaccagggatcagtttcaggatctccagaccgatattcaccgccagtttgtcaccggcatcgataatctgctgttcacgtgaatcgctctgtgcacgcgcccaggtcaccgcatcatcaattaacttacggtactccggaatctgcgccgcattgaggatcagagaagggttggtggtggcatcctgtggtttgtaaagcttcatcgcttcgatgtcaccggtatcggccacaaccgtggtcagattacgcagggaagttaacttatcggtcattttcgtctctcatcttatgtcagaagatacccggaataattcgggatgcctgccggtgaactttgcgtagtcaacacccgggaaccctgaagtataacgagtacagatggcaatatgccgcaactgcacctgataatatcacggacagcccgccgcgcaagcagggaaaatccggtgccgcaccggtgatccgccgttattccgctgtaatccggagtgcctcctgttttgtatgtattaccgattacagtgatttgcccgctctgtgcttttttttggtagagtaccgttaataatgacaatatcagaccggagccgaccatgctgctgactatttcccctgccaaaaccctcgactatgacagcccgttagccactgaacgccatactcagcctgagctgctggcacaatcagaagccctgatggaaacctgccgcaaactgcccccggcggatatcggctcgctgatgcatatcagtgataaactggcgggtctgaatgccgcccgtttcggggagtggcaggcgggttttacgccgggcaaagcccgtcaggctattctggcatttaaaggggatgtgtataccgggatgcaggcggaaaccttcagtgaagccgattttgatttcgcccagcagcatctgcgtatgctttccggcctgtacggcgtgctgcgcccgctggatctgatgcagccttaccgcctggaaatggggacgaaactcgccaatccgcgcggcaaagatctgtatgcgttctggggggatattattaccgacaatctgaataaggcactggccgcacagggcgataacgtgctggtcaatctggcctctgatgaatactttaaagcggtgaagccggagaaactggatgcggtgattatcaaaccggttttcctcgatgagaaaaacggcaaatataaagtgatcagtttctacgcgaagaaagcacgcggcctgatgagccggtttattattcagaaccgcctgacacagccgtcacaactgacggaatttaacctcgacggttaccgttttgacgaaagccagtccggtgaacgggaactggtgtttacccggccggaaggtaccggttctgataacgggtaaaacaaaaagccgctgtaaatacctccctgtacgctcagctgcgccatccgtggcgcagtatgctttttgttctcttacccgttatcatcacgctatcaatgattgataagacgttacggcttcaccgttttcagcagatagtcccgcagcgccgcaaaatccgccggtaacacggcagacagcaacggcaaatcagcccgctccgccagctcagccggtaacggcagtttactgcccagaatcgcttccacactctccaggaattttgccggatgcgccgtgccgaggaaaataccgtactcgcccggctgcaaatcactgcgcagcaggcgataagcaatcgcggcatgcggctcggaaatatagcctttcgcggccagatcgcgcatcgtttcgcgggtttcgtcatcacttaccgcaccggaacgcagatccttcagagaccagccttcgcgcgcaaacagcgcctcaatacgcggccagttattcggctggctgacatccatagcattggataacgttgccaccgtcgccgccggtttccactgtccgtccgccagatagcgcggtaccgtgtcattggcattggtcgcggcgataaagcgtttcaccggcagccccatcgctttcgccagcaccccggcagtcaggtcaccgaagttaccactcggcaccgagaacaccagttcaccgcgtttttccgccggaacctgtgccaccgcttcaaagtaataacagatttgtgccagcaggcggctgatattaatggagtttgccgagttcagatgcagcgtttgtttcagttcctcatcatcaaacgcctgttttaccagtgcctgacaggcatcgaaatcatcctgcaccgccacggtgtggatattaccgccaagcgtacagaacagtttttcctgtaacggactgatttttccctgcggatagaggatcactacctgcacatttttcagaccgtaaaaggcgtgtgcgacggcagcaccggtatccccggaagtcgcggtcagaatagtgaccggtttgtcaccggcaaccgcagccagcgcctgtgccataaaacgtccgccgaaatctttgaatgccagtgtcgggccgtgaaacagctccagacaggccacatccggctccaccgggttcagcggtgccgggaaagcaaaggcgtcacggacacgcgctgccagctcagcttccgggatctcatcaccaatcagggcatgcagaatggcggtgctgcggctgacaaaatccatcgccagcagcttatccatctcagcctgctcaaaaaacggaatctcacgcgggaagaacagcccctgtccgcgtcccagcccctgttttaccgcctgtgcaaaactgactttttcactctcatcttttaaattgtacagttccattttttacctttatgcacttatctgacgtgcgcctttgagatcgagacggcacagatggacaaacccttcgctgttctgcaaatactgtgtgttaaagacatccgccacctgatctgccgctgatttgctgtcacagaccgcaaacagagtcggccccgagccggagatgccgcatgccttcgcgccgcgagcaagcacctgctcacggaccgcatcaaaattcggtaataattcacggcggtacggctctgccaccacatcacggatcatcgccgccgccagatccgcctgtccggtgtgacaggcgtggataaatccggccagattgcgcccgtggctgacaatatccgcccgtgaataagtcgccggtaaaatcgcccgtgcctgcgctgtggagactttgatgcccggatacgccattacccagtaccagtgttcaaaccccggcactgcctggctgacgctgtcgccggtttcaatattgagctgcaatccgcccaggaaacaaggtgcgacattgtcataatgcacactgccggagatacgcccttccatctcacccatcagacgcagcagcgtcatttcatccagctgcctgccggtgtactcattcagcgccaccagcgcggccaccaccgagcaggcgctggagcccagccccgagcccaccggcatattcttttccagcaccatggcgacctgcagatcatcatgaatgatctcactgaaccgttcacggcactgatacacaatattgtgcttcggattcaccggcagtttcccggcaaaacgcccgcggtttctgagtgaaaacgtctctgccttcgcgatggacacacagtcgccgagcagtgccccgctgaccggagacactgccgcacccagcacatcgaaccccacactcacattcccgattgacgccggtgcataaatttttatcacgttttacactcccagtttccatgacattgtccgcagcacatccgcaaacacccctgccgctgtcacatcattccccgcgccgtaaccgcgcagtaccagcgggataggctgatagtagcgggtataaaacaccagggcgttctcgccgtttttcactttatacagcggatcgttaccgtctgcctctgtgattttcacctgacagcggccgtgatcgatgatgccaacataacgcaaaacgcggcctgcttctgcggctttcgccacacgcgcggcaaaggccgcatccagtgacggcagattcgccataaaggtattcacatcgccggaggcatcaaaatccggcggcagcacagaatccacctcaatatcggataattcaagggagagccccgcttcacgtgccaggatcagcagcttacgtgccacatccatcccggagagatcatcacgcggatccggctcggtaaagcctttggctttcgccgcagccgttgcctcagacagtgacatcccttcatccagcataccgaaaataaaggagagcgaaccggacagaataccgctgaactgcaccagctcatcccccgcgttgagcaggttttgcaggttttcgatcaccggcagcccggcaccgacgttggtgtcataacggaactgacgttttgatgccgccgccgcactgcgcagctcatggtaataatccatcgacaaagtgttggcttttttgttcggcgtcaccacgttgaaaccgtctttcaggaaatccgcatattgcagggcgatttcctcattcgacgtacagtccacaatcaccggattgaggaaatgatattctttttccaggcggatcagacggctgaggctgaacggctctttggcctgcgccagcgactgacgccagtcctgtaaatcaatgccgcgcatattggtcagcatcgcttttgagttggcgataccgcacacacgcagatcgatactccgggctttcagccacgcctgctggcggcggatctgctccagcagcgcactgccgaccccgccggtgcccaccacaaacacctccacgatgcggtcagtgttaaacagcatctggtgacacaaacgcacaccggcggccgcgagatcattatccaccaccgcagaaatggaacgctcggatgagccctgcgcgatcgcgataatattgatgttggcgcgggtcagtgccgagaagaaccgcgcggaaatccctttgagtgtccgcataccgtccccgaccacggagacaatcgccaggttatccagtacatccagcgggtcgagcacgccctctttcagctccagatagaactcttcttccagcgcctgctgagtgcgggccttatctttctgcgccacacaaaaactgatgctgtattcggaagatgactgtgtaatcagcacgacagagatattacgccgtgacatcaccgtaaacacccgcgccgccatcccgaccatccctttcatgcctgggccggagacgttgaacatcgccatattattcagattggtgatccctttcaccggcaggctgtcatcacgctggccgtcgccgatcagcgtgcccggcgcgtccggactgagggtatttttaatcaggcacgggatctggaactgggcaatcggcgcgatagtgcgcggatgcaggacttttgccccgaaataggagagttccatcgcctcctgatacgacatgcctttcagcagacgggcatccggcacaaaacgcgggtcacaggtatatacaccgtccacgtcagtccagatctcacaacaggccgcacgcagacacgccgccagtaccgccgcagaatagtcagagccgttacgccccagcaccaccagctcgccgttttcattaccggcggtgaatcccgccctcagaatgatgtggtcagacggaacattcagcgctgcaatacgttttgttgattcattaatatcgacagtggattccagataaccaccaaacgccagcagactggccaccgggtcaatcactgtcactttatggccgcgggctttcagcagtgatgccatcactgcaatggaaaaacgctcgccgcagctgatcatattggcgttgatgccgtccggacactgccccagcagtgacacaccgtgcagcacccggcggatccggctgatttcctgctctgtttcatgtttcagccggtcatattcaaagcccggtaccgcatcgcgcagcccgtccagaatcgccccgagaatcgcggcggcatcgtgtaccagggtgtttgcttcctgcccgctgacggtctgctccaccatcgccactaagtaattagtgattttcgccggtgcggaaagcaccatggcgagctgtccctgcgcgagttttttctccgcgattcctgcgatgttcagtatacgatccgcgtttgccacggatgtgccgccaaatttaagtacacgcatgtgtcacctgctcctgccgtttttagtccaaaaaaaaagcccgcacagtcattgtgcgggcttttttcgtgatttcagatatgcgtcagcccgcaccgccggtggtaatggtggtggtggtaataataatcatggtcaggctgtgattacgcatggggttcctgtctgtcatttgtctggttaaccctattacggttaaaggaaaggcaggttgatgtcaaattattcttcagatttgcccgcagaatcagacaatttgaatctgatcacatatcagaataaaaagaaattacggcaaattaacgcggttatcatctcatcaaccggcatttaattttacagaaccaggagtttctgtattttttcacttttatcatacaggttgcgtttttcgctgtttactcggcagaaaaatgtacaataatcagacaagtcagatataatgcttaacattgtatttctatttatttgacaatcattaaaaccggcaattaacaattgaaaattgtgttaacgtgctacaattgattttgatatgtatcaacaaaggttagatttccggatggtaaatgattgggttgctgttatattggtgttaatagactaatattggtacgaatcgtttcaattccttacgttctgagttgagtgattgttaaaatgcggtctgaacaagatttttttctgtctgtggtgatgtaccggacataaccacaacgataccggtacaggttacacgggcagataatcagatttcttattattctaagtaatttaggtagcgactatgcaaaccccgcatattttaattgttgaagatgagatcgtcacccgtaacaccctgaaaagtattttcgaagcagagggttacgtggtacatgaagccactgacggtgcagagatgcacaatgtgctgtcagaccatgatatcaatttggttatcatggacatcaacctcccgggaaaaaatggtctgttgctggcgcgtgagctccgcgaacaggcaaacgtggcactgatgttcttaaccggccgtgataatgaagtggataaaatcctcggtctggaaatcggtgctgatgactacatcaccaagccgtttaacccgcgtgaactgactatccgcgcacgcaacttactgtcacggaccatgaatctggccggtggcagcgaagagcgccgcagtgtggaaagttacaagttcaacggctgggaactggatatcaacagccgctcattaatcggaccaaccggcgagcagtacaagctgccgcgcagtgagttccgtgcaatgctgcacttctgtgagaatccgggcaagattcagacccgtgctgaactgctgaagaaaatgaccggccgtgaactgaaaccgcatgaccgtacagtggatgtcaccatccgccgtatccgcaagcatttcgagtccacaccggataccccggaaatcatcgccaccattcacggcgaaggttaccggttctgcggcgatctcgaagagtaatcttccgctgcggtaacatatatacgaaatccccggtgatgcctggcaccaccggggatttgttgttgctgttatccggttatttgttccacggcataatcggcaccgcgctcagggcattcttcggcgagccgtcgaccactttatccgaataggtcagataaatcagcgcgtgacgcttctcatcatagaaacgaaccacctgtaacttcttgaataccatagatgtccgtttttggaacaccacctggcctttatctttgcggccttttttcactttatcactgaccgtgaccggcccgacctgctgacaggaaatcgcggcatcagacgtatcctccgccagacccagcccgcccgaaatcccgccggtttttgcccggctcaggtaacaggtgatattttccacatccggatcatcaaaggcttccaccacaatcttgtggtccggccccagaattttgaacacggtgtccacagagccgatttcttcaccatggctcaaaaaggataacgaactcaatgaaatagctgtaataattcccagtatagaccggcgagtctgattcataatcttaatagcccaagaaaatcatttgaaaattgtatgattttaaagataatccatgttaccagtttatgatagtcgccctgttcttaaaacattttttccggccaaaagtaagaattggtaaatgattatcccgttgataatcactcaggttagaatataaattcgttatatctctttcagaacttcatcaatccaataagggagatgtatggatcagaccagcatcattcgcgatttactccgttggttagatgagcatttagatcagccactttccctcgataacgtcgctgcgaaggcaggctactccaagtggcatttacaacgtatgttcaaggacgttaccggtgaggccatcggcgcttacatccgcgcccgccgtttgtcacgcgcagccattgcactgcggctgactgcccgtcctattttagatatcgcattacagtatcgtttcgactcacagcaaacctttacccgcgcattcaagaaacagtttaataaaacacctgcgctgtaccgccgtcttgacgaatggtgctctgacggaatctgctccgccattctgcttgatgatgtgccgatgccggagcacgagtttgtcacgctgccgccgcgcacagtcaccggtatcgagaacagctgttcacatcgcctggaagactgggcaacctcgtgtacccacatgcgccaggagttctggctgcatcatatttctgtggcgaaaactatcccggactatgtttacgggctttacagcaccacccgtaatccggacaaagaagatgagcagacggttcattacaccactgccgtggcgaaggaatttgctgcctttaccactgaggaaaatgttcacgaggtggaaatgcccggtggcgaatatctctgcttcaccttcagcggcattccttaccgcggcgcgatgcaggaattcctgttcacgatttacggccagtgtgtaccgcgactggggatcacccgccgccgtggttacgatattgagagctataaactgagaaagggaaccgacatccgctatccggatgcggctgatgtggatgagaccgatccgcgccatcacatcgaggaatttaaatactacattcctgtcagacgtgacgcgcagtaacagccttcccgcagaacaaacaccgccgccggtggtgtcttgttcacctgggcggtgtctgactcaccggtttactcagcgctgcacttcatccagcgccggaagactcagatgtgtggtgtcaccggccgtttcaaccacccagccatccgccagccacgggctttcctgatactccagaacggataacgaacagttgcgcagacgcagacggcgctccgcataagccggcagccccagaacagagccaatcaggcatcccagtgcaataccgtgactgaccagcaggactttactgccctccggcagatccagcgtgctttccagtgccgcccgcatgcggctttccagctccgcgagagattccccttccgggatacgcccgtcttccgcgccgttaagcagacttttacgccagccctcttcttctgcggtcagggtatggatctgacgtttttccagcacgcccatattgagctcacgcagacgcggatccgcaataatctcacaaccgcaggcttctgcgatcagtttcgcggtctgctgtgtgcggcccagatcactggcaataatatgggtgatcccttcatttttcagacgcgcggcaacctgcttcgcctgatcgataccactttgtgttaacgggctgtcagaatgaccctggatacggcgctgaacgttccattcagtttcgccgtgacggacaagaaatacctgtgacataactatcaatctctgcttttactgtgtgaaagtctgattaccccgctaccataccgtaaaaacattcccgggatcacgctttatccctgaaactctttcaccgcacggcaccgtctaaaaaaatctgcggaaagccgtcaatattcgctatactgcggcaaacaaaattacgtggatagtttaattatcatgtttcatattatcgcagcaacgactaatccggccaaaattcaggctatccgttccgcttttgaagtggtcctgggtaacggcaattttgatattgaagatgtgaatgtggacagcagcgtgccgcagcagcctatcgggaacaccgaaacccgtaccggtgcccgccagcgcgtcaaangtcccggtgcccgccagcgcgtcaatgcggcccgtcaggtcagaccggaagcggatttctgggttggtgttgaggcgggtattgaaggcgatatgacctttgcctggattgttatcgagcaccgccagctgcgcggggaatcccgttctgccagcctaatgctgccggaaaaaattctcgcggggatccgcgaaggccgcgaactgggtgatgaaatggccgacctgaccggggtggaagatatcaaacagaaaggcggagcgatcggtttcttcaccggcggtgcgctgacccgcaccagtgtctatgagcaggcaattatcctggcgctggtacctatccagcatgaaatttataaatccctgaacaccaaagaatcctgatctgaaaaaccggaccggtactcaccggcccggtgaccttcccggcacatttactgctgtgccagccactcttcccgcgtaatgcggctgatatgttcagtccggtaatcattcaggaactgattgaatttgttctcttcagtatgatgatgacggaacccgcatttggcctgggcgcggtgtgactgttcattgttttcaaaatagccgcaccacagtgcatccagctccagggtttcgaatgcatggcgcatcacttccctgaccgcttccgggatcagcccctgtccccagtacggcacaccaatccagtaggcgatttccccttcccgctgactgatatcaaagttgctgttttcaccgatcaggatcccgatacaacccaccgcccgtccgttctctttcagttcagtggcatagacctcatcaaggttaaaaacggtgcggataacatcggcactttccgcgatgcaactgtgcggcggccagccggcaatcgggccgacacggtcatctttcgccacttcatataaatcggcggcatcggtttctgcccacgggcgcagaatcatacgttctgtttctaatttcatactgcttaccttacttcagttatacattcagcctcagcggctctctctgtgatgacgggaagtgtagcctgacggcagaccagcggtaagcaacaaacctccgcactttcggtacttttgaaaactattgtgataaatttcctctgatatctgctttaggatggcaaaaatggcaactcatgatattacgctgacagatcagattccggtgctgacggaagaaacagatacattactgacaggggaaagcacactggccgatcacaacggcgtgccgctgaccttcggaaatgcgtatctcaccctgatgatctgccgggcgggatacgcgcatatgacactgaattttaaatctcagcctgtacgggcgggggatattctggtgctggcggaagatacgatcgcgctgctgaaaaagcgttcgcggggattccgtgtatttttttgtctgatcccggcctccttctctgccgaaatcgcctatgtcctgccgaacccgctgtttctgtttctgcatgaatatccccgctgcattccgctgccggaagaaaaaccgctgctgacaatgtggctggcacaaatgcaggatatcacccgcaacagtccggtttaccggcatattatgcagcgtaatcatttacagaatctgtttttgcggatagcggaaagaatgccgccggatgccccggccgccacacagaaatacagccggaaagagacgctgtgctggcagttctgggaactgatctgccgccacagccgggaacacagggatgtgcagtactatgcgcggcagttaaatatcacgccgttttatctgtcacagctgaccggaacatttttcaatcattcgcccaaatcactaatcaaccgccgggttatccccgaaatcaagacactcctgcgttacagcacgctgtcagtggagcagatcgcagataagctgcactttgatgatccgtcctacctgtgccgctatttcagacgggaaaccggcatttccctgacaacctaccggcggcagaaccgctgagttattttttgccgctgaggagttcctgctccagccaggctttcacctcttccggggcatatttcaggctgttggagccgcgggtgatagtcgcaatgccgacccccagctcacttttcagctcacgctgactcatcttaccgcgcagcagttcctcaacgatccgcacgcgtgtgcccagcgctgtgcgctcatccggggtaaaaagcagctgaaaaaggtgggattcaatatcctgtgaataggcgttgcgcagcaggctgacaaagcgctgccagtcgctgtcctgaagttggtctgtcgtcatgtgtcaccccataggatcgggagtacaaaaagtacccgttaactagtacacctaggataacacaagcccggtgcagctgtcttctgctgaaccgggccggaggggaatgatcagtaacgcattgattgttcggaaggtgtcagtacatccgccgggcgctgccctttcaggaagttctgataaaagacatcaaatgccagcacattcttcacataaccccgggtttccgcgaacggaatggtttccacgaaagcaaccgcatcaagccgtccgccgctgttgctcagccagcgggtcacacggttcgggcctgcgttatacgcagcactcgccaggatccggttctgaccgaactggttatacacgccgttgagatacgctgtgcctatctcgatatttttgcgcggattaaccagctgcgcactgttgctgtaatccgcaataccattgtcgcggaccgtctgggttgccgttgccggcatcagctgcatcagcccggtcgccccgaccggcgaacgcgcctgcgggttccaggcactttcctgacgggctatcgccatcgcatagcttttgctgatatttttattctgggtgaactcatcaaactcactctgccaggccagcgggaagcgctcttccagatgatcccacagcttgccgttgatcgtcgcctgcacactcagatccgcccagccctgctccagcgcataacgcgccagctgtgctttgcgcgccggtgtctggctgtccaccagattcagccactcggtgcgggccagcccttccatctgccagtacagcagctcacggatacgctgaatttccggcagattgctgatgctgttgtccggtttatccgccgcattgatcatcatgacatacggtttacccagacgctgcgccgccaccatcggatagaacccgcgaccctgagtgattttttccagaatggcatctgctgccgctttattgccgcctttttccagcaatacggcgcgccagtactgccattcctctttctgctgggcatccgccggtaaccgggtcagccagcgatccagatcacggtcatccgcgttactcagcgccagacgcacgcggcgctcgcgcagggtgacagaatccgtttcctgaatcacctcgtcacgccaggcagcctgctcatccgtcacatcgctccccatatactgccacgcaacggcatctttcagttgctgacgctcgctgtcattcattttctgggcgcgcgccacactgttcaggtcagcccgtgccgcatccggtgatttgcgggcataggcggagaaagcggagatggtggcctgacgggtgaaatccgtcgggctcagttgggcaaatgtcaccactgatgccgggtttttctgtaagttaatcagaccattgctgatggtctgataagaggcaggcaggcgttttgccagataactgaccagagaggtattgccgtttttcagcgccagactgatgcgttcaagaacacgttccggtgtcagaccgccggactgatcccagacatcaaataacttatcgcaggaggacggcagggaatttcccgccagccagactgatttcgccccgtccagcgccacctgacggtttccggtctgccagttggcataataatagtcacacttcgcactgaccggtttcggcacagtggtgctgtaactgaccagcccctgccagtcattacgtttggccagttcactgataaatttatttttcaggcttgccgctgacggcaggttcggatggttatccgtaaaatttttcacctgaccggctgtcagcaggctcatgtcctgtgtcagctcacggtattccagataaggatagagcggatagtcccgcagtgacggcatcaggcgttccacttccgccatattattggcatcccaggcagatttgacatcctgatagcgctgacgctgctcactcagtgaatccgctgacgccagtgctgaaaacatcagcatgctgagggctgccacgcccggccatatacatttcctcatgatctgctcctgtctccttcattaccgtttatctgcacaatacatcagaccctgatacacagtgtaagtgccctgtcacgcagacacaaatcataccgttgtaccgcataaccagataccagaaattatattattcagaatatatgtctgattattcttattgtgcattccctttaccgtaaatgatggtttattaaacagatgatagtgatatcgtctggtgtgctcactattcttactatatagtaaagttaaatttaaaattataatgataacacttcaggaaaccggctaccgccgtaagcgggatcctgagcactaccaataactctataagtagtgaacacatttcagacgactccggtcgtcttttttttaccccttgctccgggataaacacgctattttaattaatcagataattatgtttttgaagtatttttatttttaagattacagtcagaaatcataaaatatatgatgtacatcacttgctgtatttccggtttccattaaaaatattctcatatttttacactacatccggtttactgataaccgtaaaggacgtaatacattatgaataatataaaaaacataataatcatctctgcattatttgccctgaccgcatgtgcatcacagcagaccgcctatgagaaaatcacccgtcactatgtctaccagcaggctgcacaggattctgaccctaattttcagactcatataaatggctccgttaaacttatgacgccgttttttaaacagttttatgatgccggtataaaagataaaaaagacggaataacaccgcaacaatataaagagcgaattagttatttcaaaagtaacgaatttttgagccgtatgaccggaacaacacagtttatttcaccaaaagtacatactgagaaagtaaatgaaagtgaccgcacggaccggcagaaaaaaatactgacagacaatattattgctgcttatgaggccggttacagcggccgttagcacaccggtcccgggttcatcatgatacggatcccggcaacggcacgatcaccgtgagaataacgcaggccggtgttagaatggggaatctgctgtacccgccggtcactgccggcaaccgggcaatactgacaccggagtggctttaactaaacgtaaaacttagtcataatgccccgcagatgccccatcaacgaaaaaaggtagactacattggctcaatacgtttattcgatgcaccgtgtcggcaaaattgtgccgccgaagcgtcatatactgaaagatatctctctgagtttcttcccgggcgccaaaatcggtgttctcggcctgaatggtgccggtaaatcaaccctgctgcgcatcatggcaggtgtggataccgatattgagggcgaagcacgtccgcagcccggcctgaacatcggctatctgccgcaggaaccgaaactgaatccggaacacactgtccgtgaagcggttgaagaagcggttgcggaagtgaaaaatgccctgacccgtctggatgaagtgtacgcgctgtacgccgatccggatgcggattttgataaactcgccaaagagcagggtgagctggaagcgattatccagtctcatgacggccataatctggataaccagctggaacgtgcggcagatgccctgcgtttaccggcctgggatgccaaaatcggtaatctgtccgggggtgagcgccgccgtgtggctatctgccgcctgctgctggaaaaaccggatatgcttctgctcgacgaaccgaccaaccacctggatgcggaatctgtcgcctggctggaacgcttcctgcacgactacgagggtactgttgtggcgatcacccacgaccgttacttccttgataacgtcgccggctggatcctcgaacttgaccgtggtgaaggtattccgtgggaaggaaactactccagctggctggagcagaaagatgcccgtctggcacaggaagcttcttctgaagcagcccgccgcaagtctatcgagaaagagctggagtggatccgtcagaatccgaaaggccgtcagtccaaaggcaaggcccgtctggcccgctttgaggaactgaacagcgtcgagtaccagaaacgtaacgagaccaacgaactctttattccgcctggtccgcgtctgggtgacaaagttctggaagtggaaaacctgaccaaatcctatgatggccgtaccctgatcgataacctgagtttctcgctgccgaaaggggcgattgtcgggattatcgggccgaacggtgcgggtaaatccaccctgttccgtatgatcagcggtaaagaacagccggattccggtactatcactctcggtgataccgtgactatcgcgtctgttgatcagttccgtgatgccatggatgataagaaaaccgtctgggaagaagtgtccggcgggcaggatatcatgcgtatcggcaccactgagatcccgagccgtgcttatgtcggacgctttaacttcaaaggcgttgaccagggcaaacgtgtcggtgagttatccggtggtgagcgcggccgtctgcatctggccaaactgctgcaggtcggcggcaacatgctgctgctcgatgaaccgaccaacgacctggatatcgaaaccctgcgcgcactggaaaacgccctgctggaattcccgggctgcgccatggtcatttcccatgaccgctggttccttgaccgtatcgctacccatatcatcgactatcaggatgagggcaaagtggagttcttcgaaggtaacttcagtgaatatgaagattacaagaaacggactctcggcgaggccgcactggagccgcaccgcatcaagtacaaacgtatgaccaaataggccatataacggaaaatgccgcgtggtgagggaccgcgcggcattttttggttggatggataaaagagtgtcttttgttacgggtattacattgaacctggtacttaaggtacaaccgaagctgacttactacttcatatttaccgctttcataacacttaaaactgacaaataaatcaatcagttaacaccatcagtaaagggatcctttactcttcatctttcctccctttgttgccctgaattctgtcggacgctgtgtgttgtccttgttctttcagtatagaagagaaaaataatttctcacggaaattacccgattatttttcgattctcacaacattctttatttttgctgatccccgtcacgaatttcaggggtatccagcatcagcagacgctgaaccagctcgacgcactcgagaaaacgggtgtcgtaatctgccgatgttacgtggacaaacttaataccgttttcccgcagcatatcgatcagcaaatcctgaaaggctttgcggtcattgtcactgccgaggctgcgcagtccgtcagccacccacggcgtgttattttccagcaggatcaccagatcaaagcggtactccgcaatcagtgcctgcacaaacggatgctctttaccctcataccgtttgcagaaggcctgggtcgtgacaaaatccgtatccacaaatgcgactttattggcatatttcactgcaaaatcaatatactgggcatgtcccagcgcgattttgtcatagtcggaatattgcagcgccatttcatcaccgcccaggtgggaaaacacgtagtcgcgtccgtattcccaggcactggtggtattgaacatattcgccagtttattaacgagggtggatttgccgctggattccccgccgagcaccgccacagtgcgcacaaagaagggtttgacctctgtcggaatatagtcccagtagcggaacggcgcctgacggatctgccgcccgctgatattcataaaggtccgttccgggtcgataagcactgtttcgatgccgaacgattcacggtaacgcggcacatccgctttctcacctgaatagatgaaatccggcgtgatccctttttcccgcataaactgacacacgccctgactccagtgctcccagccgtgaggatacggatcataagcgtgctcatcaaatgagtgaatgcggatatttttctgatacttaaaggtttgcagaagccagcgcaggcgatcactgacggtcggctgctgagacatcgaactgttgataaacaacgccttatcacgcggttcgtcgtgacagaggatcacatgcagctcatccacctggctgcacgcccgctggatcagataaatatggccggtatgcagcgggtaaaacttcccgaacaccaccccggtaattttttgcttcagcgggtaatccagccccagcgcactgtgcagtccggccagcttctggccgccgggacttttgattttgttgttaatcagctggctgagataccctttggtcaccccgcactgatccgccagctgctggagtgtgacacccgcctgtttaatggcttgtttcagataggaaaaatcggtcattctctgcctcacttattccagttcatccagcacagacagggcatccgacagttttttcaccccgaacacctgcatacccggcggcgggtttttcgggcggttggcattcggcacaatcgcccgtttaaaaccgtgtttggccgcttccgagatccgctcctggccgctcggtaccggacggatctcccccgccagcccgacttcgccgaagatcaccacatcacgcgggatcggccggtcacggaaactggagaccagcgagagaagcagcgccagatccgcactggtttcggtgactttcaccccgccgactacgttgacgaacacatcctgatccgacatctgcaatccgccgtggcgatgcagtaccgccagcaggatagccagccggttttgctccagcccgaccgccacacggcgcggattcgacatcatcgagtgatccaccagcgcctggatttccaccagcagcggacgtgtgccttcccagaccaccatcaccgaactgccggacgtaatttcatccccgcggctcaggaaaatagcggacgggttgctcacctcgcgcagcccctgctccgtcatggcaaacacgcccagctcattcaccgcaccaaagcggtttttatggctgcgcagtgtgcggaaacgggagtcggcctcgccgtcgagcatgaccgaacagtcaatacagtgctcgagtaccttcggccctgccagagagccgtctttggtgacgtgaccgaccataatgatcgccacaccccgggttttggcaaagcgggtcagataggcggcggtttcacgcacctgtgccacactgcccggcgaagactgaatatccgccatgtgcatcacctggatggagtcaatcaccatcagcttcggctgttcctgctctgcgatcaggcaaatctgctcaatcgccgtttccgacagcatattgagattatccatcggcagcccgaggcggggtgcccgcatcgccccctgctgtaatgattcctcccccntgtgcccgcatcgccacctgctgtaatgattcctcccccgtgacgtacagggttttcatctgtgcggcgagctggcacatggtctgtaacagcagggtacttttcccggcgcccgggttaccgccgatcagaatggcactgcccggcaccacgccgccgcccagcacacggtcaaattctttgaaaccggtggagaaacgcggcagttcctcaagactgatttccgacagcttctgtactttgctgacaccgctctgccccgcatagccgctgaggcgatcattgcgtgccgcagacgatgagacagaagccagccggacttccgtgatggtattccacgcctgacacgcggtgcactgcccctgccagcggggataatccgccccgcactcgttacagacaaaggcgcgttttgctggttttgccactcgtgaccccgtaataactgataaattaacgttcttcgtgtttcagaccaccgctgagggtgcacatcacccccatcaggtcggcatggcggatagccacttttgcccgcgcatacactttcggtttggcgtggaaggcgataccgagaccggcttttttcagcattttcaggtcattggcaccatcaccgatcgccacagtctgctctataggaatattgagaaattccgccagtttcaccagcgcctgcgctttgtatttggcatccaccaccggacctttgactttgccggtcagtttgccgtctttgatttccagctgattggcatagacggcgatcaggcgcagagaatcttttaaatgattggcgtagaaagtaaatccgccggaggcaatcgcgacatgccagtccatcgcctggagtttacgtaccaggctggtcagccccggcatcagcggcagcgtatccagcacctgctgtaaaatggcggcatccgccccggccagcaggccgacacgcgctttcaggctttcgctgaaatccagctcgccctgcatcgctctttctgtcacctccgcgacttcatcaccgacaccggctaatctggcgatttcatcgatacattcgatttggatagcagtggaatccatatccatcatcaataatccgggggagcgcagtttcgggatattacccagcggcacgacatccatctgaaactcatccgccacccgtttgatgcgcccggtcaggctgcccgcgatccgcaccacctgataatcatcgatccgccatgacgagaccaccacaattgccgcacccagccggtgctggaaatcactgatccgcgccttatccagcccgcgcccgtacagcagccagccgctgtcacccgcccggtagtccagcggcatcacttcatcaccgctcagggaaagaggaaggcccggccacttatggatttcattcggcaaataacagtaggtcagactcgtcgacatcaacagatactcctataatccctgataatattcatgatggtagcagataaaaatttccgcttctggcaatatggtggcgacaacggaaaaacggataaacaatggccaaaacgaagttaacattccggctgcataaaacagccattattctgatttgtctcgccctgatggtgtgtctgttacagggtgtgtcttatttcagccgcgtccaccagcagtcgtcaatggatcagtttaatgaactggcctattcgctggcacaacaggtggcgtttaacctttccgatgctatagacgataacgggaaagtgctcaataagaaacaaattacggcaaatttagcgcagctgaccaccaacagccgtattctcgatgccacagtatatcaggatgacggggtacagatagccggcagcggcgagagtatcactgtccgcgaccgcctggcgctggacgggcaaaaagccggcagttattttaatcatcagattgtcgccgccatccccggaaaaaaaggcccgaaaggctttctgcgcctgaccatcgatacccaccgtctggccacagaatccacccaggtggataacaccaccaacctgctgcgggtgatgttacttctcgccctcggtatcggctttgtgctcgccaacaatctgctgcagctgaccccgagccgctggcagcaatccctgtatctgctgaccgccaatctgaaaaatgaagatgagaagccggggaagaaaacagaagagaaagaaaaaggggaataatttccccttttttaccggtgttgcaacacctgccaggtcagcaggccgagccaggtcatcagcagggagctgagtacatgcagggcgatttctgccataccgtggtggatgcgcccggcctggaaagcctgcacaatctcgagtgagaaagtcgagaatgtcgataacgcgccgcagaacccggtgacaataaacagccgccattctgccgggagtgtcgggtgagaggagaaaaacgccaccgccagcccgataatataaccggcaataatattggcgagatacgtccccagcggcatcattgccagcaccgggttgaatttattactcaacacccagcggccgaggccaccgagcactgatcctgcggaaatgctgaggatcacatttaacatagaaaaaccttacgtcatttttgtttcaatgtttctgtgtttatgcgcatttctttaaaatgtcaatctgaaccagtccgcacacttcatccagcagcttgatcacttccacactcatcccgaccatcatggcatccgccgaattactttccggctgtgcattgatcttctgatgcagttcatgtgtgctggcacgcagtgcctggagtttatccatggtgtcatcgtctttcccctgcacaaagatatcagagagcagtttcatgatttcactgttgcttttctgcaactgcacaatgtagggattttcggtgttcagcgcatgagcgaagtagtttttactgaaggtatcggtcagcagttccagtatcgccaccagccgccggatgcgcccgtgaatggccgtaaaagtggcagccggaacatgagtttctttgactgccggtgcaatgtaggtattgcaggtcagcagtgtggataacgtatctttcagctgattatcccaccgctccgggtcggtactgctcagtttcatgatgtgctcatcatataatctggcaatatcgcgcagaatagtgctgatattcatccgccagaacacaaaccctttcagcggcaggatcgccgagaacaccagtgccagaatcgagccgcccaccgtctgcgccgaacggataagcgcagagtccatatccccgaccggtgcggtggcaacaatactgatggtcatcccgatcagcattccgacatacatgtttttacccagcgcgatcaggccgcagacaaacatcgcaattgtcgccagtgccagcatcagcgggaaagagtgggtttccgtgtacagcagcagcatccctatcagcgagccgataacggtgccgagggtgcgctgcatcgagcggatcagcacatttccccagtacggcatcggcatcaggatagagataagtgtcataatgatataatcgagcttatcgctgtgtaattcccggaacaccagaaacgtcagtgtaaacgccagcgcaatgcggatgccgtgcagctgtttaaaccgggaatagaagaatgactgagcccgggagatcccgtggctcagatttatttttttttctttatgcttcacaaccggccctgcttatggcgctttggctaataagatgtcagccataacgctgttattgatgttctcgccgcacagcattttcatcagcacttcactgccgagctgtgacagggagaaggtcatatccgcatgcagcaggcgcattttgtcgctgttctcttcctgattcaccacagtcacggttttcaccccttcaccggccagctgtttcaccgccagcagcgcaaaggtgttatccgcatcattatcactgatggccatcacacagcgggcatctctgacattggcttcattcagggtcacggcatccgcactgtcaccggccacggtcacggtaccgtcagggaagtgctttttgtcctcatcagaacagatcaccaccacctgcaaaccgcgttttttcagtcctttatagatattgaccgccagcggattcgcgccgataacaacataatgctctttcatgtgtaacaacctctttttgacaatctcgcgtgtgccgcgcaggacgacacccacaatgtacacaatggatgtggtgaaaatcgtgataccgaacaccaccaccgtcagggtaaacatccgcgcttccacgctgatcgggatgatgtccccgaagccgaccgtggtcatacagaccagggcaaagtagaaggccgctgagatatccgtgacatgcggctggaactcattaccgagatacagggtgccgaagacggaatagaccaccagcaggataatactgctgaccgccaccacgccggcactggtcaggctgtgatgcgggaactgccgccacaggcagccggacgcaatcagcagcgccagcgagaacagtccctgcagtgagtattcccgggccagccccagatccatcagtaccatggtaagcaggataaacagggagaacagccaggcgatgcgtgcgccggtcagcatcagcagcgccagcagtgccagcagtaaccccagcataaagcggggaatatccagcagttttataaacccgagcgactgtaaccacgcggtgaaaccgccgtcctgccaggcaatatccccggtataggaaaacagcaccggcgacaggatcatcaccccgtcaataaacagcagcaccgacaggatcacccgcagactcagtaatttatgtaaccctgtcttcagtagattactctgcatatttctccccttttactgacggtgttccggcatgatgtcctgattcggcaccaggaacagccaggaggccagaacgaacggcatggtcagtgtcggaataccgaacggcgagaccaccacatccagcgcgccctggacaaacaccgtaaaaatcacacccactacggtatacaccagcactttgaagctcggtttattaaatgtggaacccagcgcgatcgcagttaacacggcgctgaatgaatacagcccggtatgcacactaccgaagtctgctttcaggaaagatgccacaccaaaagccagcagtgagccaaagaccgcaaagaccgccgcccacacagaactgactgccagaccgatcacaaacaggatccccacggtaatgctgctcagcagaaagacctctgacacaccacgaaaaatatccgggatcagatcggaatacgggatcccggcgatcggtgccacatactgatccggcagtgccggccccggcagactgacgcctttgataccgaagaaactgtaactggccagcaggatagtccaggtcaccagcacgaaaggcgcggtcagcgcagcaactttccagtttttcaggaaatcggtcagtgagatggtggcgatcaccgccacgatactgccgagcacaatggccgcccacataaacggtgtgttatccaggaaggtcggcaacgccacaccgaccaggcagccgttatagccgtacagcccggcacgcagtgaagtgacatccattttgctgacatacgccgtcagcgtggacaccacggtaccgagcagacagccccagccgaccgccggaatgccttcactgtatgcaccgataaaaatagcggcgaaaaagaacagcccggtcagcgggttgttctgaaacatcacctgcgcacaaccacgcagcgtgatatcaataaaatgtatgacaggattggatccggccagtttattccagccgttctgactgactgttgaagttgccatcgtctttcccctgaaggtaaaccggacaaagggactgattatgctgataataaccagtcccctgagtaaccaccggtgtcatcctgcagcgcatcagcgccacaggaacggtttctgcaatgtgatgccgaggatctcttcccgggcgatttgccagaaataacggacagcctctttggttttcgggctgtcgattcccagcactttgaagaccagaccgcactcgttcggcaactgcgtcgccccgaatgcaacctcttcatccgtgtcataacgggcttccagacgctccaggatacgggcatgatgctctttcggtgtcagtaaaatcacgttaccgaaaacatcaaaaccccccatcacgccgaccacattcagtgcttcttttttcggttccagaatgtatttttcaacaaataattcttttccctcattgtcctgcgcccggatctttgaggaaaaaatatcaaacccgaactgttcgtccggatggtgatatttccgccccgacatcaggatctcggagtagatcacggttgctgtcggatcaaccgtgatctgtgtgtccgttaaaaaacgggcattacggtgcgggataatcggatccggcataaactccagataaccaccggcttccaccaccacattctggtactgcgtggcgtagttcgcctccatcatgtgaattttggtggcggactgtgtggtgacatgggcgcacgccccctcttccacaatcagatccagcgcctggcggtcgccctgtaacaggcagccggaggtggaaatcatagtgacacacggcatctgcggcatcatttcatcccagtacagcgcacgctgcaccagagaaggcacacggcgctccatttccaccatttcactgcggtattcccgtttggcaaaccgcagtttcagatagccgcttttcccgatggcaccactttgcatctgctttggctcatcctggtaaggcgccatttccggcgccttttcccctaagagatgagcccggagacgtgtcggcgtccccgcgatctcagccctcagttgtgtcatgcttttgctcccgcctggtgggtgaacaggaatttatccatgatcatatccaccagttccaccacgccttcgccggttttgcagttggtcatgacatacggacggttgccgcgcaccactttggtgtcactttccatcacttccaggctggcaccgacgtacggtgcgaggtcgattttattgatgaccaggatatccgcctgcaccaggcccgggccgtttttacgcgggattttttccccttccgccacatcgataacatagatgtagaagtcggcgagtgccgggctgaaggtcagcgtcaggttatcgccgccgctttcaatcatgatgacgtcgctgtccgggaaacgctcttccatatcttccacggctgcaatgttcatactcggatcttcgcgtacagcagtgtgcgggcaggcaccggtttcaacgccgagaattttctcttcgtcgaggatccctttcagggtgcgtttgacctgcttcgcatcttcggtggtcacgatgtcattggtgatgattaacggcttgatcccgcgttcgatcaggatcggggtgatcacttcaataatcgccgttttacctgagccaacagggccgccgatgccgatccgtgtcatttttttcatcaatatactcccggaaaataagtcagccgcctgtcagttcataaacaggcggacaaaagatttggtatgaactgccgcaaggacgtcgatcaccggcacataggaagacatctgttcaatgtcgccgcaggctgcaatatcgcagaaggtttcaatgtcgttgttcagctcaaataaaatgtgctgtgtttcaaagtgcgtgatccgcatcaggcgcatggcggcgctgaggatcgtcattgcgatcccgtactgatgcataaccaccacttcgcgttcgccgataccctgtaccgccatcacaatagcctgagtgacaggctgggtgcccggggtgtccccgcttttaatctgtgccagccaccatgccacgagcggatcgtcaaaaatatggacagaaatttccgccagttttttccccatccgcgtcgccatcaggcgggcttcttcattcagtttgcggttattcaccgcccggtcgacccgcagaatggcatcgttatcaccggcaagcactgcgcggtgtgccgcgacaacggcaataccgtcaccgctcgccgcctgtttcagcgcggtgcggacaaagcctttcagggtttcggcatcatgtaccacgcccgtctggatcgccgattccacaccgtttgagaaagtaaaggcgccgacgggaagtgccgaatcaccaaactgcatgatccggataagatcagccgctttcatcacacgttctcccgttccggtctgtcagtgtttgtggtcatggtcgtgatcgtggtgatgatcatgactgtgtccgtggtcgtgactgtggtcatgatcatggctgtgcccgtgatcgtggccgtgtgaatgtgagtgcccgtggttatgtgccacatgcacgtgagtatcggtctcttccgcgccgccgaacagcagacgggattctgagttggtcaggatcggcagaatggtttcacctttgacgaaggcaaacgtatcattgccgaagccgtgggtgcgcatcaccgattccatcactttttcactgacggtcagcgggacatacactttgttttctttgataacggctttccagtgctggttaccgagcgcatggcccagttcaaaactgatgcggatctgctcttccggcgtgctgccctgaagacgtttaagatcaacaaccatgacatcacgcagatcgatctggacaacaaccatggtattagtggtgtcatcggtatggatcacatctccgtcagacaacagcacgttgcgatccagcgcgatcccgatatccagcccgttttgggtgtgtttacggcagcggcttttctgggcttcacgctgatcgaggatcagcatatccaccgtcatttcgttcgctttatcagcccacgcctgatcttttctgacgttgccgagaatgtgctcaatgaggatcatggaattacctttttgttatgcccggcgggctgaacagcacccgccggggaagtcaatcaaccgaagaaataacgctggttcatcgccgccaccgagattggctggcaggtcgcgtgttccccgttaactttcaccgcgaaggtttccggatccacttcgatatccggggtttcgccgttacggaccaggtcgcgtttggtggtggtgcgcatgccctgaaccgcgacaacttcacgctccagaccggctttctctttcacaccatcttccagtgctgcctgggaaacgaaagtcacacaggtatcctgcagggttttacccatcgcaccaaacatcggacgatagaagaccggctgcggagtcggcagggaggcgttagggtcacccatcgctgcccagttgatcatgccccctttgataaccagttttggtttcgcgccgaagaaacgcggatcccacaggaccaggtccgccattttgccgacttcgactgagccgagcacatggctgataccctgggcaatcgccgggttgatggtgatttttgccacgtaacgcagaacacggaagttatcgttacccgccgcatcttccggcagcttgccgcgcgccgctttcatggcgttagcagtctggatcacacgcagccagttctcaccgacacggcccatcgcctgggagtcactggagaacatggagattgcacccatatcatgcagcacgttttccgctgcgatggtttccggacgcacgcggctttccgcgaaggaaacgtcagccgggacattcgggttcaggttgtgacacaccatgatcatgtcgaacagttctgcctggctgttaataccgtacggcagtgtcgggttagtggagctcggcagcacgttcggctggctgaccactttgatgatgtccggcgcgtgaccaccgcccgcaccttcggtgtggtaagtgtggatagtacggccttcaaaggcttcgatggtatcttccacataaccgccttcgttaaggctgtcggtatggacagaaacctggatatcataatcatccgccacacgcagtgcatgacgcagggcgttggaggttgcaccccagtcttcgtgaactttcagaccggcaacaccggcaatgatctgttcaaccagcggatcgcgggcaaaagagttacctttaccgagcataccgacgttaaccggtaaaccttccagtgaacgcagcatcgcgcggatgttccacggaccggcggtaacggttgtcccgttggtgccgtctgtcggcccgataccgccgccgaagaaggtggtgacaccgttggacagcgccgcataagcctgctgtggtgagatcaggtgattgtgggtatcgatccccgccgctgtcaggatcagatgctcaccggagatagcatcggtggccacaccggcaaccattcccggggtgataccgtcctgcaggttcgggttaccgctcttgccgataccgacaattttgccgtccttcacgcccacgtccgctttgatgacgcctaatttggcatccaggatagtgacgttggtgataaccaggtcgagcacgccattgtcgctggtcagcgtgttattcgcgcccatcccgtcacggagggatttcccgccgccgtaaacagattcttcgccgtaaccgcgtaagtctttttcaatttcgatatagagatcggtatcaccgagacggattttgtctccggtggtcggcccgaacaggccgcaatattcttgtctggaaatctgtggcataacgtgttccttatttcgttcaggatgcctgtgcatcactgccggaaaatcgtgtcaggacggagaattacttcttcgcttctgctttatggctgaaaccgcgggcaattgcctcgttcagggcaatcgcttttgccggacgttcgctggtggccacattattaccggcccagccgtccaccaggttgttaaacccgtaaactgtctgtttgccgccgtaaggaataagagaaacttcggtttcatcacccggctcaaaacggattgcggtggtggatgaaatattcaggcgtttgccgtaagccgcttcgcgatcaaattccagggcatggttcacttcaaagaagtgaaaatgcgaaccgacctgaatcgggcgatccccggtgttacggactttaattttggtttccggcttaccggtattaaattcaatcggagtatccgcaaaaatgactccgcctaacggcgtgggttgttttgtattactcataatcagaacctcacctttttgctgtacgtttatttgattgggttatgaaccgtcaccagacggctgccgtctgtgaaaatcgcctcaacctgcacattcgggattaaatcatccaccccttccatcacgtcggctttggtcagtacggtggcagcttctttcatcacatcttccactgttttgccgtcacgggcgccttccagtgctgtcacggtaataatcgcgaccgcttccgggtaattcagttttacccctctgtcgcgacgtcgctgcgcgacatccgccagggtatataccatcagcttttcaacttctctcggggttaattgcataacgcctccacaattgaatgaaaacagagtcatcagacagcaatccggatatcagtattccgggataccgtgatttcagtttttatttcagtgacacatccgctgaatgcagacacaatccgccactgaccgccggacatgcgcaggcgcacacccggaaatactaaagcgtgaaaaatgtaagctgttaatcagccataaaaaaataaatcatgcaccgctgttctcctgataagaaaacgaggttcagatccctttcagactatgcggagtttccgttaccgcatataaatgaattaatatccgctactgtgtttaaatataaaataaataaccctgctgattttcagcaaataaataaaaaatactcatatacggacgaattaaagcggattatcacctgtattcatccgtcattcttattaccgcctcacccgccccgccagaaaacggtgctccggcagtgcatcccacagtgactgcagccacgggctgccttccccgttcagtaatgcctgcgatgtcagtgtttcctgtaaaactccgtgacgcagtacggcaatccggtcagcaaagcgggcggccatcgccagatcatgcgtgacccacaacacgccgcgcccatccgcacacagcactttcaggtgcgcgagtatctgccccgcatgttcatcatccagccaggacgtaatttcatccgccagaatatactgcgccccggtcagcgttgcgccgcaggtcagcacccgttttgccatcccgccggagagccggttcggaaacgcatccgtcagctcaggccggaggttataacgttgcagctggcgcgccacgtcgtgcatcttcacatgcataccgctgagtgtggccgcacgttccagctgcggaccaacccgcaccagcggattaagtgcactcaccccctgcggcacgtaacacagggtattgccgcggtgcagctgtttgctctcttccgtcagggtttcccccgccagcgagatagcgccacggcagcgcatattatccggcagaagccccagtgcactttgcagcagcaggcttttgccttctccgctgctgccgaccagcgccaccagctcaccgggctgaaccgccagggagatatctgtcagcagcggctgccagcgttttttccgcagccagctgaactgcgcgacatcaatagcaagccggtcaaatttcagcattatgcgatcctcagccagagctgttgtaaggctttcgcaaactgatcaaacagtaacaccagtccgaccagcaccagccccgggaaaaatgccagccaccaggcaccggtactgagatagcgcagtgcatctgacagcaggatccccagtgatgcctcatgcggcgcaagcccgaagcccagaaaactgagcgccgcactgtgcagtaccgaatgcggaaacatcagcagtgtgccgacaatccactgcggtaataacattggcagataatgatgacgccagcaatacaatcgcgaatttcccatgcgctgcgccagcatcacataatccgtttcccgcacccgcaggatttccgagcgcaggatcagcgtcagtttcggccagtgtgtcagggctatcgcccagatcacgccggattttccgccgcccagggtgaaacagattaaaatcagcagcagcaggtgcggcagtgccagcagtgcatcaatcaccccgcgcaccagataatctgttcctttgttaattgttgataacccggccatcgtcagcgccaccagcccgctggtcagggcggaaatcagtccgatctgcagactggttgccatgccctgaaaggtgcgatcccacagatctcgccccaggctgtcagtaccgaaccagtgcgtgacagacggtgcctgccgccgcgccaggaaatccatatcaatatcagtgtgtgtgatccagatggcatagacgcccagcaggatcagcatcagtaatgtgcccgtcagttttaacagcgcgcggttcgggttatgcgtcatgattcgcggatcactccctgattcacgcggcgcagtaaaatatccgccgtgctgttaccgataaaaatcaggatcgcgcaaaacatcacaatacccatcagcagcgggatatccccccgcagccccgcatctatcgtcgcctgtcccagtccgggataggcgaacactttctccgccagcagtgaaccgctcagcagttcccccacagaggcaaactgtaaacagagtgccggggtaatggcgtgacgcagcacatgaaatttaatcatcggccagcctttatccccctgcgctttcgcataacggataaattcgctccccatcacttccgccacttttgcccgtgtgtgcagggcaatgttaccgacaccgagtaagcccagcgccagcaccggcagaatcaggtgatgaattttctgcccgaaggttgctgtatccgcatcctcgcccatcggccaggcacagcagattggtgcccagttcagggtgactgcaaacagcgacaacagcagcaaccctatccagaatgtcggtatcgaagccagcagatacgacagtgccgaaataattttgtccggccagcggttcagataacgtccggccaccagccccagcagcagcccggcaatgcccgaaagcagccaggcgctgataaggagtgccagtgacggcccgagtcgcgccgaaatcacctctgacaccggcgcgttatacagcatggagtaaccgagatcgccccgcagcatctgcgagaaccagatccagaaccgctgccacaggggctgatccagcccccagcgggcagcgattgccggatattgctccggcggcacatgcagcagatcatttccgatataggctctgatcgggtcaattggcgaataactgaggaggataaacacccccgccgccgtaaccgtcagcagacaaacaaaccgcacgaaaaggaacagggcactgcgcattatttacaagtccaggcccagtcatccacgctgttgagcagtgaccatgatccgtggatctccggtgcacccttgcccaaatcaacacaatcactcaccacataggtatgctgcacattcagcagccacgcccaggcggcatcccctttaatcccggtaccggttttgccgttccagtccacctgctgccagacaggaatggcggcttcctggtccggtgcactcatagctttttcaaggatggcatccacctgcggatttttgtaatagcccgggttgtagaattccacgcccgctgctttgctgctgtagtgatggactaactccatcggatccaggctgccccagccgaacagggtcgggttggcgtgcatatggcgttcgacggtttcccaactgccggactgtaaatccagttcaataccgattggtttcaggaaggcgcggatagcctgtgccaggtcacggcggggagtgtcccccctggggtaccacagcgtcagtttggcgactttaccgtctttctcacgcagcccgtctttattgagtttccagcctgcttcttccaggatctgttttgctttttccgcatcaccatctttaaaggcagcttccgggttgttccacggcaggccgtgaacaccggtaaaggccggtacggcgtacccttccatcacctgctcagacagcagtttgcggtcaatcgcatagttgatggctttacggatggcaacatcagaggtgatatcgttaccgatcgggtaaccctgtgcatctttttcaccggctttcgggatagggaagacaataccgcggttttccacgctggcacgctccaccagtttcatccctttgacatcaccggcggtcgcggcaatcaccggcggaatgcggacaacctcgagctggcggctctgtgcggcagcaaaggcggcatcctcatccaggaagacaaacaccagcttgttaaagtcatttttcggccccgcgtagtatgggttagcctcaacaatcagctgctggcccggctggaaagccaccaggcggtacggcccggcacccaccggtttttgggcatattctctggcatcatatttatcggcggacacaatgccgagagagccgagcacgttgataaacgtactctgaggttcggacagggtgattttcactgtcagcgggtcaatttcttccgctttggcaaagttacccatatcgattttgccgccgccggcggccgcattgttataggtgaacgccacatctttggcggtcagcggagagccgtcagagaatttcaggtcttttttcagcttcagtgtccactctttgccatcggcattgtggtcgtagctgtccagcagatagctgtgccaggaaagatcggccttttgtttgagcagcgggctgtgcagtaacagataactgccgtggctccagccgagcatcgggtcaaacccttctgtcggttctgcgccgatggccagccgcaatgtatgaccggtattttctgccgcagccagcgctgaagcactgattgctgtacctaacagcagagagacgagtgttcttgcaaaaactgactttttagtcattacttgtccttacctaactaaaattgacaatgtttaattttgagttaatccggcgttacgcaaaatcacctataaaaaattaatctaccaaagaaaacagagtttataccactaaaatcacgtccgaaaatgatgcatattaatgaatcgtggtaaaaatcggatttctcatatattaaattcttttattcaatactgctgctgaataataacatcattacatatttctctgataatttcagaatgaaatattttgtaacaacctacccgtaaacagactaaaaatgattatttgccaaggcattatgatgtttacacacgggctcgcaggcgatgttatcagcataacagtcacacatttcttaacagcttaacatactctttttgattataacggttgaattctctttagtattattaattaataaaattaactattttctttctgaaaatataattatgacacgtcaccacaggattttatccaggtctgagcccgctttactgcgcctgttgcaatatgagtaactgaaactcattcagataaattaagaaaacccacagaaaaaccgaaatattaagcagggaaaagataacaggggaaacaaaagtgcggaaaatacagacaattcctggtaataaaaacgtaacttcgggaattgtctgctggttacaggtaaaaaccgatgggagtgactatctcaatatggccgtttctgccgcgttcctgtggcggcagcgggaaaggtgatgcccgctgcacggtagcaagtgcttctttatcgagcagttttgtgccggatgaattaaccagctccgcagagacaacatttccctgcatgttcagagtcactttcacatgagagacgccggtggatttatagcgcagcagtgcgcgcggatagcgtttgtatttcgccagatgcgaatgtaccgagctttcccagccggtactgccgctgaccggctgtggtgcatggctggtaaaatccgcacggcttgcggaactgtcgccctgacgtggcgcggaagtactttctgccagtaccggggacggattatctgtttccggcattttgatctccgttaccggttttttgtctgcttttttctttggtttctcggctttccgcgtccaggtgccctgatcagaaaccgccagtttatcgacagcagattcccgctccggctcagccaccggctgtggtgccggttgtgacatcacctgtctgacaccttccgccttttccggcggtgcactttccaactgataaactcccggcatcagcacaaatgccggcggcagcatgcctttcggctcgtccgctgaaaaacccagccagcccagaaacagtgccagcagcagcacatgagcccccacactggcagcagtgccgccgactgaatatcgcctgttctgataacaggccgcagccacattcaacattactcaactcacttttttaatcgttattcacgtatttcaatttgtaaaattacaggcataatgataacgcaaatgatattgctttttattattaaataataattcaaataacaacaatgagattttttggatttttctaagcaatgcgtaatgactccttcaattacgatgacttcgatacacaccagaaaaatgacgactgaaaaatcggtaagcaggcttatcgccggggcttatcactcaacctaccatcagcttgtccgcttcttccataagcggctgggcaacagtcaggatgcacgggacttgtcgcaggatgtgtttgcccgctggctcaaaggcggcaacgaaacatctgtgcaggaaacccgcgcgttcctgtttaagatcgccaacaatgtgctgaccgaccactggcgtcacagccggcggaagggccgcgaccgggtcagtgagtgggatgactcactgacagaggaagtggcacaggcacacgccgatcctcaggtacagctcgaacaccggcagcggctggaccggctgtatcaggtgctgaatgaactgccgccccgtcagcgggaagcctttgtgctttaccggtttgacggactttcgcaaagtgacattgccgaacggatggatatttctgtcagtatggtggaaaagcatatcgcccgcgccctgctgcaatgtaaacgcgccatgaatgccgcagaacagaaggacggggaatgacagaccggcgggagcaggacgaacgggaagacgccgccgcattgtggtttacgcgctggcacagccagagcatgacggcacagcagcagcgggaattacagacatggctggcggcttccccggaaaaccggcaggcgtttgatgatatggcgctgctgtggcgggagatgtcagccctgccgcgcccggacattgcagagcaggcacccgcccgggcttttccgcttctgcgcccgctgcgccataccctcgccggactgtttatcctggtgatgctgtttctgccctacagccagttacccgccctgctgatggataacctgacgctcgccacagccgcagaaagcaaatccatgatcctgccggacggcagccgtatttttctcagccgtgacagtgaagcggatattgcctatgaacagacacaccgccgtatttccctggtgcgcggtaccgtcttttttcaggtgaaatccaacccgtggcggccgtttgttatccgtgcggacggcagagagataaccgttgtcggcacggaatttgatgtcagccgccggggaacggaagtggcggtctctgtggcaaacggaattgtcgccctgcgggatgcgccggatgaaaaaccggtgtatctgcgcgccggagataaagccgtcagccccgcgcagggcgctgcactgctgctcagccatatcccgccggaacaggccggggagtggcgcaacggacaaatcaccctcaccgataccccgctgcgtgatgttgttgcccgccttacaccttacagtaaccaccccgtctcacttgccgccaatgcggcggatctgaccgtctccggccgggtcactctttccgaaactgatgcctttttcaccgcactgccgctgctgttaccggttgaagttacagaactgcatgacggcagcctgttgattgtgaagaaaaataaaaataaatgaaaaaaagaataattatcaggtgaggataattctcatttccgcgtcttctgatacaggggataactatgacacttccggaaatgataaaaatgacaataaaaccatcaccattcagcatcagggcggccggttctgccattgtgctggcactcgggctgacagcggcaccggcaggggccgcagatctcacgcttgatctgccggaacaggcactgagccgttcactgaacaccatcgcacagcagggacaaatccagttactgtatgatgccggacaactcggctcactgcgggcaccggctctgcacggcagctattccgcacagaccgccatccagacactgctggcaggctccggcctgacactggtgcagcagggcagcagctatgttatccgcccgctgacaaccgaagcggaaaccattttaatcccggaaacccgggttcagggcgaactggcttaccatccggccacggatgtcatgtctgccccgcaatacattactgcggaggagatccgccagcgcaataccggtgacggcaacgtcacggaactgctgcgcaccaacccggcggtgcagtttgccggtaatgacagctcgtccctcaaccagggcgaaatcaaaccgtcgcggatttccattcacggcgcatccagtttccagaacgcctataaactcgacggcatcagttttaacaacgatttcgacccggcaaaagataccctgggcgaaacctccacccgtctggacagcggcgaccagggaatgtacatcgacagccgtctgatcgacagcgtgacggtttacgataacaacatcccggtggaattcggcggctttaccggcggcagtgtggatgtcaccagccgccgctggaacggcgaaaacagcggccatatgtattaccgcaccacccgctcctcctggaatcatctgtttgaggattcctcacagccgattgattcatcaaaaaatgatatcagccatccggcacgtttccagaatgaatataacaaacacgatttcggcggctggtttgaagtcggtgtaacagaaaacagcggcctgacggtatccgcctcccgccgtacctccactatcccgnnncccgccccccgccgtacctccactatcccggccaatacctcggtactgatggcagtgatggaaggtgaagaactggtcggttatgagtttgataagcgcaaacgcaaccagaaacgtacctcagacaacctgtttgtgaagtatgcaatggatctctcgccggtcaccacggcggatatttccctgaattactccgattataaggcgcgtttattcgcctccaatattgccaactccggttatgacaataatcacaaagggttaggtgtgaccggtgttctgaaacaccagaccagcctggctgatctggaattcaccctgggttatcagaaactgaaagataaccgcgtgaatgacgagcagaatttctatgaaatgaagaaccggtcaccggacggaaaaacgattgttaacaccaaaatgggcggactgggtgatctgaagaccgagcaggacaatgtcaccaccaaagccgttgcccgtttcctgccgtcagaagggttcgggataacacaccgcccgacactcgggatggaatccacccataccaaaggccgctatatccgcgataagtcgcactatcacaccagcgaggactatgtcagctatgcggaatgggggtttgaggatccggtagtcaacaagcaccgcttcctgccgggaaccgcctctgtcagttataacaactactccctgtttgccgatgacaatattgagattggccgcctgacactgcgtccgggtgtccgtgtggaccgggatgattttgtccggcaaaccaatatcgcgccgcgcctggccgcgacttacgacctgttcggcaataaagaaacattgctgatcgccggtgccaaccgctattacggccgttccatgctgacttatgccctgtacggcgcgcagaatgccgggctggaaaaatgctatatgtgcggctttatgggcatggatccgacctgggataaaaccaatgattatgaaggtctggattcactgaaaaccccgtataacgatgagatttctctcggcctgcaacaggaaatcctcagcaccacctggcgcctgacttatgtgcaccgcgaaggttacgatgaagtccgcagccgcaccaaatacaacaacctgaccgggtcagataaatactccgataaaggaaaaatccgtacctttgataatgccggacgcagcaagcatgactccgtcaccctggccgtcagtaacagccagccgtgggaatggggacaggcaacccatgtctttacctcttcaatcgtctggcaggataccaaaactaacttcccgtctgaccagggctatgccttctttgagccgggtactgccattaactccgacaaagtgatgtacggcggtaaagtgatcgatgtcagtgatctgcctgccagtaactttaactcgccgctgaagctgaacgttgagctgaccagtgactgggataactacaacatttcctggtacaaccgcctgcaatggtggggcgcgcgtaatcaggctgtccgtcatgacaacgaagtagtccgtgatccgcagtacggcgagttacgtgtctatcagaaagagcatttcgcatccaaattcacctgggatacccgcgtgaactggaaaccggagtttgcttacggtgcgtctgtctcgctggaagtgaataacgtcctgaataacaaaaatgtcgcggatacctttatctacgccggtaacaaggtgattgcctatgatccgggccgtcagttctggttacagctgaattacgatttttaatctgagcatgtgagcaatgtctcttaacgttatgaataatcaatgaaaacaataaaacaatttttctggctggtgaagccgttctgggggcggcgtgccgccctgttttgctggttcttactgttgttgtctctcgggctgacactctcttccgtctggttcaatatccgcatgaaccagtggaacggggatttttataatgcactgcaaaaactggacggcgcggcactgtatcagctgatcaaatttttcgtcgtcctggtcagcggactgattctggtggtggtgctcggcacgtatttccggcagaaactggctatctgctggcgggaggggatgacagaacagatcctcagccgctggctgtcgccgcagagccgccattacctgctgcgcctgaccgcccgcgagccggataacccggatcagcggattgccgaagatgtccgcctgctggtggaatccactctcagcctgctgatcaccttcctgcattcgctgctgaccctgatttcctttgccgccatcctctggcagctttccggcagtattctgctttctatcgccggtactgactggcgcatcgacggctatatgttctgggcctgtatcgcctacaccctcgtgggtatcgcactgacacagcttatcggcggaccgctgcgcaaactgaatatggaaaaacagcagcgtgaggcggattaccgtgcggcactgatcacccgcagacagcacggtgatgccattgccggacagcggggggagttgcaggataaacagcagttactggcccgtttttcccgggtggcggccaactggaatcagctgatccgctgcgagcggaatttatccttttataccgtgggttatcagcaggtgaccgcgctggcgccgatcctgtttgcactgccgaaattcctcgccggggaactgatgctgggcggattaatgcagctgcgtcaggccttcagcagtgtcgcgacgtcactcggctggtttatttttgcctataaagagatagcggcctggcaggcgacggtaacccgcctgtaccatttcgtccgtctgctggaaaatgacgcggtgtctgatgtcaccgaaacccgtcagtcggcagtgcgcctggatgtttgcgccgatattctgctgccggataatcgtccgctgctggagaatgtctcactctctctgcacgccggggaatttgccattatcagcggccgctccggactgggtaaatcgaccctgctgcgcgcgctcagcggccactggccttattaccggggcaatatcagccgtgaacaggatgtgatgtgggtgccgcagtcactttatctgccgtccgggacactgaaatccctgctcgcctatccgcatgccgccgcacagttcacgccgcaagcttaccgcgaagtgctggacgccaccgggcttgccgcactgacaccacaactggataccgatgccgactggtgtcagcgcctgtccggcggtgaacagcagcggttgctgatcgcccgtctgctgctcagccagccaaagctgatgctgctcgatgaaattacctccgcactggatgatgacaatgcgatccgcatgatccgtctgctccgtcagcgtctgccggacagcacgcttctgctggtcagccaccagcgctttcttcagcaggaggcagatcgcgtgatcgccctgtccgcccctgccgccacctgcacatcaggagtccgatatgcattataaactgacctttgccggtgtggtgctgatcctcaccggctgtaccgctgtcagcacaaccggtacagataaccgtccgctgccgcagcgcagtgatttacagcacatccgcctggcaaacggcatgaatgtgtatcttctgtcacgcccgcaacccggcgcagagctgcggctgctggtggaaagcggttcattacaggaaactgaagaacagcgcggtctcgcgcatttcaccgaacatatggcctttaaaggcaccacgcatttcccggatacacagagttttaaacaactggaaaaacagggactgaatctcggcagccatgtgaatgccgccaccagcctcaattccactgtctataaactgtcactgccgcaggccaccccggaacagattcagaccggtttgcaggtgctcgccgactgggcacagggcatgacctttgaccttgttgcatttgataaagaacgttccgtgattattgaggagtggcggctgcgtcagggcatcgggtttcgcatcaataatgcccttgagcaactgcgttatgcgggcagtctctacgcagaacgtgacccgatcgggttactggatgtgatccgccatgcgccggtcagcacagcaaaagactattatcagacctggtatcagccgcagcggatgagtctggtggttatcggacagtttaaccgccacgacgtcagcaatctggctgaggcgtattttaatcagcccgccaaaaaagatgccgcacaggatgatccggcccgtcagcgctttgccccgcagccgggactgctggtaaaacctgttttcgataaagaacaggggcagcgtataatgcagttcgcgctgcagcgggatatccgcgcgccgctcaatacccgtgacgggcagtatgatgacctgctggataatctctgggtgactatcctcaatcagcgcctgaccgcgctggtggacaacggacagttaccggctgccagtatcaacccgcagggcgccatgctggacagccgccgtcttcagcaactgatgatagtgcatccgcagggcggggattacctcggcagcatcaccttattgtggacagaaattcagcgcctggcgacacaacccgtcacacaggcagagctggacgatgcccggcagagtctgctggcaaaactcagtcagcaggccgccggggaatcccgctacggtaatgattacctcgccgacaccatcaccaccgcactggaataccggatgccggttcaggacaaacgtcagcagctcaccacggcatgggaactgctcaaaccggtcacaccggacacgctgaaaacccatgtgagcggattcctgaatcaggcatcaccacggctggcactgctcgggccggacagcgaacagacccgttttgatgagaaagcgttcactgaccgctggcagcagatccggcagtccgccccgggaccgttttccctgaccgtgcggcaggtcgcgctgaatgtcactccggcagcggccggaaccattgttcaggagcagacactgccgttgccgtccacggaatcgtggcagttatccaacggtctgcgggtcattgtgcatcaggataaaagcctgaaagataatattcagatcaatctgcgcattccgggtggccgctcactggagcccgccggacaggaaggactgaccgactgggcactgaaactgccggaaagcagcggttacggtgagctgagtgcccgtgagctgaccttattcagcaaacagcacagtctcagcctgcggccgtacagtgagctgctgaatcacggattccgtggtgaagccccgccggaagaactggataccctgctgaaactgctgcatctgaagatcacacagccgcagttcagcggcgaaaaattactccgcaatcagcaactgacactggaaagcctgaacagcaccccggtggaacgccgcttcctggatgccattaaccgtgaaagccatactcacggcgaacgtctggtgataaatgaaaacggcggctggcgtcagtttactgccgcgcagttacagcagaaccaccgtcttctgctcagtccggtacaggacatgacactggtgatcagcggtgcggcagataaaaaacagataaaacaggctgttgagaaatggatcgccacccttcccgcttccgggcagcgcctgcaatggcgggatccggctatcgcacccaaaatgcaaaccttcagccggacttacccgatagccagttctgataaaaccatggtgagtattcagtatgccgccccggcacagtggtcacagaaagaaagcctgacactgcaactggccgacagcattatcagtaaacagttacgcagcgcattgcgggaacaggcgggcggtatttacgccctgagtttctcctctatgctggcaaaactgccgtcaccgtactacagcgcccggctgaatttcaccaccgatcctcagcgcgccgcagagatgacggcactgagccggaaggtgctgaaaactctgaaaacagacggtgtcagtgacaatgccctgaaagaagccagagccaactggttactggaaaaacagcaggtttatcagagtgcggctttctggacagaatcactggctcagattgccggggacgataatgagtttacgcggataaccgcagaagaggcgctagttaatcagattaccgcagaggatataaaccgggcattatcccgctacagcggtgagaatgaaaaattatttatgctcaccccgccataataaaataaagccgcttaacagcggctttattatttccgttaactgataaaaataacaatcattgtattaacggataatgagaatatattttgtgatatatctccgcattatcacccgaatggggtagagataaagaggaacacagttgttatattttctgcgggtgcctgattctgtccggatcaggctatatattccctgttccggatagaagaaagccccgattacgtttttcaacataaaccggggccgaatctctaccaacgaatagggattttgcctccttaaattaaaggagtcaagagaaatgaccggaagatcaatgacaacattagctatagttgcagtggtattaataactgctcttacaatttctgatgttgtaaattcgttactcaataatcatcgggtatccgatttttcattgaaaggcggagatatgctggttgacgcaacattgtcctgtaacgataaatgatgctgaggggggaggaatccccccgtttctctctgttgcaggtagcggttaatcaggcaccttattttactttcttattaactaactaatatactctttcactatgataaaaaaaccagaattacccggcgttatttttaaattcatgatatccgccataagaataatcggcttatcctttacggtagtattattgacattaattatattcataacctacgctaaatccaccggtaaaatatgtcatttaaaccttaaagtaacaacgggaaatagtgcttcagaaatttataccgggcctgataacagtaaacaataaaaaaaaccgctgcaggggaataataccggcagcggtttttataatgactgaaataaattatttcttatcgcccagtaaaacagattccagcgcgatagtgatcatttcattaaaggttgtctgacgctcttctgccggtaaattttcaccggtacggatatggtcagaaacggtgcagatagtcagtgcttttgcgccgaattcagcagccacaccataaataccggcagcttccatttccacgcccagaatgccgtatttttccatcacgtcaaacatttgcggatccggtgtatagaataaatccgcagagaagatattaccgacacgggccgggatcccggcggtttctgccgcttcaaccgcattacgtaccagaccgaagtccgcgatagccgcgaaatcgttatctttgaagcgcagacggttcactttggaatccgtgctcgcgcccatgccgataaccacatcacgcagtttgacatcacggctgatagccccgcaggaaccgacgcggataatggttttcacgtcaaactcagtgatcagctctttggcataaatagagcaggacgggatccccataccgtggcccatcacggagatacggcggcctttataggttccggtaaaacccagcatgccacgcacattgttgacttgtttaatgtcttccagaaaattttctgcaatgtattttgcgcgcagcgggtcgccgggcatcagaacaacatcagcaaaatcaccgcgttcggcattaatgtgaggggtagccataaaaaaatcctttcagtcaatccaaagggaaagggcagactaaaagcctgcccgaaaaaagagacacattacagcatgtttttgccgtaatccatcggggataaatgaaaataggatgcaacagtctgcccgatgtccgcgaaggtttcacggtagcccagagagcccggtttaactttcggcccgtacaccagcacagggatatgttcacgggtgtgatcggtacccggccaggtcgggtcacaaccgtggtctgcagtcaggatcagaatatcgtcctctttcaccagcttcagcatttccggcagacggcggtcaaacaactccagcgcagcagcataacctgccacatcacggcgatgaccgtacgaggaatcgaaatcaacgaagttggtaaacacgatggtgttatcgcccgccagtttcatctcttccagtgatgcatcaaacagcgcatcaataccggtcgctttcacttttttggtgataccgacatgggcataaatatccgcgattttaccgatagataccacttcgccctgcttctcttccaccagcttctgcagcatggtcgctgacggcggctctaccgcgtagtcgtgacggttaccggtacgttcaaatgaaccggctttttcaccggtaaacggacgcgcaatcacacggccgatgttgtaaccgcctttggtcagttcttcgcgggcgatttcgcacagctcatacagtttttccaggccgtacgtttcttcgtgacaggcaatctggaaaacggagtccgcagaggtatagaaaatcggtttgccggttttcatatgctcttcgccgagctgatccagaatcacagtaccggatgagtggcagttaccgaggtatcccggcaggttagcgcgtttaaccaggatatccagtaattcctgcgggaagctgttttcatgatcgctgaaatagccccagtcaaacagaaccggcaccccggcaatttcccagtggccggacggggtatctttaccggaagataattccccggcatagccgtatgcgccgatgatctctgcgttcttatccagaccttccgggaagtgtccggtggactcctcagctgctttacccagccccagacgggacagattaggcagatgcagcggacctttacggcctttgtctgcttcaccgcgggcacaggcctgtgcgatatgacctaacgtgtcagcgccggtgtcgccgaaatcagcggcatcatgtgctgcgccgataccgaatgaatccagcaccataataaatgtacgtttcatacttctctcctgtgtcagatcacgtcaggatgcagggctccgcgtgaataacaaaattgttcttattcgctgatccggcggtaaatcagcggggtatctgtaaccggccgctcactgagtgtgacggcccggcgcacggcctgagcagcttcattccacgcatcttcattattggcgtggatcatcgccagcggcatctgtccgtcagcaacactgttgatcggcgcgatatcacttaacccgacactgtagtcaatcgggtcgctggccttacggcgtccgccgcccagagaaacaaccgccatacccagtgcgcgggtatccatggcggtcacaatcccttctgtctcagcatagaccggtttactgagtactgccgatggcagatagtgcgaatagcgttcgataaaatcagccggtccgcgctgcgcggcaaccatccggccgaagatttccgccgctttaccattatccagcacctgctgtaattttgcttccgcctctgtgcggtcagccgccagtccgccggaaaccagcatctctttgcacagcgccatagtgacttcatacaggcgcggattgcggtattcaccggtcaggaaacgcaccgcttcacgcacttccaccgcattaccggcgctggatgccagcacctggttcatgtcagtcagcagtgcagtggtccggcagcccgcgccgttggcaacctgtacgatcgcctgcgccagctgctctgataattcataggtcggcataaatgccccggaaccgactttcacatccatcaccagggcatccagtccttcggccagttttttgccgaggatagaggcggtgatcagcggaatggaatccacggttgccgtaatgtcgcgggtcgcatagaaacgcttgtccgccggtgccagtgagttggtctggccgataatcgccacaccggtctctttgatgatacggcggaaggtttcatcatccgggaaaatatcaaagcccggaatcgcttccagtttgtcgagcgtgccgccggtatgtcccaggccgcggccggagatcatcgggatatagccgccgcaggcagccaccatcggcccgagcatcagggaggtcacatcccccacgccgccggtggagtgtttatccacaaccgggcccggtaaatcaaggtttttccagtccagcaccgagccggaatcccgcatcgccagtgtcagcgagacgcgttcctgcgggttcatatcatggaaatatatagtcatcgccagcgcggcaatttgtccctcagagactgagttatcacgcacgccgttaataaagaaacggatttcttcatcagagagcgggtgtccgtcccgttttttgcgaatgatttcctgagccagaaacacagagatctccttaaaataccggatccgtcccggtaccacagataccgggttaatcagaaagccgggctgcaaaagcagcccggtaagcgtgattaatacttgctgtcagatttggcgtctgcgtagcccagtgcgttgagcaggctggctaacaggctggatgcgccaaagcggaagtgacgggagtcagcccagccttcacccatgatacggtcagccatcgccagatactgcgcggcttcttccgcagtgcggacaccaccggccggtttgaaaccaacggttttaccgacgcccatatcacggatcacggtcatcatgatttctgcggtttccggcgtggcattgaccggcactttaccggtggaggttttaataaaatcagcaccggctttgatggagatttcagatgcctgacgaattaacgcaggatctttcagttcaccgctttcgatgatcactttcagcagcacattgtgtttcgcacaggcttctttgcaggctttcaccatatcaaaaccaacctgggtattaccggccatcagcgcgcggtacgggaacaccacatccacatcatctgcgccgtaagcaatcgcagcattggtttcagccagtgcaatctcaatgtcatcattaccgtgcgggaagttggtgacagtcgcgatacgcacttccggcgtaccctgctcacgcagaactttacgggccagcgggataaaacgcgggtaaatgcagatagccgcagtctggccggccgggcttttcgcctgatgacacagcgcggtgactttcgcgtcagtatcatcatcattcagggtggttaaatccattaaggacagcgcgcgctgcgctgcggcggttaaatcggtcataaaactctccaacgtatgtctgcgccgttaccgggcagacgcaatatctgaacgatgcaaaatgtgttggcgagcgggacttggttccgtgaagacgttgtctctcttgagataagagctaacgctgagatccttctcaccgcgctgtaatacaggtgactgataaacagaatcaccgaatccgttacatggtatccatgccgtatttgagcatgtcctggcgctataatacgtgcctttcatcacgtttatataacagcatttacatcaatacatatgattatgtgataaaaatcacgttaatggcctgatatgcgcaaaatggcagcacatattcacggcatagtatagcgcaggaaagggataaacagggagtgacagaaagacaagtacactgaatcagtgaagtgcacaggtgaaccgggttcacctgtgcaggaagagcattacagtgccaggaagaaaccggcgatggttgcactcatcaggttggagagagtaccggccatcacagctttcatacccagacgtgccacgtctttacggcggttaggcgccataccgcccaggccacccagcaggatagcaacagaggacaggttggcaaagccgcacagggcaaaggagataatcgctttggtgtgatcagacagcggctgtaaaccggcagcaatcacctgtgcatccggcttcaggtattcaccgaaattcatataggcgacgaactcgttgaccacaattttctggccgataaaggaaccggcggtcatggcttcactccacggaacaccgatcaggaaagcgattggtgagaagatccagccgagaagcagttccagtgacagctgcggatagtcaaaccagccaccgacaccacttaagatcccgttgattaaagcgatcagcgcgataaacgccagcagcattgcacccacgttcagtgccagctgcataccggaagacgcaccgcttgccgccgcatcaatgatgttggcagggcgttcttcttctgccataccggccatcgcttcacggcgatcatcgaaatgctcggtttccggtaccatcagttttgcaaacagcaggccgcccggcgccgccataaaggatgcagcgatcaggtactccagcggtacccccatctgcgcatacccggcgagtacagaaccggccacagatgccaaaccaccacacatcaccgcaaacagttctgagttggtcatcccggagatatacggacgcaccaccagcggagcttcagtttgtcccacaaagatgttggctgtcgcggacagggattcggtacgggaggtgcccagcagtttctgtaaaccgccgccgagaactttaatcacaagctgcataatgccgaggtaatacagaacggcaatcagcgaggagaagaagacgataaccggcagaacgcgcagagcaaagacgaaaccaccgccgccgaatacctcgaacattttgtcggataccaggccgccgaaaataaagtccatccctttctggccgtagccgataacactggcgacaccgtcagacattgccaggaggattttgcgtcccaccgggacatagagaaccagcgcaccgatcagcacctgaataataaaggcaccggtgacagtccgcagtttgattgcccggcgatcacttgaaaacagcactgcgataaagatcagcgctgccatcccgaccagactcataaggagttgcatggaagtatccctgttcacgataatgtagattaatagtcctgttccgtatgcagttcagagcaggaccctgtggcgctgattatacccggtcagtccggccaacaatcaacttgcgtcacaaataacgactgaaaaaagtaacaaaaaatacaaaaatatgatgataatcacattattcaactgttttaccctgaaaagcctcccgcaaagccgggaattggcgggtatttaaccagatgacgaacatgaaataacatccgcttacaattgtaggtgatttcaggtgatttggcacacagaatgcaggctttgacaggacaaaatcgcgggaaaatcgattcaggaatcttaatcagatgattgcagcaaaaaaagtgtacagctgttgcgataaatctgagcagcaatctcatccggagactcactgcgcagtgaacagagcacttcaaacgtgcggacaatccgctccggccggttcggctcgccctgaaaaccactgagcggcatatccggggcatccgtttccagcagtaacgcagaaagcggaagctgcgcgattgcccgccgggtcttctgagcccggtcgtaagtaatcgtcccgccgaccccgatgtaataacccagtttcacaaaggcatccgcctgggcaaaacttcctgaaaatccgtgaatcacaccacggcggggcaccgggtgacggcgcagaacagcagcgagcgtgtcatgggttttgcgggagtgcagaataaccggtttatctgtccgtgcggccagtttcagttgagcaataaaaaaatccagctgcttatcccactgcggctccgccatatagcgatccaacccgatttcccccaccgccacgcattctgtcccgcttgcggtgataaacgactcaagctgttccagatgttcaggggtgtgttcggcaatataaagcggatgcagaccaaatgccgcgtgcaggcggggaaatgcatcgccggatgagcggcacagcccggccaccgtgctgaggttccaatgactgaccgccgggataataatatcggtcagcccggcctgtgctgctgcggctttgtggcgggtaagatcatccgtaaaaaacgggaaatcaaaatggcagtgggtatcaataaattgcatttattcagtccgccggcttttccggtgagcgttccggtgaatgtaataccgccgctgtaccgtcggtgaccggcagttgtgaatcgttgtcgttggatgcagggggaaccctcagtacggaacttcgtaccggctcatatgacgcccagcgctcaccgagtgttgccagaaaatagcgcccgctgcggcggcccagccggtaatcctgcatcagtgttttaacccggctgccgagcgcattgcttgccagcggtgcattcggataaatttcagcaatttcaaccccgggcggcggtgactgaataaacttttgtgtccggtaatagcttttggcgtgctgtttcatcatggcaaccatccgtttcagatggcttttttccagccagcgttccatccgtttcacccattccggagtgtaatagagctgtgacggcacagtccggatcaccacaatccgggtcgcgccccgccgccatgcctcaataaccggcaccgcatcactgataccgccgtcgtgatatgtgatgccgtcaatctccaccccttcacggtagaatcccgggatagcgctggaggctttgatatattccagccagtcttctgcctgcgggctgaaatatgcggcattcagattatccgcccggctggcacacatataaaattcctgcccctgatcaaaacgccgcagtgcatgcgcaatattcagcggacattccgcagaggttgaagaaataagccagtcgagatcgataagattgccgccgcggataaaacgcagcggattaaagaattgcttgtcggtggtgtagcgggtaatgacatgacgggcgtagccgcgctgaccgcacagatatgccgacaggttctgcgcaccggcagaggtgcctatcagcaaatcaaacgggttaaacccggctttgagaaactcatccagaacaccggccgtgaaaatcccgcgctggccgccgccttcacagaccagcgccagtttaccggtcgcctgaagcggatcaggcaaccaggccagtggtgcgattttcccgggcgttaccgggatatacgttcccatcctgctcttcccccggcgcagattacctgccggttatttatactgcccgatactgacttccacggcacggacaccgggaacgcctttggcaatatcgatgatttttgtacgctgcgcatctgtggtaacaaagccggagagatacacagtaccgttaatggttttcacggcgatatcattgctgtcaatatcatccgcactcagcagctgaccacggattttggcggtgatcgtactgtcatccaccagcagtgaggcatcttttaccgcgccgtcaaacttctgctccgcctgcttacccaaatcttccgcagactgagaagcactgtcccacgcctggccggctttctgactcagagattcctccgccatggcggatgcactgaacagtgtgccgctgaccagcaggacggccagtgatttcatggtattgcgcattatcgtatccttcttcattttcatgatgaacatcatctgtctgtcagtgtatcttaacgccgccataaaaaaaacgcgcccggaggcgcgttgtttttctgtcagtgttcgcgggttttgtggaaactcacatccggataacgttctgcggtgaggttcaggttcaccatggtcggtgcgatatacgagaggttatcgccgccgtcgagtgccaggtgcagttcgtttttacgtttgaactcttccagtttcttcacatcgtcacactccacccagcgggcggtggagacgttaaccgcctcataaatagcttcgacgttgtactcgcttttcagacgggcaaccaccacatcaaactgaagcacacccaccgccccgacaatcaggtcgttgttggccagcggacggaagacctgcaccgcgccctcttcggacagctgaaccagccctttgagcagctgtttctgtttcagcggatcacgcagacggatacggcggaacagttccggtgcaaagttcggaataccggtgaatttcagaatctcaccctgagtgaaagtatcaccaatctgaatggtaccgtggttatgcagcccgataatatcgccgggataggcgcaatccacatgagcacggtcaccggccataaaggtcagcgcatcagaaatcaccacatcttttttgagacgcacctgatgcagtttcatacctttttcatacacaccggagacaatgcgcaggaacgccacgcggtcacggtgtttaggatccatattcgcctgaattttaaagacaaacccggtaaatttatcttcttttgcagtcacttcacgcacatcagtctgacgcggcatcggcgccggtgcccaggaaaccaggccgtccagcatatgatccaccccgaagttccccagcgcggtaccgaagaagaccggtgtcagttcaccggcgaggaacagttcctcatcaaattcatgggatgcaccctgcaccagttccagctcatcacgcagctgttttgccagctcttcaccgacagcagcatccagatccgggttattcagcccttttacagtacggacttcctgaatggtatgcccctggccggtctgatacagataggtttcgtcgcggtacaggtgataaacccctttgaacagcttaccgcagccgataggccaggtgattggcgagcaggcaatcttcagctcgttttccacttcatccagtaactccatcgggtcacggatatcgcggtcaagtttgttcataaaggtcaggatcggcgtgtcacgcagacgggtaacttccatcagtttacgggtacgatcctcaaccccttttgccgcatcgatcaccatcaggcagcagtccaccgccgtcagggtgcggtaggtatcttcggagaagtcttcgtgccccggggtgtccagcaggttcaccagggcatcgtgatacgggaattgcatcacggatgtggtgattgagatcccgcgctgtttttccatctccatccagtcagatttggcgtgctgattagagccgcggcctttgacggtaccggctttctggatagcctgtccgaacagcaggactttttcggtaatggtggttttaccggcatcggggtgcgaaatgatcgcaaaggtgcggcgtttggccacttcctgtaaaaatgcattatttgacatctgggcgttcttctggggctgcgaggcagaaacatgctgtttccgcctctgatttctcattaatggtgcttattttcgcccggtttgccccgtgaaacaacaaaagcttgaaaatccggcttcgtcagttatccagcaggcagatacaggcgattgcatcactcatctgacaacgttccatcagtgccagtaaatctgcattaatatcaactacatgcattttcagtgagaaataggcgcccagcaaaagctgaacatcaatctctttcagtacccgttcctccgttgccgccagcgccgccagattggtgcgcagatagaaataatccatgaccagcagactgaagtgagacaaggcattgcgggaaccggtaacatcaccggcgaaattagccgcatgcggaaactgactgtgatacagcagataggaaaacagattacgcagtgtgtatggttcattcagacaactgctctgctgctgtactttccattctgaccgcagacgcgccatgttttcttccgtgcgttctgtggtctgttgctcatccattcccagttgtttcagcgtattgatataagtggaaaataaaaaagtaccactgcgggatagcctcggaataaatttgccgtaaacacttaatactgcggtctgaaaactgaccggatgcggcagtgctctgcgttccgctgtcagttccccgttttctgttgcattgagcagaaattcatacacgccctgaatacgatcaaaattcgcttcaatgtcataattgagcttgctgataaacgtcagcaactgcataacggcatagaggttatcctcaaactccggtgacggtgcctgcaccagattcaggcaccagaggtacatcaggtattgcggatcagtcagcgccgcatcctgcggtgcttttttcagatactgctcttcttccgttaactgcatagcatcggcggaaaacagcaactgacggacaacctccgggcaggaaagtgacaaacgtttgaacgtcgcattctgatattttatttcactgcgcggatattcacggcaggtatcactcattgccgaaggcccgagcttgctgtaaacaccacacagccgcttttctgtcagaaacggacactgtttttcttccgtcagccggatataagcgtatataccggcacgctctgatttaagaacatgttcctgagaaatctgtttaatttcaatgctgtccgcactgtgatattttttataggttttcttatcaatactgataaaccagtcctggcagcagtgcgacaggcattcagaaccgacgcattcaaagcgccggataaacatcggtgtgataattttatggataaacatgacaaggcgtgcctgtgataaatgtataccatcacagtaacacgcagaaaattgccgaaagggataaaaaaccgccgttttatctgacttatcgctctattacattttgcgctatgacattccgaaactcagataaagcgccataatcactgcatcttctttaccctgtgccgccggataatagttcttgcgcacagtaacctcattaaaaccgagtgattcatacagtgcaatcgccgggctgttggatgccctgacttccagccagagtgtcgcaatcccttttgctgtcaggtcttcaatcactttttccagtaactgacggccataaccttttccctgatgctcaggtgaaaccgcaatattaaacagggttgcttcatccagtaccgtctgattgatggcgaatccggccagttccccgtctgcttccagtttcaggttatggtaacgttcgccgtgattgctgcggaatgtggcttcactccagggataagcgtgagcggcctgttcaatacggaatgcggcggcaaaatcagcgggaagcagcggtgacagtctgatcataatgataaatttgtgtccataatccgcgttttgcctgtgcatcctgatacaggtcggcaagacggggggagtgtaatgaaggcagtgaatccggcagttcagcttccgttcccggcagccagcacaggcagtttgtctgcgccgggatactctgaacgttatccggtgtgatgcagtaaacatcatccgccgtgatattcaggctgcggaatatatcgctgagtaaatcacaggtgagatctgcctgctcatcggttatgatcagcagacgtgccgaagccgggatctgtacagacagttcccctttcaggcgctgcggctgacgcagcgtccattgggtgatccccatctgagccagcattctgtctcgtcgcgtcataatgtatccctgaaataacaaacgacactatcttagcaaagcgcgctgcccgcgccaatgctgccgaattatgatttacaggagttaacggatgtccatgcttaccccggccagtgaagtgattttacgtcatgcagacgaatttaccgggagccgtgtcctgcttgccggggacattcaggatcccctcgctgcacagctttccgcgcagtcagtgtatgtcagcaccagccagtatcatcagtggcagaccctgcgtgcaccgctgggtgatcgcgccgcatttgcgctgaccgtcagcccggaagccgctgcacagtgcgacacactgatctatttctggccgaagagtaaacaggaagcactgttccagctgacacagattttttcctgcctgccggttggcagcaatatttttattgtcggtgaaaaccgcagtggtgtccgcagcgcggaaaaaatgacagagccgttcacagcactccgtaaaattgacagcgcacgccgctgcggcctttattacggcgaactgaccactccggcacactttgccctgaaagagtggatcggcagttataccgctgaaggggcacaaatcgtgacgctgccgggggtattcagccaggacaatattgatgtcggcagcgcacttctgctggaatcactgaaccagccggtgaccggctctctgctggatattgcctgcggcagtggtattatcgcgaccgtactggcaaaacgtaacccggggctgaccctgacgctcagtgatgtctcagcggccgcccttgaagccggacgcgaaactctggcacgaaaccagctggaaggccgtgtgatcgccagtgatgtgtattcggatatcagtgaccgctatgactggattgttgccaacccgccgttccatgacggtctgaacaccagctacagtgccgcacagcgccttatctccggtgccaaagcccgcctgaaccgcggcggaaaactgtgtatcgtggccaacgcctttttaccgtatccggatctgctggacagcacatttggtcagcataaggttctggcgcaaaccggtaaatttaaggtctatctggctacaaatgcctaataagtaagcgaagtcaccaattttgataaaaaattattgacggcgcggataaaaccgctaaaatccgcctccatgctatcagttacaggatagttctgaattgcgagggtggcggaattggtagacgcgctagcttcaggggttagtgttcttacggacgtgggggctcaagtcccccccttcgcaccaatcagatcttatcacacacaactgacagcagattgaatgacagtacctgcgagggtggcggaattggtagacgcgctagcttcaggggttagtgttcttacggacgtgggggctcaagtcccccccttcgcaccactgttatgacaatcttctgacatcatttcccggatatcacatcctcagatgctcgaaccagagcagacttcccagaacgaatgcaatccctgccggaatcagcaggaaatgacgcaatacgcggttatacagcatcggcattgtcagcagaatcaccaccgctaatgcaatacgggcagcatcctgttcatgcccctgtgataaaaacaacacgaccggtatcagcgccagcatcatgccaccgaccccggttaactgctgccagaaaaacgatgaaagcgggtgtttgatttgcatcacagccactccttacaatatagaaatgagaatcattcctgttatcataaataatctgccgcctgttgcaaccgctttttcgcataaaatgcaaaaaaggtgcatgattatatacctgaaaatcatacacctataattaatgcgtctataaattgaacggatattaatgtgttaaatgatcagttccggaaaagagacacgaaatgaatatcttccggttcaagggcaaacagtgccggatccggttttgcgatcagttcacatcccagatgctgataaaaatgcacggtattttctgacgggatggatgaaacataaaatccctttgcgcccatctcttttgccgccgtttcacaacaggcaaagagctgacggccgatccctctgccacggtacgccttgctgatatgcagaaaggagagctgacgcagcgctgtttcatcttcctcaaatgccaccggacgcggatcaacactggcggcagccaccagcatctctccgtcaaataccccgaaaaacggcgcgccgcgatcaaaactgtccagcaggatcggcgtgtaatgctccgcctcgccctccggccagtcacgcatgtcaaagcgctgcgcggagagcaccagctccccgttctgatgcagatacagatgttcaatcagttcagtccggtcgattgaccagacctgcggtatttcctgccgttcaagctgtctcgtgagaagtgtcatcatttgttgtctctgtttttatatctgcgacaccttctaacacatgataggccacagagcaaaacagcgagttcagacgcttcatatcccccagcagcccgatatgtaaccggctgctgccgatgctctgcagattattgacatgcagccgctccacatgggcaaaagagtaacgctgattcagcagacggaaccggtgttttgcccggcgcagccgccgtgcattatccacatccccggaaacaaacaccgacatcgccagattcaggttattctgcagccgcgacatcatggtggtcagttcgctgtagccgtctttcgagaaaacacgctgcggatccgccgtctgattcgccacatcgtgagacatccgtccgataatcagggaggactgctgaagtgacatcgcggtatcaatcacctccgcccagcgccgggaatcactttcccccagttcggtttgctgtaactgcgccagatagagtttgatactgctgtgcagcatctccgcttcttcttccaggtggcttatcagtcgtttctgctcacctttacccgccagctggctgtcaaaacgctgaagcatctgctcaatcacatcccccagccgcagggtttcccgtaccgcattagccagcgcaagagaaggagtatccagcgcgctctgatccagataacggggcgctgcgctgtcctcttccgcctccggttcggcgataagacgctgacacagccgtgccatcggcttcaccagtgccagcatcagcacacagcggaccaggttatagaccacatggaaataaataacgacttccgctgccggcagattgtactggccaacccagaacgccagcggtttcacccacggcagcaccagcacacagccaatcagtttgaacagcatactgccgagcaccacctgacgcgcaaccgcattctgaccgcggctgctcagcatggccaggaacccgctgccgaggttagagccgataactatcgccaggctgatatgcagcggcaccaggccggtggcactcagagtggccgtcagcagcactgccgccaggctggagtagctgaccatcgcaaacagtgcacccaccagcagcgccagcactgcgtctccgctcaatgaggtgaaaatagcctgaacagcggacgcctgtgtgatcggttctgcggaagccacaatcagctgaagcgccagaataatcagacccagcccgataccgacccgtcccagttgcccggtccggctctttttctgactgagaaacgtagtaacccccgccaggatcagcagaggtgagagccaggagagatcaaacgtcagcacccgtgccatcagcgccgtcccgacatccgcccccagcataatcaccagggcgggcggcagcgctatcatgccctgtgccacaaacgaaatcaccagcaatgcggtggcattactgctctgcaccagcgcagtcacccccagaccggcgagaaacgcccgtgatgttttccggatgctctttccgagcagccgccgcagatctgcgccaaagacacgcataatccctgtccggacaatgtgtgttccccagaccagcagcgcaaccgatgaaagaagatggagtaatgtcagcatagtgttttcgtcagcataaggtcccgttaaaacgatcagatcaacggtatatcacacaggcactgtgccacaatgtgataatggtaataaacaccgccgccatcagaagaaaaaatcgcataaaacacacagttttacggaatacaggatgtctgtcccggagccgggacatcggataagtataccttatggtaaatatatttcaaaaatcatcatgttacaaaaaataataaaaaaccgccggcacagagtaccggcggcagcccctgctgaaatcagcaaaatgatgcaatcaacatgaagaaaagcacttcagaacagtgtgaatatcaggtaccgcagattacttcagttccatcgcatcccgcatggtgaagaacaaatctgtctgatccgtcagacccaccacattcgccgcacccggaccgtatgccgccacacgcagctgggcaccggtatgctcctgcgaatctgattccgagttaccgtagttaactgccatcacgctgccgtctttggtcagcagtgcctgagtcagacccggtgagactacatccgcttcaataatctggctggaatgagcatggtcagcggtcacaatcaccagcgtatcaccatgttttttcgcgtattccataccgatctgcaccgcttcatccagcgcaacggtttcgccgatctggccgcaggcgtttgccgcgtgatcctgtttatcgatagaggcgctttccacctgtaagaagaaaccgttttcatgatctttaagcagatcaatggctttttcagtcatctgagccagtgtcggggcattcggatccagttttgaacttggtttacactccacgacaggtttgtcgagattaccgcggtaggaggctttcggaccttcccacgccacttccatattgccgtcactgaataatccgagcaccggtttatcctgatttgccgctttcacatccgccagcgatttggcatctttcacaaccagataaccgcgtgccgctgcctgctcttccagggttttccctgcatagtccccggctttggctgtctgacggaaactcttcgcaccgccgccgagcgtgacatccgcacgggcattcagcagttgctcactgatggagcccaatccgccgttttccagcgcatctgcactgcagcgctctgcggtttcttcagggccgtagcatttacgctggctgatatgtgagatcagtgcagcgggtgtggcatcctgaatttcagatgtggtgacattcccggtcgctttgccgtttttctttgccagctcgagaatggtggtgtgcggtttgccggtaacatcaatacccagcgcaccgttataggttttcaccccggaagcccaggcggtcgcagaggcagcggagtcagtaacataattcggtttctgtgttttcttgtcgagcgcatacgtggtgtactgaccggtcagcggcagggaatcaatccctttaaacacgccacccgcgccttccgcatagttacgcgccacggtaatttcggaatctcccataccgtcgccgataaacagaatcacattttttgctttggtctgaccgatagccgctttcagcgcctcagtctgatcggatgacagacggcgggcaccaccgaactccgtgatattgcctttggcggcgcgatcctgtgccagaatggcatctgcattccccgctgcaactgccggtaatgcagagcctgtcagcagtgccagaacggcagctgcaacccgtgttttcatcgtcgcatgaagcatgagcagaatccttgtcattaataaaatagtcagttatcaacgcaggacagcctaatccgctcttatgacatcagcgtgacactattgtgacctctttgtgtcagtcagatgcatcagcccggaatgcagggtttcgcaccatgagacatagtcatgtccgcccgggcgctcctcacgggtaacctcataacctttttcctgtaaaacctgatacagcgcccggttgttatgcaaaatcccgccggcaccggcacgggtttcaaacacaccggcctcaaggaaaaaccgcagcggaagtttgtgagtacctgcaaactcgcgaatcagccattccggcggctctccctccggtgaccaccagtaagagccggacatactcagcacattgccgaaacggtgaggtaatttcatcgcattccaggaagacgcaagcccgccgtaactgctcccggaaacaatggtccgccccgccgggatagtaatcccctgctgtgccagccacggcatcagctcttcatccagaaactgcgggaacagttcattcggcggcagctctttgccacgctgctcactgctgatgctgtccaccatcaccacatacagcggcggaatttccccgcgcttcacccacagatcaataaatgtgacgatatgatagtttttgcggtatatctgcccgtcaaacaacaccagcaaccagggctccgcccccggctccggcggggtatacaccgcaatttcccgctggttattcaggatatcgctgtgcagctgattcagcgtcaccgtaccaaaaaccggttgttgtccgggcgtccggaaatcacacactctgttgttatctaacgcaataatggcatggcgattgaattcatccgctccgtctgcacccgcactcagcgggttacgcgggtccgcctgtgccgtgctcagcagcgctttacggcgggcgccttcaacggaactgtcaagctgcggaatatccggggcaattttatactgactgacagtctctgcgggaacaatgtaggagcggtaccagatatcggtatcattcagtctggccatcggatcatgctgtccggaaggcgcaccaagtatgtaagcattcactttcgcacctcgccagaggaaagtgatccgcttgtggtgcgcgtcataatcctcaaccagcggagtttctgtcaccgcctgccagaaagccgaggtatcacccccgttaacccgcgttatcagctgttgcaggcgcacactgtccaccggcagggagatgttttcagctaccggctgataaggatagttagtaagtgccaacttccattcagagcccggtatcccctgtgaggtcagtgtccaggtgtcatcaaacggtaatgtgaatgtcacagattgcatttctgtgacaggattgtccgtaagcagcgtccggcggggtgtcatctgactgtcatagagtgacaaatcacggatattctcactttccgcaatcaccacctgtttttctgacaacggcaactgcacacaggcctgcccgttgtgatcaaatgtgccggtaatcgtcatcgtctgtttttcatccggagcggaaagtgactgacaggaagaagaggcctgcgcggaaaatgcagaaaatgccgcgcagcagagcagagtttttttcacgtcgctgatcctttaaaatcagtaataattatcattattatttatcagcttcgtatttttatgccaccggacggaaaagtcaaaccgccacatcagacagcaggctctcttccggctccccggcaacccataccgatgtgcagaccttttccagcagcgccttgttgtgactgaataccaccagcccgagcggccgtttctctgattcttcaatcagcacctgccagatctgtgcctgaatatgtgcatccagttgcgccgtcacctcatcggcgatcaggaaacgggtacgcggatctaacgcccgcagcagtgcgattctcgccagttccccgccggacaactcatccggacgacgttccagccagtgaggctcaatgctgagcttttccagccattccgcatccggtttccaggcatcatataacccggcaccggtcgtacggtacggattaaaacacttctcaggatgctgcggtaccagctgtaccggacaatagccggttttcggtaccggttttccgtcgagcagcagttccccggcatgcggttgctgccactgcgccaggatccgccccagcgttgttttcccgaacccgctgggtgcggagatccccagacgctcaccggcattcagccggaaagaaaggccgttccacaatgtttttccgccctggataacctgtaaatcgcggatttcaaacatacgcttttcccctctgctgatttatcccgttatcataacaactaatttcccgcagacacacggctttccgtcagcagcccgatgcactcctgagcaccacgtttaagcacatcccctttccggctgacaatatgcaccggcagcaccagaccgttgcgggtattgcggaatgacaggactttcagtgtcccggactccacttccgcccggatcatggattccggcagattcccccagccgatacccgctttaaccagtcccagcgccaccgaaaaattatcggtctgccaggttttcgtcgccatctgtgagcgcacatcagtgagagaatggtgaagactggcaataacgatttgttttgcctgtaccaaatcctcaatataaacagactgttgctgagataaagaaggatgtgtggctgaaatggtggccaccagggcttcatgaccgatacagtgaaactgctcgcgcggatccacatacagcccgccgaaaaccagtgccagctggatccgcccctgatgcagcaacggcagaatgtcatcctgtgacctggataaaatttctgttttcaacagcggataacgctgattcagtatctgcagtgcagaaaacaggtcctgcggattcacacaggttgcgacccccaccgccagtgtgctctccacatcctgtgtcagctcgcgggtaaacacattcagctgatgaattttatccgttatctctctggcatacggtgccagcgccagggctctttctgtcggtaccggtgccctgcccgaacgttcaaacagtgcaaaacccagttcagcttccagattactgaccgccatactgaccgctgacggcacgcggtgcagcgctcttgcggcggctgaaaatgatcctttctccagcaccgtcagaaaaagctgcaaattatcactgttaaacggcatataccctccggcctgtcagaaaatctgatagtagctgacttttattatcatctctattgatttactttccctgcattctttacagtaaacagcagcaggatatcaatatgcagggtttaaaacgaaaactggtctttatcaccgcttatgagctcatcggctgggtcatttcatcagttgcgctggccatactctccggtaattcagccggtgtgaccgggccactggcgctggcaattaccaccatcgccgtcagctggaattttatctttaatacattgtttgaattctgggaatcccgtcagatttcccgtatccggacattccgccgcagattcgtacacgccatcctgtttcagctgacactggtggttttccttattccgctgattgcatggtggttatcggtcagtttaatacaggctttcctgctggattttgccctgattatttttatcccgatctacacatttttctttaactgggcgtttgacaaactattcggagttccggcttccgcattaccccggaaagaaactgccacacattaataatgatattaaaaaagccataccggagaaacggcatggctttttatctgataaaaacaaaaattaaaaactaatatttaatccccaaaccagccataccactatttctggtnnnnnnnnnnnnnnnnnnnnnnnnnnnnnnnnnnnnnnnnnnnnnnnnnnnnnnnnnnnnnnnnnnnnnnnnnnnnnnnnnnnnnnnnnnnnnnncccccaacccagccataccactatttctggttagtttaaattcagcatcacctttattaatttcaattcactcaacagtttcatcaggatcaacaatatcccgccctgaccgggaatttgcttcccgtcatcaccagagcccggcttaataccggcccggttatcagtcacagtcaggtcagtaacatccttttcatacagataggttatcgccgctgacgctgtcattgaattcactaaaagtacgccgcagatgacgtttgtcagtgctgttttttgcatcattttttgatttccttatctgcccgttatatcctgctgacaaacagaaatcagagcaaaaattcgccggatggtgctatcaggatgaaaagaactatcagcagtctgataactcagaaaataaaaataaccggctacaataaacagctgaaaacatcatgaaaaggatgtcattatgaaaaaggtattgctgttatttatattattcagttttcaaattgtcgcagcacctctgactccttcagatatcgatgtactgaaaaaagaaccggaaaaagcagcagaaaatattgttgcatccatgagtcagacagaaaaaattggtcagctgatgatgcttgattttcgctattgggatatattccggagtccggttcttgttcccgtgatcaatataaataacgatatcaaagatattatctatcgttaccggttaggcggcgttgtattattcagagaaaatttaattgatacaccacaaacagtaaaactgatcaatgatattcagtcttcccgttaccgtcttccgttatttatcagcactgatcaggaaggtggctatataacccggctgcgggttggcacagaaatgcccggaaatatggctctcggagctacccgtgatccggattcagcaagattaaccggtgaaattcatggcagtgagttatccgcactgggatttaatatgaattttggcccggttgtggatatcaataataatcaaaataatccggttattggtgtacgggcgtattctgacagaaaggagctgacagaaatcctgtcagccgcctatatccgtggtattcatcagtacgggcttatcactgctctgaaacatttccccggacacggcaatgtctctgcagattcacatgtcgcccttccggttgtcacatcggatgaaaaaacctggcggcaaacagaattaccgccatttatttatgcgctgcaacatggtgcagatgcggttatgactgcacatattattgtacccgcactggatgactcaaaaataaaaacccgtgacggttcagaagcaggtacaccggccacattatcaaaacctattctgaccggcatattacgcaaagaacttcactttcaggggctgataattacggatgccatggatatgaaagctatcaccgataactttgagctcaattttgccgttgagcacgccctgtctgcaggcgcggatattatcctgatgccggtaaaaatgtgggatgaagaagcagttaagcgccttgataatttataccgctatctggatgaacaggcaaagaaaaatccggaactgcagcaacgtattgatgaatctgcaaaacgggtggttctgatgaagctgaataaagccatcagcggagcacctgcggatccgatgaaagcacagcaaattgtcgcctcagcacagcataaaaatcaggaaaataaggtatctgaacaggccgttaccataataataaatgacggcatcctgccttatcaactgaaaccggagaataaaattctggtgatttctgatgaatatccccgtaatcagttaattaaaaagcatctgaatgatattgcacgggaaacggaaacccgtattcatgtcactgcacaaaaaataaaaacagataagaaaacgctctctgaaaagaaaatcagcaccatgatcagcgggcaggatattattttactggtcacttacaacctgcgggaacgtgatacaaatgcacaatttatcatcaactccgctaatgatgcaggcattcccttagtcgtgatatcttcacgggatccatacgatattgcgagtctgagtaatgtaaaagccaatattgctatctatggtattaccggatttgatattacaaatggtcagcgtaatgcactggaaacgaatatccggagcggcttgcggacgttattctccggtaaaaacgcccgcccgcttaattatcccgccggacggttacccgcagacattaaagacccggaaagtggtattattttatacccttatggcacaggggaaacctatgataagcaggattagaaatgcatctgccggaatcttcatctgtcagccgggcagtaacgaacaggattgaaataaggagtaagcatgaatttatcccgcactgctgtaatactgggtatcgccggtctgagcatcagctttcccgctgtaacgatggcggaagaaaaaggattaagtccgctggaacaatgctatcagtctgtcggggatgcaccacggacaaaaattgcaggctgcctggatgcaaagctgaaagcagcagatacccggctgaatacgattctggcacagcaaaaacaggaaattgcatcactccattcagccggaagtgaaaaagctattcagtcactcaacctgtcacactccgcctttatcactttccgcgatgctgagtgccggtatcgctatgatgcaactctcggcggtagtggtgccggcgatatcatgaaagcctgccagattgacctgacaaattggcggataaaacagttacaggaaaattaattcacagaaaaacagcagataccgttattccggtccgggaataccggcctgagcatttaaaccatagaccttattaacctgctgtttttcttcactgatttcataaatctatcctgcagatatcatcccggcaatatttattgcgcttgtgtaaccgtccctctgtctttttctgaaacaattaagataagtatctatatatctgcagactaccattattaacctgattatcaggatgatgatgaaaatatcatcgtgatgacagataaaatacaaacggaattatttttctggtcgccgtcagagtccgggaaggcgattaattatctgattttttgtattcggagggataaagggatggcaaagatgtctttataaataccactctggtctgcccggcctgttcgccgggaaaccatatcgatgagcaggctgcggacagctcatcagcccgggcgctttcatgagtctgctatccaatactgaaacttctttcgatgactgatgttatgaagttcctgtatctgacggcgtaatataacccgccagccatccggcttatcaggccagtttttccggtatttgtagctgctgcatgaaccccggacacccgcagagtttgcccacaggatagtacgttctgagtttcccggttaccgggaattgttcggggagtctggtatctggcacgtggtgacttttttaataaaaggatatccggagagaagtggattcagaataatttttcttttcgcccaaacagcggatacggcgcgatcactttcatcagcacgttaataatatccgcagaggccagtgtgaagccgcagcgcagcccggcgagcgcaaaggctttggagagcgtgcgcaggatcaccaggttcgggtattctttcagccacgatgccacgctgaactccgggcagaactcgatataggcctcatcgaccacaatcagtgcccggttgtcgacgatatcaaacagataacgcagatcctgttcgcggatcgggttgccggtcgggttgttcgggtggcagacataaatcactttcacgccgctgagactggcggcaatgctgtccagatccagctgccagctatcgagtgacggcaccactttctgtgcgataccaaaagtttccgcactgacactgtacatgccgtaggtcggcgggcagaacagcaccgcatctttccccggctcacagaaggcgcggatcagtaattcgatgctttcatccgcgccgcgccccgcgataacctgctccgggctgacaccggcgtaagccgcatagcggttgatcacattcgcaggctggcactccggatagcggttcagattgcgatccgtaaaggtgaagtccggtgcctgcggatattcgttggcgttcagccagacatccccgttaccgccgaggcggcgtgccgactgatacggcgtcagtaactgcacattttcgcgggccagtgccatcgcgctgaatggtttgttcatcggttgttttcctccgctttcagggcattcatccgcagtgtcacggcatttttgtgcgcggtgagcagttctgccgccgccagggtttcaatcgcgtctgccagaccggataacccggccggggtcagcttctgcacggtcatccgtttcataaaatccgccagtccgaggctggaataggtcgaggtataaccataagtcggcaggacgtggttggtaccggaggcataatcgcccgctgattccggcgaccagtcaccgaggaacacggaaccggcgctgttaatggcaggcagcagggcatccgggtcgcgggtctggatgattaagtgctccgggccgtactggttgctgatcgccacacaggtgtccaggtcgcgggcaataataatgcggctggcggacagggcctgacgggcaatctctttgcgtgataataattccagttgtgaattggtttccgccaccacgcgctgtgccattgcttcatccggggtgaccagcaccacctgagaatccgggccgtgttcagcctgggagagcaggtcagcagcgacaaaggccgggttggcgccgctgtcggcgatcaccagtacttcagaaggcccggcaggcatatcaatggctgcaccgccgatagtctggctgacctgacgtttcgcttcggtcacataggcgttgcccggcccgaaaattttgtcggtggcaggaatggtttctgtgccgaatgccatcgcggcaatcgcctgggcaccgcccacctgatagatagtctccacaccgcaaagttgcgcggcatataaaatttcatcagccaccggcggtggtgagcagagaatgatccggcggcaaccggcgatttttgccggaacagccagcatcaggactgtggaaatcagcggcgcactgccacccgggatatacagcccgacactgtccaccggacgggtgaccagctggcaactgacgccgggctgggtttccacatcaatcacatccgggatctgcgcctcgtgaaagcgggtgatattggctttcgcagtcgccatggcggacttcagcgaatccggcagacggtcagcggcggcggcaatttccgcagcactgatttgcagttctgttacctgtgttttatcaaagcgggcactcagcgcgcgcagggcgttatcgccgttttcccgcacatcacggatgatgtcactgaccacgcggctgatatcaccggatgctgccatcgccggacgcatcagggcatccgcctgctgctgtgcatcaaggttttcccagcggatcaaggtattaaaggtcattgcggtcattgtcatcactccatcattttttcaatcggcagaaccagaatggagctgcaacccagggctttcagtttctccatggtttcccagaacagggtctcgctgctgaccatgtgcatcgccaccaaatccggctcaccggccagcggcagcagggtcggacgctctgcgcccggcagcagggcgatcacttcgtccagacgttctgacggggcgtgcatcatgatgtatttggattcacgcgcctggatcacaccctggatacgggtcatcattctgtcgataagctgctgtttggcaggcggcatttcaccgtcgcgctgaatcagacaggctttggagcggtaaatcacttccacttcgcgcagaccgttggcttccagcgtggcaccggtggaaacgaggtcacagatggcatcggccagaccggcgcgcggtgccacttccaccgagccgttgagcagacaggatttaaagcggatacctttctgatcgagatagcgcttgagcaggaacgggtaggaggtcgcgatacggctgtcctgaagacattccgcgccgctgtagctgaaatccaccggggcggccagcgagagacggcaggtgccgaaatccaggcggcgcagcgtgaagtaacgcgggttttgtccctgtgcctgacggcttaataactcttcttccagtacgttttcgccgatgataccgaggtcaaccacgccgtccatcaccagaccgggaatatcgtcatcacggacccgcaggatatcaatcggcatattctctgcgtaagcaatcaggcgctgctgttgtaagttgatttttatgccgcagcgcgcgagcaattcgcgggaatcttcacttaagcgacctgatttctgaatggctatccgtaagcgcgttttatctaacattttgattatcctttaattttataattctttaggtataaaaaaacccccggaaaaaagattcttccgggggttctctcttagcacgcatgccaccggaagctctgaacgtcttccggcaccaatcgcctgaaagactagtcagggtgatggtggtggtgatggctgaactggatgcgtgtcatgataatctctcgtcgtttatctgcctgttgctatcacggataatgttgtcattatggtgataacgatgtttataaattgcttgtctttcaacctatagaactcacccggactttgcaaccccttttttgcaaagaaaacagaaattaagataatttactgaaatcaaagaaaaataagccacagagaggtcatgcacgatgaaaacagtttccatcgcggggctgggctggctgggaatgccgctggcactgcatcttgcggatatcggtatccgtgtcaaaggcaccaaaaccacgccggacggcacagaggcggcgaggatgtgcggtattgagtgttatatgctgaatctgacaccagaaccggaatgtaacgctgatgatctggatgcctttttgcagacagatattctggtgatcacattaccggcatccagaactgcgggcggtggttacctgtatgtgaaggcggtgcagaatctggtggatctggcggcggcgcgcggtgtgtcgcgggggatttttaccggttcaacagccgtttacggtaatcagaccggtaagctgacagaaaactcgccggtcgatccggtgacggaatcagccaaagcgattgttgagattgaacactggctgaatgagctgccgggcgtgtcagcggatattctgcgtctggccggtctggtgggggaatcccgtcatgcagggcgtttccttgcgggaaaaacggcggtgaaaggggcgaatcagccggtcaatctggtacatcaggatgatgtgattgccgcgatccgtttactgatccagcgtccgcacggtggccatctgtataacctgtgtgcgccgcagcacccgtcacgggctgaattttatccggatatgtcccgtcagattaatttgctgccgccggtgttcagggaagaagatatcactgaaggaaaagagattgacggcagccgcatctgccgggaactgggctttgagtatcagtaccctgatcccggccggatgccgatgacggagtaagtattaactgaccggcagtgccacgatatcgcggtacgccgggcgggtttcaatccgtgcaaaccagcgctcgatatgcgggaagtccggtctgtcgtgacacacttcccgccacggatagagcagcggcaccagtgccatatctgcgatactgaaggtatcaccggcgatataatcacgctgtgcaaggtcgtcattgagcatggcaatcaggcggttcagcgcctgtttcagctcctccacccgcgccggatcgcgctgctctgccggggttctgaccagcagccccatcatcgctttgatatacgggaacagactgccgtctgaccagtacatccattgtgccgcccgggcacggaattccgcattatgcggaagcagtgtgccgtcatcatatttatccgccagatagctgagaatggcattggattcccagagaataaattcaccgtcctgataggtcgggatggttttattcgggttcatggcgaggtattccggggtattgagaccaccgaacggcccgcccgcatctttctgctgataagtcagccccagttcagtcagacaccataagactttcttgacgttagacgagttttttctgccccagacggttatcatagtgactcctgttgatagatatgcgatgacgtgtgcgtattgtcggttattttgtgtcatgaagtgtaaatttttacacgaaatccccgtaacaggaagaatcgcgttaaagtgtcattggcttaccattcatgaaatgaatatagtattcattatcacagagttatcactcttatttttgtcacgatgtaccgggtttaaagagggaagagtaatgcagacagtaatcagttcacgggtaaccggtttaatcggcgggcttgctttcggatttttaagcatcggccacgcatttgcggaggaaacaccggttgcaccgcaggtggatgcaaaagcgtatgtgctgatggactataacagcgggaaaatcctggcatccgtaaatgcggatgagcgccttgacccggcgtcactgacaaaaattatgagcagttatgtggtcggacaggcgattaaagccggaaaagtgacaccggatgatatcgtcaccgtcggtattaatgcctgggcaaccggtaacccggtgctgaaaggctcttccctgatgttcctcaagcccgatgaccgcgtaaaattaatcgatctgaacaaagggatggttattcagtccggcaatgacgccagtattgcgctggcggaatatgtcgcgggcagccaggaaacctttgtttcgcagatgaacagttacgccaaacagattggcctgacaaatacccattttaaaacggttcacgggctggattccgaagggcagtacagtactgccaaagatatggcactgctgacccaggcgctgatcaccgatgtgccggatgaatatgttatccataaagagaaagaatttaccttcaataagatccgtcagccgaaccgcaaccgtctgctgtggagcaccaatctcaatgtggacggtgtgaaaaccggtcacaccagcggtgcgggacataacctggtggcttccgcgacagacggcccgatgcgtctgatctctgtggtgctgggtgcaccgagtgaccgtgtccgttttgctgaaagcgaaaaaatcctctcctggggcttccgtttctttgaaaccgtggcaccggtgaaagccgatactccgctgactaccgagcgtgtctggttcggggatatttcagaagtgccgctgggcgcggaaaaagacatttatgtcactatcccgaaaggcaaactcaaagatctgaaagccacttttgagctggacagcaccacgctggaagcgccgctggcgaaaaaccaggtggtcgggaaaatcaactttatccttgatgataaagtcgttgaacagcgtccgctggtggttcagcagcaggttgaggaagccggtttcttcggccgtatctgggattacattgtccgcttctttgccggactgtggcattccgtcttcggttaatcacaacagcctgccggttaacggaccggcaggctttctctccgtttaccgggcaaatccggtatcacgttcagacagtactcctgaaatcacgcctccattcttactgctgctattgttgtatgtcatctcaatgacctgcgaaggtatcttcctgcggaatttaatctgaattaaggaagaaaaacacggaatgcaccatcccgtgcggctattttttatcagagcggcaataatagacaggcagataaaacggcggtaacaacaggagagacgatgattcgtttatgtccggtcagtaaagataactgggaagcgtgtgtggatctggaagtacgggaggatcaggaggattttgtggcctccaatgtgtattccctggcacagcttcagtttgtgaataatttcagtgccgatgtgatttatgacgacgaaactatgatcggttttgccatgtacggtattgatgacgatgatggcatgttctggatctggcgctttatgctggatgcacagtttcagggcaaagggctgggtaaagccgcatttgctgctttgctggaaaaaatcactgcgatgaataacacccgggagcagccgctgccctggctgcggttgagttatgagccggaaaatgaattcgcaaaacacttttatcagcgtttcggctttaaggtggtgcagatgatggatttcggggaggaaatggcgcaaatgccgctatcttcataaggttattcccctttcaggcggcaatttatcatgctgtctgctgaattaccctgttgaaatccgtataagatccgatattacatcctgatatcggatttttttataaaaaaggaccggtatttttacacaccggtcaataaaggattaaagatatggggacaattgtgtttatcgcgctggtcattgccgtggccggaattgtgtggatccggcgggtatatctccggataaaccgccttcaggctccgatcaccgaagcttatgcggcgattgacggcatgctgcatcagcgggcggagaggatcggtcagctggtggatatgacggaaaaagccggtatccgggatgcaacgctgttttattcctggcaggatgcgtatccgcgctatacagaggcggcgacactggatgaaagtgtcagtgccgcaaatgatatcagcagtgctttttatcatattatgacgctgacagagacatttccggtgctgattgcggatccgcagtttgtccgtattcagttggggatctgtgatgttgaggatgcactgaatcccggcatccgcgcttttaatgaggcggtacttcagtacaatattgcggttcagcactatccggacaccctggtggccgggctgttcgggttcggacccaaaacactgctgctgatgtcctgatacaaaaaaccccgcaatatgcggggttttttgactttccggggaccggagttaatcagtcacacgggatcactttgattgccaggccgccctgtgaggtttcgcggtatttggcgttcatatctttaccggtttcatacatggtttcgataactttatcgagacaaacgcgcggctcactgacacggcgcagcgccatacgggcggcgttgacagactgaacagcggcaatggcgttacgttcgatgcacggtacctgtacctgcccggcgaccgggtcacaggtcaggccaaggttgtgttccatcgcgatttccgccgcgataaagacctgcatcgggctgccgcccagcagttcggtcagaccggctgccgccatggagcaggcaacaccgacttcaccctgacaacccacttccgcaccggaaatagaggcgttcattttgtacagtgaaccgatcacgctggataccaggaaatagcgggtataggcgttctcattcaccggacggatgaatttatcgtaatacgacagcactgccgggatgatcccgcaggcaccgttggttggtgcggtaacaacacggccgccggcggcattctcttcgttaacggcgagggcaaacatgttgatccagtcaacaacctgcatcgggtcagtggaagtgttatcactggtgaccagctgacggcgcagtgcagcggcacggcgtggtacacgcagcggccccggcagcagaccttcggtgttcacaccgcgctcgataccggctttcatcacgtcccagactgctgccaggtgagcagaaagctcttccttgctgtgcagcgccagttcgttctgcataaccagtgctgacagagacagcccggtttcgttgcagtgtttctgcagatcagccgcatactggtacggataaggcactttggtttcgctgtccgcagcctggccaaaatgctcttcatcgacgataaagccgccgccgacggagtaataggttttcttgtacagtaattcatcaccggcgaatgcgctgatggacatgccgttttcatgcagcggcaggttttctttatggaagttcatcccgttttcgcgcgggaaatccacttcatggcgttggtttgccagcaaaaggcgttcacgttcttcaacatccctgataaagcccggtatcgcgtcaatatcaacagaatccggcaggttacccgcaagacccataatgatggcgatatctgttgcgtgacctttccctgtcagagacagagagccgtacacatcaacctgaatgcgggtggttttttccagcagtccggccgcgataagatcatcagcgaactgtttacctgctttcatcggaccgaccgtgtgagaactcgacggaccaataccaattttgaagatgtcaaatacactgaccatattgctcgccccctatgttaaggcgtggattaatagtgtcgtgatgattcacgaagccgttacttttcagttccggctgattattgttgttgctgttgcccgccggagagggcaacagtcatttatttattaaccaaaaaacagctgatacagattgtagaacaccgctgaaattgcaatgagacccatcacaaccacaaacagattactcaggtgaccggcatatttacgcatcgcaggcactttgcggattgcatacatcggcatgataaacagcagcatagcgatgatcgggccgcccagggtttcaatcatacccagaatgctcgggtctaaggtggcaacaatccaggtggttaccagcataaacagtgcagtcagtttattcagtttagacggtgcaatgcttttgcccttggcgcgtaatgctttgttaaccagaccgttaaagccttcacgggcacccaggtagtgacccaggaatgatttggtgatagcaataaacgcgatgaatggtgcgatataggcaatcatcggnnnnnnnnnnnnnnnnnnnnnnnnnnnnnnnnnnnnnnnnnnnnnnnnnnnnnnnnnnnnnnnnnnnnnnnnnnnnnnnnnnnnnnnnnnnnnnnnnnnnnnnnnnnnnnnnnnnnnnnnnnnnnnnnncgcattttcgccgtactcttcacgcttggcgacagcaaaggcagagataatcggggaatggttaaaggagaacaccattaccggaatcgccagccacagcgttatcagcagaccatgaccggtgacactggccgtattgctgtcgaaagtgagggttttgaatacatctgtgctccagtgcgggatcagatacagcgccagcaccatcagaaccgccacaaacgggaataccagcacactcattgccttgacaatcgcggcctcaccgaagcggataatacacataatcccgataatcagtaccagtgacagaataatgcgcggcggcgccgtcataggcatctggttaacgataaagctttccacggtgttggtgatagccacactgtagaccagcagaatcgggtagatagcaaagaaatagagcagggtgataaggccgccggctttggaaccgaaatgctcttccaccacttcagtaatatcttcgcccggatttttaccggacaggacgaagcggcacatgccgcggtgtgcgaaaaaggtcatcgggaaggccagcacggccatgatgataagcgggaccagcccgccgataccggcgttaatcggcagaaacagtacgcctgcaccgatagcggtaccgtacagtccgagcatccagacggtatcggacttacgccatttacgataatcattgctggtgtcagtcttgctgaccacaacctgcggttgtgttgtatccatagaagtctccaaaatgtacaacaataacaacaattaaaattttgcacgctgatctgtgcatttattcgtctctgaaatagggtctatgtacgtaaccagataaaaaaataagtaaagctaaaaagtcaccggcaattgcttaccggtaaaaataataaacagcagcgacctgatatctgtaatggataaataaaggtctctgcattaattcatattcaaaagtacctgaaattgataactctctttctgatggtgaaaatatactgtttttcagtggaaaataccgtgatcgcagtctcaaatgctataaatcacagtaaaacaggctctgttgcaagatttgataaaattgttaatccgggtttacggaatggagtatgccgaaacggcataaagggattgcgtgctctgtaataatgcggtttttgtcggtattctatttaattaaattaatttattcatatattaataaatatatcatccgcataaatcgcattatttagaaatagcgaaagcctgatttttacaggactaaaaaccctgtttaagttgtggtttatttgtgttatttgttgtttttaatatggaaaatattttttgcttaagtgcgtgactgtaccggatgtgtgctgagaggcgagcagcataaaatatggctttatataatgatcactctgtatatctcagatgattaaaataattattttaatcacgaattaagttacttgcgtgatactggtttcatataaaacaaaaatgttaaataaataccagaataatattctgcgaacaaaaatagtactgccggcagtgaaaaatatggttaaaaaaagatcgccggcggcaattaaacagcgataaaaaaataccggcgtgcgggccggtatcacgccggtatcagcagaacccggcaggttgcccgccggagaggccaaccgtcatgtacttatcagccgaaaaacagctgatacagattgtaaaacaccgctgaaatggcaatgagaccgatcacaaccacaaacaggttgctcaggtgaccggcatatttacgcatcgcagggactttgcggataacgtacatcggcatgataaacagcagcatggcgatgatcggaccgcccagggtttcaatcatgcccaggatgctcgggtccagtgtggcaacaatccaggaggtcaccagcatgaacagtgcagtcagtttattcagcttagacggtgcaatgcttttacctttggcgcgcagtgctttgttaaccagaccattaaagccttcacgggcacccatgtagtgaccgaggaacgcgttggtgatcgcaataaaggcgactaacggtgcgatataggcaatcatcgg

SEQ ID NO: 23 - DNA, 365217 bp, unknown
  Altogen 322075 strain
  misc_feature (39285)..(39285): n is a, c, g, or t
  misc_feature (42801)..(42801): n is a, c, g, or t
  misc_feature (89209)..(89209): n is a, c, g, or t
  misc_feature (214280)..(214280): n is a, c, g, or t
  misc_feature (215656)..(215690): n is a, c, g, or t
  misc_feature (215728)..(215779): n is a, c, g, or t
  misc_feature (247546)..(247549): n is a, c, g, or t
  misc_feature (258231)..(258265): n is a, c, g, or t
  misc_feature (258309)..(258405): n is a, c, g, or t
  misc_feature (258452)..(258483): n is a, c, g, or t
  misc_feature (263019)..(263044): n is a, c, g, or t
  misc_feature (269243)..(269243): n is a, c, g, or t
  misc_feature (320652)..(320759): n is a, c, g, or t
  misc_feature (333362)..(333449): n is a, c, g, or t
  misc_feature (338964)..(338964): n is a, c, g, or t
  misc_feature (362985)..(363113): n is a, c, g, or t
ttcgtgacccgtattaccggccgcattacggacaatcgcggtataaacataagtattaccgtcagtcaggccgctgtcggtaaaggtccagttattccctgtggtcacagcaaaaccaacttcagtatcaccgcggaaaataacgactttttcaccggaagccaggttttcactcagtgtaccgttaagggtcggggtatcatcgttggtgtaaccaccatttttgacggtttccaccagcggcagtttgtcatcctggatatcggtgataatcacagtctgagacgggaacccggtatccacaataatgctgaattcatcagacaggtggccttcgttaccggctttgtcgatcacttttgcggtatagatataggttgcatcattggccaaattgtcagtgaatgcccactctgtaccatgcaccgtggctgtgccgaccggtttaccgtcgcggtaaaccacaacacgctcggtggcatccagctccgcatccagtgtaccgacaacggttggtgttttgtcgtccgtcacttcaccggacagaatatttttctgaacaacaccttcgtcatcaataacataagcaatagtgaccgtttgtgacggcggtgtggtatcgaggtaaatatcatagtcatttgacatcgccccctgattccccgcgctatctctcacaaccgccgtataaatatagtggccgtcgttattttcaagagagtctgtgtaggtccaggtggtgccgttaacggtcgctgtaccgaccttcgcaccgtcacggaagatgagcacctcttcagagccggtcagcgctgatgtgatgtaaccgttcagtgtcggcgtggagtcattggtataaccaccggcaaggacggtaccggttaccggcgcaacgtcatcggtgatgttcaggatgtgggtgctctgggaagcaccatcagtattgagcgcaatactgtaatcatttgacggctgactgacgttacccgccaggtcttccaccttcgcgtaataggtgtactgtgaaccgctggccaggcccgcatcctcataactccaggatgtgccgctggtcacagctgtgcccactttcacaccgttacggtaaacggccaccacttcgcccgcattcagtgccgcactcagcgtaccgtgcagggtcggggtatcgtcgttggtttcgccgccctgcggaattttaccggtcaccggatctttgttgtcggtgatttcagtcagggtgactgtctgtgccggtgcaatggtatcaacgttgatttcatagttattggatgccgcaccgaggttatgtgccgcatcctcaacatacgcagtatagatatgctgaccatcagccagaacggattcttcgtgatatgtccagttggtgccgttaacagtggcattaccgactttattaccatcacggtaaacagacaggatttcaccggcattcagcgcggcgctcagcgtaccgttaacatccgggctggcgtcattagtccagcctttatggtcaactttggcaataaccggctcaacatcatcccagacagaggtaatggtgactaactgtgacgggccggtaaatttgatattgataccgtattcattggaatacagaccggtatttcctgccgcatcctcaacccgggcgctgtaggtgtaatgactgtcattggccaggccggagtcggtatagcgccatgcactgccgctgacttccgcttcaccgattctgacaccatcacggtaaaccaccagaatttcattgtccgccagaactttatcgatctgaccgcgcagttccggtgttgtatcattagtcacaccattattgccgacaatccctgttcccggcgcaacatcatcatagataccatccagtgtcaccgtgtgatcaggcgcggtggtatcaatatgaatagtatagccttttgaaacggcaccggtgttaccggccgcatctctgacaacggcggtatagacataggtttcaccgtcgttcagaccgctgtcagcgaatgtccagccggttccgttaacaactgctttgccgatttccgcaccgttgcgcagaacaacgacatattcatccttttctgtcgggtgagacaaaataccgctgataagcggtgttgtatcattggtataaccattgtccgggacattatcaatgaccggtgcaacatcatccgccacgccggtaataatgatgctctgagtcggtgcggtattatcaaaaataatgtcgtaaccatcagatggttcacctttattaacaccggtagtgtgctcaacgcgggctgtataggtgtaagtgttatcgctgattaaaccgccgtgagtatcttcaaatacccaggttttgccgtctccggcaacttttgcggtaccgatttttacattgttacggtaaataatcaccgcttcatctgcggctaaattcagtgtcagatgcccgtgcagtgtcggggtttcatcgttggtgctttcaccgcgcttaacactgccaatctgcggtgcttccgaatcctgaatgtcatcgataacaactttatttgtcaccggtgcttcaactttaggttcttcttttttaccgccgccgccgtggttgatcatcagtgccatggcaccggcaaccgtcagaccgtaagcaatcagagtaattaagccccagtcagtatcattggtatcccaggtgatcggtgcctgctgagcgctgtcgagaatctgtggtgcagactgatggtcgttaaggctggcaacctgctcctgctcagaggaagacaacgggacatagttatggacagtgccgtcagctgtctggccgataacctgcgcgggatacacataatagtcttcaatgacaatggaagggtctgtttcaccctcaacaaataattttaaattgttaccatcacgtacggcgataatttttgccggggcaaaaccggtttgtttatcgacaacgatataatccatgccttcctgtgcatgcaaaaataatgtattgccttttttggttgttgtggcgaacttggcaacacgacttattttatcaactaccccgataactatagacataggttaagctcctgaaacctttttttatattctgcgcagattacgtaaaaacacccggctctggtaatttctcaaaatgaagataatgcaatacatacccgttactctggcgagcaacaggtttgaaatttcggtgaacatattatgatgttgtgtaatggcctttctttaaaaatggctgataattacatatgccttttacatcaaacgggtaagaatagatatgtgaagagtgaagataaaattattagattaagattacactatttacagtaacatagcagaaggtatatgaacacgttatgctcacggtcaataaaaaaaaccagagtggctttaacaaaattacattaaaaaataaaacataaaaaacacatacactttatttgacgtgaaaataaaaatacaaaataacaaacacccgacttaccaatgaaaataaaaaacaaataacagtatatatactgaagatatttcttatttaaaaaatactattattttcacaatgaaattattttacattgaacatatttaaaatatatccggtcaattataaagacaaactaataccttatttaaccctcaataaatttgtataaataaaaaacccgccatatgacgggttttcggtggcggactgctgttttttactgctgtgagcgcatatccatgatcatttttccgtcatagtctgcaccaacaacaatattaggtacctcacctttatatttctctgctttgatttgctctatttcaagctgcttccagttaatcatttcgcgggtaattgtctgctgtaacacggcgttcgcttctgattctttctgagcggcatataaacgggcatccgcttcctgacgcattgcgtaagagctggcctgagcattacgctcacgggcaagcgcctgctgttctgaggactcacgttctgcctgtgcgataaccacttttttctgtgccagttcacgttctttctcagcttctgcttttgcctgatttatctgctcctgacgcatcttggtattcacgacctgctcctgaaccacttccggcagcgtaatatcctggatcataatctctttgatcgtatagccgtaaggtgaagcataactctgaatagcatcacggatagattcctgcaatttccgctgggtatctgcggtatacagatcctgtgcgttggcaacatctttcccgaattccagaatggtggaaatcagtttctggcggacatatttatccagtgcttcactttctgtaccgccgttaatacggagaataggagctttggcgccatcgaactggagcatcaccgtaatatccacgatggatttcagtttgtcctgtgacggtacgcgtaactctttcagtgatacgcggatatcttttgttgaataagtatcaaatgtcataaacgggttaatcgggaaatgcagcccggcatcataagcgaccgggttgaccttacctaaaaaggttccgacttttaccgaaccatcctgcacaatggtatatgaattaaaagtaaccattcccgcgacgaggagaataacggcaacaatcatcaatttgataactgacttcagtttgaccggacttactgcctgcatcatttgcatgtctcatccctataagataattcttagttaatgtcgtttttataaatactgttttatgtatcagctacacctttttacatcgctattattcataaaatacagaaatgagcaaatgcagcccgccaggcgaataatgataataatctgtgataccggatgtcccggatgcggccgtgatgattatgccttcagaagggaaaatacatgtcattaataccgcctccggtataaaaacagggaaatataacgttaacagcacgtttattgacggaagaggacaatccgggacaatattccgggaaccgaagttatggtgtatttatggcagcgataatacatctttcgctgataagtgattatgagtagtatgtaagagcacttaatagtgctgactttgtaagccgaacatccggcggaaggattctgccggatgttcttttacggatactgcgggtcagacaatattagttattcacatcaacaaccacacggccgcggatttcaccgttcagtaagctgtgtgctgcaggaatcgcttcatttaacgggatcacacggctgatagtttccagctgtgccggatcagtcagttcagccagttgtttccatgccgccacacgatctgcctgcgggcgcatcacactgtcgataccgatcaggctcacacctctgaggataaacggtgcaacagtcccgttaaaatccatgccctgtgccagaccgcaggctgccacaacaccaccatactgagtaccggcacagacaccggccagtgtgtggctgcccacactgtcaatcgccgccgcccagcgctctttggtcagcggtttgcccggtacggataactcattgcgatccataatttcagatgcgcccagggtatcaatcagatacgcggtatcagccgtacggcctgtggaagcgataacctcaaaacctaattttgacagcagagaaaccgcgaaactgcccacgccgccgctggcaccggtcaccagtactttgccggattctttggtgatcccctgtttcagcagcgcctgaaccgccagcattgcagtgtaaccggcggtaccgatcatcatcgcctgctttgtgctcatcccggccggtaacggtgtcagccagctgtctttcacttttgccacctgagacagtccgccccagtatttttcgccgacactccagccgttgagcagtactttgtcaccaactttatagtgttcagagctgctttcagtaacggtaccggcaaaatcaattcccggaaccatcgggaaactgcgcacgaccgggcttttgccggtaatcgccaggccatctttatagttcagcgtggagtagtcaatctgcacagtcacattgtgatccggcagttgtgattcatcgagctgagccagctttgcggtgtagccatcagtattttcaatcagaatgcagttaaacatggtgttatccttttatgaatatagaccagttgtctggttaattgtaaaaaaatttattaaatactcaccggcgcgttaacaacggcgatatttaataaattattctgcaacaatctctcaggctttctcagccagtatctgcgtcataaaaacagtgataaacagatccagcggttcactattgcgggtcagtttggcacgcattaccgccccttcccagcccgtccagaaaaaagccgccatttgcctgcaatctgttttagcggaaataagctgctgtttctgtgcctccagaaggcagatttccactttcttctgccagccggtaataatctcatcgagtatttcacaataccctgccggcaggctggtcacttcctggccgagatttcccaccagacacccgcgctgccagtggtatttttccatcccggctttggcggtcagataaaatgcccgtaacctttccggtggcggcagtgtgatatcagacaaacatttatccagcagacgggaaaaatagctgtcgtaattacgcatgatttccagaccaaactgctctttactgtcaaagtaataataaaaagagcccttcggcacaccgacctttttcaggatcccgttgatatccgatgtcatataccctttttcggtaaacatctccatgccactgcggatcagcattttttttacatccgcacccgcatcatgatttttcggcggtcgtccccgtttcggttttgtgattactgatgtcattgcgtctttacctctgtcatgcggaataatatagaccggttgtctggtaaatgccacgcttttttatccgggtaatttccggcaccggtttattcgtagataaaggtaaaatcgactttgccgttagcgctgccttctgtgacaaaatcattgctgtaacggatatagcgggcaaagaaaggaaaaatataggtttcgtctttttgtacattggccgtcagcgcatttttctgtccgatagccagcggattttcatttttatccagaatctgaataccggcaccttttgacactgacgcttcctgcgtcagcatcagaatatcattacgtccggtcagcaccggcccgtcaaaacggatggagacattcagcgccgggtcacaatctttcagctcaatagtaaaaggaacagacggggttgtactgccgggacgggggaaaaccagacggctgttataccgctccccacccccgccggtcagcgataattttttggtataattactgaccttacacgttccttctttaatcttaccattcagattaataatcactgaattgcccgccattaccggggaagagatcatattgaggtagcaataattgctaagccttatgttaatcaattgctacaatttcattaatgcgcggtaatgcgctaacacttaaatctatatttttacgccggttgcgtttagccggctttttttatacctaaactcactcaaactcgtcaaacccctcaaactcatcaagcataattacctcgttatcggaattccggcatcggaacaatatcaatatgttagatacatgcgggatttccccgtatctaaatatatcaattctcgtttcgtgacagaatcaaggtatatcagtatgttataggaaataaaaagtcgcacattggttggccgtgttcttgagagagagaatgcactagatatagaagcgcccctgtgtagggtcgagctacaaagggacataacaaacatacagggtgttacaggcataaaaaaaccccgcgagtgcgaggtttagaatttgtgtagtgcgctaaccgtaagatgcccactatttggaggtaataaggcactttcggacaaaatgcaactactatgattactattagtgagaaattacagaatactataagtgatttttctccactcaaattgcatatcatggtggagatgagcacaaagaaaggtcaattgtgtaatactgagtgaaaagactggttggtggacacttttgataattattagatgttaggtaataacctcctatccaagtaatagggaaagataaaaaaaaccaaataacaataaacatgcctattttttgataagaaatatttttttttggttttttcattattatttgagttattatattgtataacagacttagaaaaaaatagccaagaattataccagaaagacataaggtggatgaatatgataatgaaataacatcagccgcattaaaaaaatcataaaacgaaagcaggctcaataaaaatacacccaaagaaaccataaagaataaaaataaacaaaatgaaagttttattaatttccctttattcattatctatttcccttccagtatttatcgccttctggttgatttttaacctctctcattttttcaataagtttttcactgatatgaaatttttcatctatataatttaagccataagcaattccaaaacctaaaacgaatacaacaacaccaacaattaaagggcttgctcctatagataaagcggctgcagcagctataaccgtagacccgcctccccaagctatgaacgaagctactcccggcttagccacatccatcgtgatatccccgataaaattatacaggtcgtaatcattctgaaaaataagctgtaacaccctaaacccgactgcggcgataaaggtatagcgcataccatcaatggttgcagcattcagtcctcgctgaccaatgcccataccaattagtttaccgttatttgcaagatagtgagtcgcgttcaatctatggcgtaatccggcataaccgctgagtttgatcataacgctgccgttggccgcaacatattcagttgcagtaataccaaatttaaaattaaactcacgcaataactccgctacataggaagcttcgcggatattaccgatataagaactaacaaaggaataagcatcacggccataagatatgccgttatttctcaattcatccagaacaatcctggcttctggcggggtcagcaaaataatgacccgttcattgtcccgcaactacttttccagcccgatagcatcaaaaaattcatgttgaggcttaagttggttgatacctacatttccgcgcaggtaatcacccatatacccactccatgtcggatcatattttttatcgctcatgtactccctcacatcagataaaaatacagtaccgacagcacgccgatacttaagttaaatttcaatattccataatccctgtgaaagcgcaagctcgcttgaattgcatatcctgaatttgtttacggcgctttcaattgagcgccgggcataattaaagtgtcaacgcgctcagtacgtactacctgctcaacaatcacagtaccttccatattggtgacacccggatgcttcatcacctctttccggcgataaatcagcccttttccgccgcagtactgacactggcagacagaaccagctgaacgggcgtaatcctcaaatgccattgcggacagaatctccatacactgagcaacacgattaccggccgctttggccaccagcttcggcaccgtgcgcagggcgtgctgcgtcagtgcctcaacagtcctgaatttatcctcaatactgacatcatttttaccaaaaaatgcatgcataaccgctggaggacttatttttgtgaataataaaaaaagaaatatcaccattccaacaccagggaattaattacttataaaaagtaacggctttttattatctaaattgtgtggagagataaatatcatatatagcaaccagtaccgaaaaacatattgatttcgtcaatatcactccggatcagatttgtatcgaagatatcgcgcgcggcctgtcaaacgaatgccgttttgccgggcaactggagagtttctattccatggctcagcactctgtatacgtcagccagattgtgccgccggaatacgcactggaagcgctgctgcacgatgccgctgaagcgtatatcaaagatatcccctcgccgctgaaagccatactaccggattacaaagtcgtggaaaaacgcatagaggcggttatctgcgagaagttcggcctgccgcaggcatatcaccagtttatggcgcgatttgaaatactgatttctggtaaacaacaaaaaactatttcatacataaaacccgaacgcgatcctgatggttactgggttcaccctggtattcctcgtttggaatcgaatcaggaaatagagcagtggtgcgatgaaaacaatcttgaatacctggcggtgttttgccgtgacgacattgataacttccacccagtgtggttcagctactttgaagaaggtaataccaatatttcagcgtgggaaccaataaaacccgatggtgatggctggtttatcgcctggatagcagacaatgaagacggcccgatctgtatgtgggtcagccctaaaaacctctaatcgtatacggcgatgtgtggagagaagactatggctacaaggtttattggtttaaaagagatgtgcgaactaaccggaaaaagccaccctacactatggcgcatgtgggcaaaacgaaacgaattcccgaaaccttccaaaacaaaaagcggaacatttttgggatgggcagaagctgagtatgaaaaatgggttgaatcacaaaaaagataaagacatccgttaaaacacccgtgcttttattattgatagtaactgtgcgggtaactatttgatttacatggtacgccctacaggattcgaacctgtgacctacggcttagaaggccgttgctctatccagctgagctaagggcgcgctgaggaaaaaaacagcgggttaactgcttgatgcaccgtggattatacggctgcgacgcggcgagtcaatcagaaaatcagttatcttcggcagttactttctgacaccttaataaaacataactgacagacggaaaatgttctgacagaatagtgcccatcttttatctgttttatggatttttacacgatgtcagcaaaaattatagacgggaaaacgattgcgtcgaccatacgtgccgaagttgccgcaaaagttcagcaacggattgccagcggaaaacgggctcccggtcttgccgttattctggtcggtgagaaccccgcgtcgcagatttatgtcgccagcaaacgccgttcctgtgaagaagtcggatttatttcacgctcttatgacctccccgataccaccagcgaagccgaactcctccatctcattgatgaactgaataatgataatactatcgacgggatcctcgttcagcttccgctgcctgccggcattgataatgttaaagtgattgagcgcattcatcccgataaagacgtcgacggttttcatccttataatatcggccgcctgtgtcagcgtgcgccgaatctgcgcccgtgcacaccgcgcggtattgtgacgctgcttgagcgctgcaatatcaatacatttggtctgaatgccgtgattatcggcgcatccaatattgtcggccgcccgatgagcctggagctgctgctggccggttgcaccacaactgtcactcaccgctttaccaccaatctgcgtcaccatgttgaacacgcggatttgctgattgtggcggtcgggaaaccgaattttattccgggtgagtggatcaaacccggcgcaattgtgattgatgtgggcattaaccgcctggaaaacggcaaagtggtcggcgatgtgaattttgccgaagccgctgaacgcgctgagtggataaccccggtgccgggcggtgtcggcccgatgacggtcgccacactgattcagaatacattacaggcctgcgaagaatttcacgataaggacgagtaacaatggatatttttaatcttgacggccatccgcatgttgaattgtgcgacctgctcaaaattcagggctgggccgacagcggtgccgccgccaaacaatttatcgctgatggtcaggtgactgttgacggtgagactgaaacccgcaagcgctgcaaaatcaccgccggtaaagtggtggaatttgccggtcagcaggtaaaagtggctgaataacagtaatctgtgaataaaccagagcactgcctctggtttttttatccgtataataagagccgcaaaaaatgaaaacacaaaaatttcagcctgtgcagattgccctgcactggtttatttttctgcttgtgattgtcgtttatatcagcgccctgttacgggataatgctgacgaaccactgagaagtattctgtccgggctgcattacagttgcggtatcgctgtcggtatactgatgattgtccggctggccgtcagaataaagcaccgcgcaccggctattattcccagaccgtcaccgatgataaccggtttatctcatctggtgcatctgatgatctttgtgatatttatcctgttgccggtactcggtttcagtattaaatatctgaacggttatgactggtcattattcggtatcccgatgccggtctccgccgcaccggatgaagatctcgcgtacagcatacagaatattcatgaggtcattgccaataccggttattttattatcggcctgcatgccgccgccgcactggcacatcactatttctggaaagataataccctgctgcgcatgatgccgcgcaaacgggactgattatcagccactgaataacaaaacgcccggcaatcatgaccgggcgtttttaatacggaaaacggtatttatatcagctgttaacgatatttcttgtggtattcaccacgggtggctttaaattgttcagccatggctttcgcttccggaattttaccttcttccgtcagtttcagtgcttcatcaatttgtccggtcaggacatcataaccgtgatggtaatccttcacttctgcgctgtccgccgctttacctttcagtttggccggtaactcttctctggcactctgtgccgcagcgcgcatgtcggtcagtgctgttttcagcgctgccgcatcatcggttttttcaacaatctgcagattcgcgttcagcgttttcatattatctgacagtccggcggcagatgccgtcattgcgccgaatgcacagacagacgccaccagcatagctaacatatttttactcatcggatgcttcctttatttttaatataaaagtacgacaaagacatcacacaataaagcaggtgctgtaacagaatagcggataaccggctgttgtgcctgcccggtaaaaataaagtgatataaaaaagcccggcagtgaataatgccgggctttccagtcagaatataataacgattacttacggcgccaggtggtgccctgcggaccatcttccagcacaatacccatatcggttaatgcatcacgggcagcatccgccagtgcccactcttttgaggcacgagcatcattacgctgtttgatcagtgcttcgattttcgctgcatcttcatcactttcgctctgcgcaccgctttgcaggaactgctccggatcctgagtcagcagccccagcacaccggccagctggcgcagttgtgccgccagaccgtttgctgcagtcatatcttcctgtttcagacggttcagttcacgcgccatatcaaacagtacagagtaagcttccggcgtgttgaaatcatcatccatcgcatcgcggaaacgatttgcgaattcctcattcaccaccactgccgcgtctttatctgtgccgcgcagtgcagtatagaaacgctccagagcagtacgcgcctgtttcagattctcttccgtgtagttgagctggctgcggtaatgtgcggacagcaggaagtaacgcaccgtttccgggtcgtaatagcccagcacatcacggatggtgaagaagttattgagggattttgacatcttctctttatcgaccatcaccatcccggagtgcatccagtaattgacatacgggccgtcgtgggcacaggtggactgcgcgatttcgttttcatggtgcgggaacatcaggtcagaaccgccgccgtgaatatcaaaatgtgtgcccagctgtttgctgttcatcgcggaacattcgatatgccagccaggacggcctgcgccccacggggattcccatgacggctcacccggtttggacattttccacagcacgaaatccatcgggttgcgtttcacatccgccacctcgacacgggcaccggcctggagctgctccagatcctgacgtgacagcaggccgtattccgggtcactgctgatatcaaacatcacatccccgttgtccgccacataggcatgaccgcgatcgagcagtaactgcgtgatctcaataatctctttgatgtgatgtgtggcacgcggctctgaatccgggcgcatcaggttcatggcatcgaaatcgcggtgcatctccgccaccatgcgatccaccagctgatcacaggtttcgttattttcattcgcccgtttgataattttgtcgtccacatccgtgatgttgcggatatagtttacatcatacccggcgtgacgcagatagcgcacaatggtgtcaaacgcgacaaatgtccgcccgtgtccgatatgacacaggtcgtaaacagtgataccacacacgtacatcccgattttaccggggttaatgggcttaaattcctctttttgtcttgataaggtgttataaattttcagcataggactattccattaaaagtctgtacgtgttgatggtgacttctgttaattaattgataataaatactttattttttatatctgtctgcggggatcaaaatctgagacaggtcgggttattgaaacgcgaataccctgcaaatgcaagaaagaccctgtaaaacccggtgattataacaaatactgacgcagattagtgagtatgatataacacaccccggagataaaaacggcagattattgcctttataatataagcagcaggaaattattatggtaacttttcatacaaatcatggtgatatcgtcattaagacgttcgcggacaaagcaccggaaacggtcgcaaacttcctgaaatattgtgaagacggtttctacaataacaccattttccatcgtgttatcaatgatttcatggtccagggcggcggttttgaaccgggcatgaagcagaaaccgactctcggtatgatcaaaaacgaagccaacaacggtctgaaaaacaaccgcggcaccctggcgatggcccgtaccaacgatccgcattccgccactgcacagtttttcattaacgtggttgacaacgactacctgaacttccgttcagaaacaccaagtggctggggctactgcgtgtttgctgaagtggttgaaggtatggatgttgtggacaaaatcaaagccgttaaaaccggtaacagcggtatgcaccaggatgtgccgcgcgaagatgtgatcatcgaaagcgtgactgtttctgagtaagtatgaccacgcttattattgcagatttgcatttaaatgagcaggagccggcgatcaccgccggctttcttcgtttcctgcgggaacaggcggttcacgcatcacagctctatatcctcggtgatttttttgattactggattggtgatgatgacccgaacccgctgcataaaaccgtggctgatgcactgaaatccctcagtgacagcggcgtgaagatcttctttatctgcggtaaccgtgatttcctgctgggtgagcgctatgcccgtcagtgcggcatgaccctgctgccggacacacaggtaattgaagccgaagggcatcagatcctgatcctgcacggcgataccctctgcacggatgatacggactaccagcattatcgccggcgtgttcacactccgtggatccagcgcctgtttctgtggctgccattgtcgctgcgcctgaaaatcgcgaagaaaatgcgcgcgggcagtcagtctgccaatcagcgcaaaagcgaagcgattatggatgtgaatcagaacgaggtgatgaaggcattccgtcagtaccggacccgctggatgatccacggccacactcaccgtcctgcggtgcatgatgtctccgctgacggcgaaacgcactttcgcggtgtcctcggcgcgtggcactcacagggttctgcctttaaaatcaccccggacagcatttcactgatcttctttccgttctgagccgttatctccccgtatttgtgaaaaatccgtgacgcaaacgttttccttcgtgatttaccgtgatattatgcccgtcttcttaaccggccaacggccggacgtctgtcaattttcgtgacgcgggatgtacaggagcaccgaaaacatgaacgccgcctcttcgcaacaacactcaccggcagccaaagtggctattgtcatgggatccaaaagtgactggagcaccatggagcacgccgcagcgatcctcgatatgcttcaggtgccttatcacacagaagtggtttccgcgcaccgcacgccggacaaactgttttcctttgctgaaaccgcaaaacagaacgggtttgatgtgatcattgccggtgccggtggtgcagcacatctgccggggatgctggcggcgaaaaccctcgttccggtactgggtgtgccggtgcagagtgccgcactcagcggtgtcgacagcctctattccattgtgcagatgccgaaaggcattccggtcggtacgctggccatcggcaaagccggtgccgccaatgccgccctgctcgccgcacagatcctcgccctgcatgatgaggcgctgcttacccgtctgacagactggcgtaatgcacagaccgacgatgtcctcagccacccggatccgcgggaggccaactgatgaaaccggtgtgtgttctgggaaacggccagttgggccggatgctgcgccaggccggtgagccgctgggtatttcagtttatccggtcgggttagatgccgagccggaagccgttccttatcagcacagtgtgatcaccgcagaaatcgagcagtggccacagaccgcgctgacacaggtgctggagcagcacccagcctttatcaaccgcgatatttttccgcgcctggccgaccgcctgccgcagaagcagctgatggacaatctgcatctcgccacctctccgtggcagccgctgtcctctcctgatgaatggccggacatttttgcccgcctcggggattttgtcatcgtcaagcgccgtaccggcggttatgacggacgtggtcagtggcgggtgcgtccgggtgatgaagcttctctgccgccggagatttacggcgaatgcattgccgagaaaggcattttgttttccggtgaagtgtcgctggtcggtgcccgtaaccgcgccggggaatgtgtgttttacccgctgacccgtaaccatcacgaagagggcattctgcgcatgagcgtggccttcccgcagacacagaacccgcttcaggaacaggctgagcagatgctgggcgcgatcctcactgagctggattataccggtgtgatggcaatggagtgttttgtcacagaagacggcctgctgattaacgagctggcaccgcgtgtgcataacagcggccactggacacaaaacggtgcgtccgtcagccagtttgagctgcatctgcgggcgattctggatctgccgctgccgcagccggttgtcaccgccccggcggtgatggtgaatattatcggcacggagctgaatacacagtggctggcacagccgctggcgcatctgcactggtatgacaaagaagtacgcccggcgcgtaaggtcggtcacattaacctgtcacatccggatccggcacagcttatcgccgcactcagcgggctggcacaggatttaccggcggaatatcagtcctctgcggactgggcaaaaacaatattaagctggtagtcggcacggtttccggcgacaatagtcccattctgatgcccggtgttcagccgggcattttgctttttacgccgtttccggagccgggatgttttcgtcagatcgccgcttaggtcctgtttatcaatggaccatactcaccctgctggggctggtttatttcctgaccaccgctactaccttcacctcattaggcgtggttttacccggcatgctcaaagagctgaactggagctggacagatgccggtttcggattcacgctgctcgggctgacctgcgggttatcgagctttctgcctggtcttcttatccgtaaaactaatgtccgcctgacgctgctgaccgggctgctgctgtttctggccgggttttacagcctgtacaccacacagtcaattcaacgctattttatcggcaccgcctttctcgggattggttttacttttatggccaccgttcccggcacttatgtgatttcgcggctgttcagccgtcagtcgctggcgtttggtttttactttaccctcggcgggctgggcggtgtggtcgggccgtggatctattttctcgccgcgcatgtgttcggctcctggcggatccactggctgatctccgccctgacgctggccgttgtcaccctgatcaccctgctggtgatgcgggaaggccgccgtgaaattactcatgcccgtgctgtcatgtggcagcagaaaaaacagagttcccgcatctaccgcagtcaggcacgctggagcgcccgtcaggcgctgagaacctggcagttttatatcatcgccgcctcttataccgcgtttttatggtgcggattcaccgtaaatagctttgccgtaccgcatattatggataaggggttcagtgaaaccgttgccgccacgctgctcagtaccatggcctttattaatgctttttcccggctggccggcggcgctatcggggagtggctggggccgaaaaaactgctgattatcagccttgccgctattacattcggtgtgctgacattaagtatcgcgaccagctggccgctgctgatcctgtttacggtactggtggggattggttacggcatgacattcctggcctccagcgtgctgctggcaaactatttcggccgtggtccgtatctggagctgttctctgtggtgaacctgatttccacctttgcctgtctggcaccgttctttgccggtgccgtcaaggattacagcggcagctttaccccggctttcctgctgatcgccctgccggtaattgtgattctggcggccacattctttatgcggccaccacaacacaaaccggtcagagcatacacatcgtcgccggactaactctgcaggaggcggtattgctgagagtccccgagcaggcggatccccagcacactgccgcagagtgacagcagaaaaccaccggccagcggcagcccgacccccagcggccactgcggctgccactgaaaatcaaacacgcggggctgcagcagccacagggctgtctccgcaccgagcgccgcgaccactccggccatcgcgcccagcaaggcaaactcactccacagcgtgcgccacagcaggcgtttaccggccccgagcgtacggtataccaccagctcggtccggcgctggttcatccccacctgaatctgggccagcagtaacagcacgccgcaaatcagcaccagtaccaccattgcttccagcgcacggctgacctgcgcgagaatggtctggatctgtttcagcatcgatccggtatcaaaaatactgatggacggatacttgcggttcatctgagtgattaatccgtcattaccgtcatagtgaaagctggtcagccacatggcgctctggttttccagtgaggcgtgattaaagataaagaaaaagttaggccgcatactttcccagtccacctgccgcacactgctgacagtcacggtaaacggccgggtatcaccggtaaaggtcagggtatccccgactttcagcccgagttctttgaccacttccatctcaatggagacttccccgggtttcggcggccaggtgccgtccaccagctcattgagcggcggcagcgattcctgccaggtgaggctcagttcgcggcggaccgtgttgttgccaggatcacgcgcatccgcccatgccagcgcagtttcgccgttaataccggacagccgcgccagcaccaccgggtaatattctgacggcgttacattgtgtgaagccagcagctgattgaccggcgctatctgttcctccgtcatattcacgaggaaatagttcggcgtatccggcggcagttgctgctgccagcgcccgatcaggtcaccgcgaaccatcaccagcaatcccagcagcataaaggagagcgcaaacgcgccggtctgcaccagtgtctgaccgggctggcgcagcagacggcggacagccaggcgcagactcagggcacggaacgggattttggccagcagccataatccaccgtaaccggccactgccagcagtgcggcgatcaataccaccccggccagcaccgcccagagcagaaacgaggcattggtcagcaccgccagcccgcctgccacaatcagcaccgccagcggcagataccagcgcagcggccagaccggcgccaccacatcatcacgcagtacgcgggtcggctgtgtcagcatcagctggcggtaaggccgtgcgcccaccagcaacgtgatggcaagcagtgtcagcagtgcccacgcccacggccataatccaggatccggcagcgccttcggcagcagaggtgccagcaggctcatcaggattgcatcaaaaatcagtcccagcagagatccggcaaccattgctgccgccatcagcaccgcccactggccgaccacccagtaacgcagctcgcgccgcccagctccgagtgttttcagtacggcaatcagggtgtgacggctgcggcagtaatgcgacatagcaaccgccactgcggcgatcgccagcaacaatgtcagcagcgcagagagcaccaggaactgctgagcgcgatcgatcgacttcgccagcgccccgccttcctgtttcagggtgacccagcgctggtcaatccgcagcgcatcttcatactgctgtttaaacaccgccaccgcatccggcgcaccggcaaacatatcgcggtaggtcaggcggctgcccggctgtacggcaccggtggcttccacatcctgtaaattgatcagtacacggggcgccatctgaaacgggttaaaaccgctgtccggctcctgaataagaaaaccggcgattttcagatcggtatcccccacttccagcatctgccccggttttaccgagagcagctctgccagacgcggcgcgatcaaaatctctccccgcgccggtttcaggccgggcggatcggtttccagctcgccgtacagcggataagcgtcatccgccgctttgacatacaccagctgcggcacgtcattggcaaataccatagtgttgaaactcatctgctgactgagcgccaggccgctttcctgtgcctttttcagccaggtttcatccgccggatgcgagccgcgcagtaccagatcgccggccagatagtcacggctctgataattcacactttgattaatacgatcgccggcgcgtcccagtgccagcacacaggccaccgccagcgtcagtgacagccagaccaccagcagagacggcgtacgccactcccgccagaaccagcgccagatcatgccagttcctccagcttaccgtctgacagtttcaatcgccgctgacagcgggcagcgagggtcagatcatgcgtgaccagaatcagggtggtgccgtagtcgcggttaagtgaaaacagcaaatcagcaattttgtcgccggtgcggcggtcgagattgccggtcggctcatcggcaaacagaattttcggccgggtcgagaatgcacgggcgatagccacgcgctgctgttccccgccggaaagctgggcaggcatatgcttcatgcgtttttccagcccgagctggatcagcaactgctccgcattctcccggctggcggattcggattcaccacgcagcagcgcgggcagttggacattctccagggcattaagggtcgggatcagcataaaggactgaaacacaaagccgacatcccgcgcccgcagttttgcccgcgcttcctcatccagctgcggcagtgactgcccgagcagtttcacctcaccggaggtcgcgtcatccagaccggcgataatgccgagcagggttgattttccggatccggattcccccaccagcgcgattgtctcttcagactcgacaaccaacccggcaccctgcaatatagtgatctcattatcaccctgaccgacgcgcttaataagatgatcaatttcaagaataggcttcgctgccatctctgtttcctttttctgctgctgttcagcgggaatttgtatgccgccggaacattactgatactgggggacagcctgagtgccggttaccgccttccggccggagaggcgtgggcggcacagctgggacaacgctggcaacaggccggtaacggtatcacactgataaacggcagtatcagcggaaatacggcggctcagggacttgcccgtctgcccgcactgctggagcagcaccggccgcaatgggtactgattgaactgggtgccaacgacggcctgcgcggtctgccgctgacacaaacccgtactgaccttcaggctgcaattgatgcagtgaaggccgccggggcgaaaccactgctgatgcagatccgcatcccgccgaattacggcaaacgctacaccgagcggttctcggcgctctatccggcgctggcacaggaaaatgccgttccgctgatcccgttttatatggaagcggtcgtcaccaatccgcagtggattcaggatgacggcatacacccgaacgcagcggcacagccttatgtgactgactggatggataaaacactgctgccttacttacagtaacgggtgtcagactatcctaaatgatttatccataatttataagcagttaagcaggtaaagaaatgcaaaaagcagttttgatcaccggcagctccagcggtatcgggctatgcgcggctaaaacactgaaacagcggggctaccgtgtgctggccgcctgtcgcaaaccggcagatctggcggaaatggcacgcctcgggtttgagccggtggaactggatctggactgcccgcagagtgttgcccgtgccgcagagcaggtgctggcactgacagacaaccgcctgtacggcctgttcaataatgccggttttggtctgtacggcccgctggacactgtcagccgcgaagatctggaaaaacagttttccgccaatctgttcggcacacaccagttgaccaccctgctgctgcctgctatgaaaaaggccggtgaaggccggatcatccagaccagctcggtaatggggctgatttccacccccgggcgcggtgcctatgccgccagcaaatacgcgctggaagcctggtctgatgccctgcggatggaactgtccggcagcgggatccgcgtcagcctgattgaaccggggccgatcactacccgctttaccgaaaatgtcacacaaacgatgcaggataaaccggtaaaaaatccgggaattgccagcctgtttaccggtaaaccggaggatgtggtgaaaaaagtcatccacgccctggagcacccgcacccgaaaatacgctatcctgttacgggtcttaccgtaatagtgatgtggctcagacgcctgctgccgctgtggctgatggataaaatactgaacaaaaaatccgccgccgcttgaaatgccgcgctgtgcccagatgttaatagaaagtccgccaatttattaagagaatgaatatgttatcaaacgcacatatcacagacgttaacgaaaccaatttacgccaggttattgaatcttcaatgcaggtgccggtggtctttttcttccattccgcacagtccccgcagtgtcaggaactgggcgccattctggaaaaagtggcggctgattacgccgggatgatgatcctcgccagagtgaactgcgataccgagcagatgatcgcctcacagttcggcctgcgtgcggtgccgactacctatctgttccatcaggggcagccggttgatggttttgaagggccgcagaatgaagagactgtccgtaatttcctggccaaattcctgccgtccgaatctgaaatcaaaaccggtcaggccattgaactgattgaagccggcgattttcaggctgccctgccgctgctgcgtgaagcacaccaggctgagagtaataacagcgaaatcaccctgctgctggcacagacactgatggaagtgaagctgtcagaagaagctgaaaaagtattgaagtccgtcccgattcaggatcaggatacgcgctatcatggtctcttatctcaaattgagttacaaaagcaggccgcagacaccccggaaatccaggaactgcaaaatacctttgcggcggatccggagaatgcggaactcgcggtacagctggcgctgaaactgcatgaagtgcaccgcaatgatgaagcactggccctgttattcagcttcctgaagaaggatctggcggctgcggaaggtcaggtgcgcaaaaccatgatggatattatggcggcaatgggaaccgcagacagtactgccgcatcttatcgtcgtaagctatactcgttactgtactaattaattgctttactgaattatttaacccactcattactgataaggattttggctcatggatttgttctcactgggttttgtcccgattattattctcatcgcaattattattgtggcaaccggtgttaaaaccgtgtcacagggctatcagtggacagttgagcgttttggccgttacaccaaaaccctgcaaccgggtctgcatattattgtgccgtttattgaccgtgtcggccgtaaaatcaatatgatggaacaggttctcgatattccgtcacaggaagttatctcccgcgataacgccaacgtcaccatcgatgccgtctgctttattcaggtggtggatccggtacgtgccgcgtatgaggtcagcaacctggacctggctatcatcaacctgaccatgaccaacatccgtaccgtgctgggttcgatggagctggatgaaattttatcccagcgtgactccatcaactcccgcctgctgcacattgtggatgaggctaccaacccgtgggggattaaaatcacccgtatcgaaatccgtgacgtgcgtccgccgaaagaactgatctccgcgatgaacgcgcagatgaaagcggaacgtaccaaacgtgcggacattcttgaagcggaaggtgtacgtcaggccgctattctgaaagcagaaggtgaaaaacagtctcagatcctgaaagcagagggtctgcgtcagtccgccttcctggaagcggaagcccgtgaacgtgcggcagaggcggaagcccgcgccacacagatggtatctgatgcaatcgctgacggtaatatgcaggctattaactacttcgtggcacagaaatatactgatgcactgaccaaaatcggtgcggcggaaaacagcaaagtcattatgatgccgctggaagcaagcaacctgatgggcgctatcggcggtgtggctgaaatgttcaatgtgtcaaaagacactaaagatcagggtaaatccgcatgattgagatgatcgcatcacaggcggtctggttctggctctgtttcggcggcatcctgctgattctggagatgctcggtaccggcggttatctgctctggagcggcgtggcggcactggttgtcgcgctgctggtgtggattatgccggggctcagtctcgagtggcagggtattatcttcgcggtgatgacggtgatctgtgcggtgttgtggcgtaattttcagcgccgccgccagcgtaatgacagcagttcgccgaatcaggtcaatcataagctgatcggcctgcgtgccgccctgctggcagagacggaagacggttacagccgtatccgtctggcagacggcagctggcgtgtctacagccagtcggcgctgcctgccggtacggaagtggaagtgattgccgttgacggcattacactgactgtccgggctgtcagccggtaactgcctgaaacacaataacgaaacggcctcctgcaaacagaggccgtttttttatctgatacccgttttatgacacgaaataatatctcatatttccccgctatcacgtttttttatctgatttatatttctgctccgtaaattactccggaaaaatacggtaaatcattaaataatacctgctaactgaacttaacctgttgattttcattttactcatttcattatttatcttttttaatttaatcatttggtatttacccttaatagacatcctattttcagtcgattagaattatttcatttcctgtaaaaacaaaatgatggaatatcagcaagtgattctgctgagtaatttatattccgctgatcaggatgatcgatatgaataaaaccttcttacgcagcggcagactggaaaattacctcccgatgggagagaacggccaggccgtttatatttccgctctgcagctcagagaaaccttacggctgcaaaaaaagaataaaatcgcggattgcctcgccattccgcagccgaacgaaaccggtgaacgaattgactggtattctcccgtcgatggccctgttatttcctgggaaacggcgtctgatgaagaaaaagaaaatgcgtatgcacagctgaatgaatatcagaatgaactgcttcagttcagccaaaataaaaagaattctgagaataaagaatatcagctgttcggcgcactactggaaaaaactattcagttcccggatgacgaacatatatatattgtcggcggccagccggttattacgttctggggttttgtgaatgccgggaaacaatcgcgcacagatcccgttgcctgtctgcaacgccgtgccaaacccgcacctgttatcagcgatataccggaaccggccgccgcggttaaaaaatcgccgctgcgttttctgctgtggctgctgtggctgctgccgctgctgctgttacttggtgctgcgctgttcttcctgcgcggctgtcaggataccgtgaccgctccggcggtcaccaccggcaccctgcctgccgccgacccggtggttcccggcaaagagccggtaacggatccggtcattaacaccggcactgaaccgaaaaccgatccggttctgaccggcgttaaccgtgttccggtgacacaggtagtgaccgggcgcgttccggtatccggtgttatcaccgatcctgcggtcgccggtaccgtaccgggcgctgacccggcaatcgttgatccggctggtgtcgtcactgacggtaatgttgttactgacgggaatgttgccactgataatggcgtcgttactgataacggtgccgtgcccggcggtaacggggtgactgatccggtcacggataccgcaggaaatccggtggctgacccggccacacaacccggtgccgcagataacaccaataccaccaccgataatacaaatgctgccggcgatccggcagcacagaaggatcctgctccgcaaaccccggggaacaccgcaactccgccggatctcacgccagcggctgacaacagcgcagcccttccgccgatcagcattccgccggatgcggtacgcagcggttccgtgcagttccttaacggacagtggaaagccggtgcgggaattcaggatcagaaaacagggaaggcactgagtcttcagtacaacatgaataatgaaggcaaaggcgaggtcgtgatgacccgcagcgacggcgtgacctgtaaggctccggtttccgccgccatgaaatccggcacactgcatatcgataacagctcacaggccggatgcagcgacggttcagcctatcgtatgccggtcattacctgtcagcccggggcgaaaaatatcgccgaatgtcagggtgaatacaataaaaaccaaaaattccctatatccatgaaacgggagagtaactgattccatgctggcacaactgattgaccacagagacaaaatcaccctgatccgggacagtaatattcagttcctggatttcggtttcacattaccgcagcgtaaagagtacggcgaatttacccgtaaaggtgaaaacggcccgttactgcgcctgatttatgatgaacgcaatgatcactttgtgtttccctccccgggcaacagcgcgccggtcgtcaccgaaccggaattcagctgttccccggaagaatcactgaaattactcaatgatatctggctgccgctgccgtttttccgctttaatccgccgcgcgccttctcaaaagggccgtataactgggcgcgggcgatgttccaccagttgccggaaccggatgaggacggccatacccaccgggttgtggtggcgtttgatacccgtatcgaaccgctgcgcgaaaacagtgtttacctggcaccgaatgaggatgatgtccggtcaggtatcgggtttgccctggcgtatatgggacacgaagcagaagatttcctcgacctgccgtgggttgacagctggctgcgcgagctgttcagtgagcaggtggtatcggttttaaaactctatcacgatgaactggaagaggcgctggccggatttcagcatcaggcgcattacctcaatctgctccatatcctcggcgaaaccattaagctgccggaagtcaaaatcaatgaaaccaaatcccaggagccgccgattgaggtcgatctgatccttgatgtcggtaactcacgcacctgcgggatcatcattgaagatcataaaaatgatgacaaaggactgacccagctctatgaactggcgctgcgtgacctgagtcagccttacaatgtctgcaatgagccgtttcagagccgcatcgagtttgctcaggcggaattcggcaaacaggatttttccgtcagcagcgggcgcagcgatgcctttatgtggccgaccatcggccgcgtcggccctgaagcaaaccgcatggcatcacagcggctgggaaccgaaggctccaccgggatctccagcccgaaacgctatttatgggatgacagtccttattctccgggctggcgtttcagccgggctttcggccagacagagaaagagccgctggcaaccgccattccgatgacctatctcctcaatgattacggtgagccgctgttccgcctgaaagaagatgaccggatgccggtgtttacaccgaactacagccgcagctcactgatgaccattatgctgacagagattctggcacaggcgctgacacagatgaacagccccgcgcagcgcctgaaaatgagccacgccagcgcaccgcgccgcctgcggaatatcattctgaccattcccccggccatgccgaaaccggaacgggtcatttttgaaacctgcacggaaaacgcgctggggcttatctggaaagccatgggctggaacccggcggacaacgacctcaccttccgcggtaatgacgaagcgtgcagactgccgctgccgtccatccatgtgaaatgggatgaggccacctgcggccagctggtgtatctctacaacgaaacccagatccacttcggcgagcggacagaagcttttttcaaaagccagatccgcgatgataaccggcagaaaaccggcgattccgtgctgaaaattgcctcggttgatatcggcggcggtaccaccgatctggtgatcacccgctacaaactggactccggcagcggcagtaacgtgaaaatcatcccggcgcagctgttccgcgagggatttaaaatcgccggtgacgacattctgctggatgtgatccgcttatacgttctgcccgccctgcgttcgtccctgacagacgccggtgtcagcgatgccgatgccctgatgtcctcactgttcggcagcgagggactggatgccggtcagcaggttctccgtcagcagcttacgttacagattttcagccctgtcggactgaaaattctcagtctgtatgaaaattatgatccgctgaaaaataacgacaatatcgataccaccttcggcgcctttttatcgcagcacccgacagacaaagtcacccgctatattgacgatgcggtcagcaaagagctgaacggcgcggaattttccgtgctcaatgtgccgttacaggtggattttgcccggctgcacggcgagtttatttccggccagcgcatcaatatcacttccggcctgaaggcgctgtgtgaagtgctgcactattattcctgcgatattctgctgctcaccggccgcccttcccgcctgccgggaattcaggcgctgttcaaattattacagccggtgccgccgtcacgcatcctgccgctgcacggctataaaaccggcggctggtatccgttcaacaaaaaaggccgcatcgacgatccgaaatccacggcggcggtcggagccatgctctgcctgctggcggaaaattcccgtctgctgaacttctatttctccatcggcaatttccggtcttattcgacggtgcgttacctgggcatgctcgacagcaacaatgtcatccccgacgacgtgatctattaccgggatatcgatctggatactccggattatcagctggacaacaacatcagttttgaggccaggggggcagtccgcctcggcttccgtcagttgaataatgcccgctggcctgcatctccgctctatacgctgcggataaaaaatccgaagctggcacagaagctcagtgttgaaaacggcgtgatcaatgtgaaattgcagctcgcccagcagagagccgcgcgggatgacagcaaaatgaatccggaacaatttattatttctgaagtcgcgatggcagatgcatccaatgtgaaaccacgggatctgagcttcagactcaacacgttagccgacagcggaattggtgaaaccaattactggatggacagcgggagtgtattagtcaaatgagtatcacagacgaaaaaacactgacagaaagctggaatgccatctgtcagaacgcggaacaggccatagagtggatcacggctgtccgggaaaatgccccgcgcctgaatacggaagctgacaacctcatttaccgcctgagacgcgggcgtaatatggcgaaaaacctggcccgcgcgacacagaaaccgatgtcagtcggctttttcgggctgtcacaggccggaaaatcgtatctgatctccgccctggccgccggtaatgacggcgagctgaaaacccggatgtccggcaaagaacttaattttatcgatcacatcaacccgccgggcggcggaaaagaagccaccggactggtcacccgatttacccgcgcggccacacagggcaatgacgactatccggtggaactgcacctgtttcacgagacggaaatcgtcaagattctcgccaatgcgtacctgtatgattttaaccaggaaaaaatagattacaccctggatgagaaaaaactggcgaatctgctggtcacgctggagcaacaacgctccgctgcaccggtcgccgggatcacccacgacgatatggtttcgctgtgggattatttaaaacgtcatgcggaaaacagccataaaaaactggcgctgagttactggccgaaagcggttgaactggcaccgtacctgactgttccgcaacgggcaaaactgtttgccatcctgtggggggaaatcggggagctcggcgaagcgtatatccgtttcagcaccacactggcacaggtcggtcatgcggatgtcgtgctggcaccgctcagttcgctggtcaaagaagcaaacggtgtgctggtccaggaagacagcatcatgaacgtggatatgctggagcggctgaacaaaaacaccgattcgcagattgaggtctgcccggtccgcgaagggcacaccggctcgccggtgacgctgtcggtggcggaactcacggccctgaccgccgaactggtgatcccgctgctggatgccccgaataaaacattatttgaggatgtcgaactgctcgatttcccgggctaccgcggccgtctcggtgtggaatccatggacggtgtgcgcagcgctgttgagagtgatgacgccaacccgctcgcccagctgatcctgcgcggcaaagtctcctacctgtttgagcgttacaccgacaaccaggaaatgaacgtgctggtggtctgtaccgcctcaaccaaacagtctgatgtcaaagaggtcggcggcgtgctgaccgaatggatcaacaacacccaggggaaagatccgcagacccgcgcccggcgcacctgcggactgatctgggccatgacgatgtttgatctgcgcatcacccagtccctcaatcacaatgaacagctgctgcgccagtcctggggtaaaggcgggatgatcaagatggcgatgctggagcggtttggtcagttcagctggatgtctgactggagcggcgaaaatccgtttgataacaccttcctcgtccgtaaaccgcgtgtgccgacaccgtttattgatattcagaacggtgcggaaaccgcctttgaggacgattgcggcgaacagctgcgcctgatgaaacggacatttgcggaagatgaatttgtacagcgccatatccgcaggccggaagacgcctgggatgccatgctgacactgaatgacggcggtatgacccggctggcggattatctggaaaccgtggcccgcaaatcactgaaaacggcccgtattgccgagcagttggaagagctgaaaaaagacctgatccgcaatcacctcgaaaaatggtatcaggccggtggtgaggaagcacttgagagcaaacgcaaaaattccgaaaccattctccgtttcctgcagaaatttccgtatttgcagggcgcgctgatggattatctcctgcccgcccgtaaagatttatacgagttgtatatgcaggaagaaagcgccctgaacagaatcagagatccgaaaaaagcggatgaatatgaaaatactgcatcagttttctcactgggcagccatgaatccggcagcggcattgatttattcagtgacacgccggtacaggcgctgacggcagagccggaaaccccgcgcggacacggttatgaaatcatctatccgcagaaagtcattgccttgtggatcaaccacctgcgcagtctgccggataatcacgccctgctcgcttacctgaatattgagcaggaaattatggttctgctggcggatgaactgatcaccgccatttcccggctcagcgtggaaaaacggctgacagcggcactcgccggaacagaagcggtcggcgtgctgcgcgataaactcgcggaatcccaggtatcgcgggtatataacgtgctcggtgattttattacctggtttcatttcaaagacaaagacaccgtctgccctgacagcaaaatcaatcccggccataaaatttttgagcgcccggatgataacaatgtggaatgggcaggtgatgagcgtcttgtccgcttaccgtcaacccctgtgaattataccttcctgtttgtgtatgactggcttatcgcgctggataccgtgatccgcgaaaacgccggtcattctgccggacgggaaatcagtgctgagcaaaatgcacagttaggccggatcatacgtttaatgacagcatcgtctgtggagtaataccgtgtttaatccagaattaaagccgttacagcccgccagtcccggaaacgcccggttaaccatccgtaactgggacggtgccggtgaaaacgtcacattaactattcagcgcaatcaggatcgcaactacctgaatgacgaaggacactgggtcggcaacgcctttgagcaccggctttcactcaccccggacggtgataactatcagatagacctggataaacagtttgtcgatccgctggtcaccaacatacagatggcctaccggctgacactgcgggatgacgaaggcaatcaggatatcggtaccctgaaaattaacagcggtgttcagagttcacaggcactgggacaccaggaagccataaaatccggtgcggtactcagcagcccagcaccggtggccgctgccgcagaaccggctcctgaaccggagcccgcagagcaggaagagcctgagattctcccggatgacctgatcgcagagccggaaatattgcaggccgccccggcggatgcaccggctaaaaagaaaaaatcaccggccgggatcattatcgccgtcattctgctgctggcagttgccggtgccctggtgtggttctttgtcctgaaagacaagacagcggaaacaccaccggtaccgcccgtcccggctgaacagataaaaccggcagaagagccgccggcggctgaacctgaaccacagaaagaaccggcaccggaagaaccggcggtaacagagccgaaaccggatcctgaaccggttccggcagacccggcaccggttgccgctggtgttgaaggcgcgtgcagcacagaaaacatgaaaaccggcaatgcactggcgtttgtccagggctgcctgaaaagccatccgaccgacccggccatcctcagcaccattgaagcggcagtcgccaataaacagtgcgatgtggctcagcgcctttacgcttacaaagcccaggccggtgacgccaaaatcgcctttaagtatgcacaggaatatgatcctgacgtaaaaaccccgggcgaatgtttctctgcggataaagaaaccgcggtttactggtatgaagcggctgtccgcagcgacccgcaaaataccgaagccaaagcccgtcttgacgcgctgaagaaatagaggctgccgatgaacacattacagttatccggattattattcagcggcgtactcctcgcctgctccgtctctgccgctgaacagaaaccgctgttacagccgggcaaaaccacgctgtatcagcgtgtgctgacctacccgggctgtgagttatctgagcagattgccgccaaaggcaaagaacagcctgccttcagccgcttttatgtctatcagcgcgaaaaacaaggtgatgcggaatggcttctggtcggtcccgatactttcggcaaaaccagcggctggatgaaaacggactgcacctcggaatggaaaatgcagctgacgctctccatcaccaacccggcggggcgtaacccgttattattcctgaaagataaagccacactggaaaatattctcaacagtgataagccggaaacgcaatacaaaccgctgttggcggatgtgaacagtcagaaagccaatccggcggtgctggccagagagccggattatcttatcaatcagaaatccaacttctatctgctgccggtgctggaatccgatgaggcattcaccgaagccggttacaaagtgagaatgctgcgggtcgcctcggtttccgctgccgcaaaaccagcccccgctcccgccggtaagcccgccgaagataatatgatgcagggattctccgcctccgtggtgttcgttatcgattccacgatttcgatggatccgtacatcggccgcaccaaagaagccatcgaaaaagtgtatgcccaggtcgaaaaagacaagatgctcgataaagtcaaattcggtctggtggcgttccgctccaatgtcaaagcggtgccgggtctcgaatacagcagcaaaatgttcgttaatccgaatgacgtgaaaaacggtgaggatttcctgaataaagttaaagagttgcaccaggcaacagtgtccagcagcagttttgatgaggacgcttatgccggggtgatgatggctctggatgatatcgactggacacgctacggtgcccgttacattgtgctgatcaccgatgccggtgccctgggcggcgataacccgctgtcatccacaggacttgatgccgaacagatccgccaggaggccgcctaccggggcgtggcactgtacacgctgcacctgaaaaccccgtcaggccgtaaaaatcacgcctccgcacaggcgcagtatgaagcactgaccctgaatccgttcctgcataaatccctttattacccgattgattccggcaacgtgcagaacttcggggtcatggtggacagcctggcaaccgcgatcaccacccaaatccgcatggcttatcagggaaacgaaacggtcggcagcgcatcggcggcagatccgaaatacagcgccgcaaaaccgctgctcgatgatgcgcatgacctcggctatgccatgcgtctggcatacctcggcggaaaacagggttcgaaagccccgtccgtgttcaaagcctggatcagtgaccgtgatgtgttacagcaaaatatcccgacaaccgaagtgcaggtgctgctgaccaaaagtgagctcagcgatttaagcgaggtcatgaaaaaaatcgtcaccgccgccaacgaaggcatgatttcaccggacaatatgtttgccaatctgcgctccattgccgccaccatgggaaatgacccgtcaaaaatcaaacagagtgatgcggtgaaactgggcgaactcggcctgctcggggaatacgtcgaaaacctgccgtacctgagtgaagtgctcgggctggatgaggaaacctggaaaagctgggatggccttgagcaggagaaattcatccgccgtctgaataccaagcttcagtattatcagaaatataatgaggatgctgaccgctggatctcgctggcacccggcagtgatccccgtgaccacgtttaccctgtgccgctggagaacctgccttaatgttacacattgagcagatgtccctgacccggcgcgataagcagcgtgacttccgtgtcacgctgccgtcactgacgctggcaccgggggaaatcggtgcactgaccggcttcagcggctgcgggaaaagcacgctgctggagatgattggcctgatcctgcaaccggacaccctccggcgctatcagctggatgcacagaccgatatcacgacagacgtaacggaaaatgatactgccgtcctcgccagactgcgcgcccggcactttggctttatgctgcaaaacggcgggctgctgccttacctgactgtccggcaaaatattcagctgccgcggcaggtagccgggctgcccgcagaatcatcactgactgaatcggcaattgaccatctgaatctgcggccgctgctgaatcattacccgaaacagctctccatcggggagcgccagcgggttgcgtttatccgcgccatcgcccaccagcccgccattctgctggctgatgagccgactgccgcgctggatccggtgaatgcgcagtctctgtactcattgatcaccggcatagtaaaggaactgaaaattaccgcgctgattgtcagccatgactggactctggtggacaaattcggctttgcgcattaccacgcttacatggaagaaaacggtagtgtctttaaaaaacaatagcgccgccgcccccggtttttcattactggctgtgctggcctggcgggatttgctgtatgacaggaaagtcgccctgtgcattattttctccctgacctcggtcattgcaccgctgctgcttctgttcggcctgaaaaacggcattatcacccagttacacgaccggctgatcaacgatccgcaaaacctggaagtccggatgatcggcaacggcagttatccgcacgcctggtttgagtctctcgcccgccacccggaagtgcagtttgttatcccgctgacccgcagcctgaacacccaggcagatctgatgacggacagccgtcattttgtcgccaacgcggaaattatcccgacagcagaaggtgacccgctgctggacggcataccggttccggcggataaccgcagtctggtgctgtccgcctctgcggcggacaaaatgcaggtgcgcacaggggacacagtgcgcatggtgatttcccgcaaactcagcggtgtcaatgaacgggcccggcagacatttaccgtcaccgccgtactcagcgacagccgtttttccagacctgcggcctttgtgccgctgccggtactggtggcaaccgaagattaccgcgacggctttcaggctcccctgtttgatatcaccaccggaaccgccccgccgccccggacacaatttgccaaaggccggatctatgcccgcagcctcgatgatatttcaccgctgaatgactggtttaatcagcagcatatcgatgtgatcacccaaaaaagtcagatagattccgtcaaagcgatcagctatgtcctgaatgtgattttttcagtgattatgtgggtgtcgctgtccggctgtatcgcctcgctgattggtgcattcttagccaatattgaccgcaaacgcaaagatatggcggtactgcggctgctgggcttccgccgcaaagcggtcacgctttatatcattattcaggcgctgctgctgaccggcatcgcctttgtcatcggcctgtctctctatctggccggcagttctgtctttaccaccctgctgggcagccatctgcctgataacgcctttgtgtgccgtctggatctcagcgatatcctgatcgcgctgtccgctgcactgcttgtcgccctgagtgtcgcctggatcggggcattgcgcgcggccaatattcaacctgcggagagcttacgtgaaatctgaattatcactgataaccttttccttaaccctgctctgcagcagtgtcagccatgcagcgccgtgggaggaaaaatttgtcaatccgcagccgttacccggtgatgtgacgctgccgttcccgtgtgaaggcagtatggttttccggcaggtgtttatcccgctgaaccagccgttacaggattacagcanccccgctgacccagccgttacaggattacagcattaccctcggccgcgaaggggatgagtggggctatctggaacaaacccgctccgagcatatcgcgggcagtttcacatccggtgacgggaaaggccgttactatctgatggcaaaatatccggtgaccgatctgcaatacaacgcgctgcaaagtgtattacagaacggagaatgccccgcaccgtcaaataaactgcggctgccgcacgtcagtatcagctggaatgaggcggtacagtttgccgatcagtataaccagtggctgcgggcaaaccatccggaagccctgcccgcagaggacggagccaaaggctttgtccggctgccgaccgaaaccgaatgggaatttgccgcccgcggcgggatcagcgtttccgcttccgaattccgcgacacccggtttccgatgccggaagggatcaggaactatgtctggtctgccggggcgcagtccgccaacggccagctacagctgaccggcctgttaaaacccaatccgctgggactgcatgacatgctcggcaacgtcgcggaaatgatgttcgaaccgttccggctgaataaactcgaccgccagcacggccaggccgggggctttattgtccggggcggcagttatctcacccccgaaagcgatatccgcagcgcctggcgtcaggaggaagcctattacaacgatcaggggccggtcagaaataaatacaccggcttccggctggtgatggtctccccagcactgacctcgcgcgaacgtatcaaaaccattgaacaggagtggctgcaactgggcaccgataccccggcggcagataacaccaaacccgacgacaacaacggcacactcagtaacctcgccgctatctccgaaaaagtgcaggatgaggctgtccgtaatcagctgaccggtctgaaaaatgagctgaaagccaatgcacagctgcgggatgagcagcgtgatcaggctatccgcacctcactccagctcggcgcatttctgtgcaccaaactgaaagatgacggcgaattttacgatcgactggcaacactgcagcaaaaaaactgcacggcagagacaaaagacagcacctgcgaaaaacgtcaggagcagttggatgaacacaagaaggcccttgatttcgtggtcagttattacgctgacaccttagtcgatatggcaacaacctacgatgcctcactggtaaaaccacaggcagatatcgtccggcaaacaatggaggccagaggaaaatcaaatttgcatacgtatttgtccgtctatgagaccaatctggagaattactggaagaccggcaaggtatccaaaacagaatggctcgaatcatgtaagaaacaataaatagtgaataaatggcagggaataccatgaataaaaaaattatcaccacaatatgtctcgtttttacactggcgctggccgggtgtcagaacggcacacggaataaagatgttgatccgcgcttacagcagaacgacgacattgagttcttcagcaaatccgggatgacagcctgtgcggccggggctgcagcaggtgcactggcctgtcttgcggtcagcagcgataaccggggcgtctgtatgatagccgctgccgttgcgggttgcgggattggtatcggtaccaacgcctatcttgataaccagcgtaaaaaatacgccaataaagagcagcagttaaatgccatgatttccgatattcagcaggaaaacaaacggctgcaaagtgcctcttcaacagcaaaatcggttattgctgacgataaacgcgcactggcaaaaatttccgaagacatcagtcagaaacgcctggataaagccgctgcagagaaaaaactgaaaggggttgatgccaatattgccgcactgaataaaacactgacatcgatgaagaaacgtcagtctgagtggcaggaaatttccggaaaaagtgcggaacggggtatgaaaacctcacaactggatacccagattactgagatgaaaacacaggtgtcatcactgcagcaggaactggacagcctttatacccagcgctctgcaatcaaaatcagctgacggggaggctcaatttgaaactgttacctttgctggcggccgcagccgccttacttctggcgggctgtgcatccacggtagaagagtgtgatccgacaaccggggatgtcagcctgatcaaaaaattcaactgcaagtattcaggcacttacgacaagcgcgttgatatgaaagaacaaacactcgcgcatgaaaaagagctgaatacggagtttaaagcggcgctggcggctatcgaaaaagagaaaagcctggttaatgccgatctgaaaacgcagcaggccagccagaaggcactgaatcagtccatgaataatctgctggtgcaggccagagcgaaatcgaagaaccgctctgatattcaggcacggattaataccattgaaaaacagctgaaagagagtcagaactcgccagagcagtcaacaatggaaaaacagcttgaactggaaagcctgaaaaaccaggtgatggatttacagaccgacctcggtcttcagtaacaggcagcgcgcctgcgggcgcgcttttttactccccgcaatggatgctgtaaggcggctttattatgaacagagtgctgcgcttaacgacagataccggacgggcagatttttgtctggcaaatcaggacacgctgtcagcattgctccgtcagcattttccggaaaaatatcagacactcttttccggtgcgcaaacgcagagtgatggttcggttatctggacatcccccctttccgggcatccggttccgctgtcatccgcagaaggcgcggaagcacaacgataccaccggctgctggcagaacgcctgaatgatatccgtcttcaggccggacaactgcacgataaaaaaatcatcacagatgaagaacatcagttactggagaaagcttcggtattaccggacactgacagtgtttttattataaataatcagccggttatcacctggtggccgcgtaccacaccactcccggcagcaccggtcgccccggttgtccctgccgctgcagccacggcaaccgcagttgctgccacctccggcctcagacgctggtggtcgcttctgttactgctcctgctgctgttactggccggcggtacttttttatggatgaaaggctgtaacgacaccataccgccggttattctgccggttcctgtacctgttgaagtcacaccgccggcaccggaacctgtaccacctgcccctgaaccgccggtggtcgtcccccctccggaggaacctccggttgcggaaccgccgccggaagagcctcaggtcattgaaccggtaccggctccggttcctgtggtactgacaccgacagagcagtgtctgcgggaaaaaattcacgcggaaggactgactgaaaccgccgctgcagaagcctgccgtnaaacccgccgctgcagaagcctgccgtctgctgctttccccgccgccggtcaccccggcgaaaccggtggttacagttaaaaaaccggtggttaccgctaaaacaccggctcccgaaccggtaaagcctgttcctgtcaggaaagtctgtccggcgaaacggaagccggaagatagcccgcaggtctttattatttttgatacctcttactcaatgattctgagtctgaatctgacaaaaagtcagctgcagaaaatgggaaccgtcgtcgatgaaattccggggttcgatgcagaaccacggcgtatcactgttgcgaagcgtgctgtcagtgatctgatcaaacgtattccgtccgatatggggatcacgctggtggtggcctctgattgcgggaaaatccgctccaccggcaatatgaccgccgcccagagaccagaattacagcggatcatccggtcactcgagcctgatgacggcacaccgctggcggattccattacccgggtcaataaatccatcaaaaacaataaccgcgatacggtggttattttaatttcggatggtgtggaaacctgcggaaaagatccgtgtgcagcggcggcaagcctgaaacgcgcgcacccgaaagccgtagtgaatgtcgtggatattatgggtgccggtgccggaaactgtgtggcccgcaataccggcggtaaagtctttacagcaagaaatgcggctgaaattgcacgcaaaatgcaggaagcgatgaatgattatatccctgagggatgtaattaagcagcaaaaagcccccttgcgggggcttcagattgccgacaaagcaggatacgattacgcgcctttaaagcggtagcgttcgttcacggaattggtcagatcctgcataataatattggtcagtttatcagtggtatttaatgcatcctgcatgactttattctggaagtcctgtaacagctgtttggctttcgccgggtctgttttataaatactcagatactctttttccattgcctgctgctctttggcaaactcagcttcctgtttgctgtattccgcctgcacaattttcgaatatttattaaagtcgatcattgccagtgtctgtaatttacggaatttccagtgcgcagaggcattatccgcctgtggtgaaccgatggtataagcttccacgtagctgtccggaccgtaatataccgggacataaacggataatgtcggcataccgaaggcaatataacggacattcccgatttctttcggtaaatctttgcgcacctgtaaaatatgggagtgctgggttctgaacaccgagattggtcgtttagtggtatccggataggtggttgcatacggggatgtgccgacattttcataatggttgcgcagcccggctttaatatcttccagccccagttttttcgccggctttaagaagacagggaaatcattggatttcacatctttaaagtcagtcttaatttccgggttatacattttctgcagcactaacactcgcggatagttgtaataaccgtcactttttgcgtcatctttggtataggcttttttgaaattaaactcaccgtcttttttcggatcatataagccatttttctcggcaaaggaaatcagtgtcggggatgacaggtaattttctttgtcattcatatcaaatttttccagacggccctggtttgcagtgacgtaataggtattggccgggattttcgctgccatccactggtggccgctgccggtttccagataccagatcccgtctttatcaataaaggccacaccgaaaccttcaccggcccctttttcctcaatgattttccctaaccgcatcaccccttcttttgcggaagagacatacggtaataccacatccggaatcgcatcttcaataatcccggtatcttcaacatacgggtcaatttttaatgaagcttcattggcgaaaatcgtttctgtggcgctgatcccgacaccggcgtcattaaagccgttggaactgaaacggaactgacctttatcattccattccgggatagtggtataacgcattgccttttccggcagggtataggtgaatttatttaagttggttttaaactcagtgtctttatttactttttcctgattcacctgcaaaacttttgggtttgccggattcatatcttcattgcgggcaatatattgcgcaccatctgaagatgcattttcaccgacaaaaatagtggtacacgccgttgcatcagaaatcaccagtgcagcacccacagcaagagataaaacactacgtttcatagagaacaccttccattgagttataaattgcgcttacgctatccattaccaactgaattttcttttacgcagatcgcagaatgcaaagtcaatcactgaattattcgcaaaatatggtgcatttcactaatttgcgatttaatcacggataagtgttttggttaaaattacggattattttttcagcggggaattgatcgggacaggaaatacagggaatcgttattttatttcttttttactgatgacaattaagcggtgtgtgtggatatcgggatcattcccccaacaaaaatcactccaatattcaaaaaaggattccatatcctgaataacaaacagcggcctttccggctctccgccatctgaagcataaacataaaaaccggcggccaatgcccatgaaatcatcacttcccaaaaacgccgtccgtcaccggtttgttcttcatcggtaaccacaatatgataggtatccaacaaccagcgaaaaaagtgccgtggcaggtcggctacagcagactgatgtttgttattggttgtccgccataccttaatttgtgtgcaacttgtctgaccggcaacgatgtcattgcgcaagcaaagctcaaccagataaacggtttcaggtgtgcctccggtcgtaaccagtctgtattgctgctttttacctgatttaataaattgatagccctcttttacctcatagccgggcaataaaaactgatgcgtaccggcggccagaaacagcgttgtcagttcgctgttttcagagggcagatttaatttccggttaaaacctgcggtgaattcaattgtccccgccatcctgtaaatccgccattaaatctgaaatacagctgaatattttcccttttccgtattctgattcagcaattgcagccagagtacacgcagaatagcgatgcagtgtctgtttcatattattcactgttacatccgtcaggtccggtattgcaccttcttttaattcagacatatcaaccccgaaaaataacagaataaacataatgataaaaaaagacccgggcatcagattaaattcagccgaactgatattactgataataaccaccgtgatataaacaatttttaaaccgcgccggattgtcacattaaaaaacggctccgcagggagccgttttatcttactgaataaactaataattacttcactttactgttcacactgctgtgatcattagtgacagaaataccgaccggagattttccgtttacgatcccatccttaactgcactgacagcctgtccggcattgagcgggagttcgccgtgaatgcgggtgccggtctctttgaccgccacagaacgcatttcggtgttcccgccatccggcagaccgtccagcaccgcgccggtcaggatggtgctgccgccggtacgcagtttaccctgttcgcgggcggtcagaccggattgctgccctacctgttctgcggaacgggtttcaaaggacgctttaacattgccgttcatcccggacggcgatgtcaggccggatttcaccttgtccgccacggtaccggcaccggctccggcattttcccgtacagaatctgccgctttatccagtccgttttccaggcccgctttgatgtcatctgcaaacttcggtgtaccggcattggccagttttgaggtggtactgctgccctcatcattggtatgtgccgccgacagatccgcgtcaactttcagaacagattcggtgttagtccggctttccacgatcagatcaccgccgacacgcccgctgatggtatccgccgtcagttttccgccccggatctgcgtatcattgcggctgttcagcgtgagatttccgctgtcagcaagggcatttttctgcgttaccgtctgctgattatcgatcccgcccttcagaccggcactgatattatgccgcgaaccggtttccggattttctttgctgtgcgaggtgccgatattcaggtttccgcccgcattccagttggctttgtctgtggttttctgtgcggattcgatcacaataccgccgtcacgggcggtcagagcggtattttgtgcatcaatctgcgtacctttcagatgcagcgcatcatcccgcataccgtccgcagaaacagaaacagtaccgccgctgcgcaggctgccgccgcgctggtcagtcacgttttcagactgtttgctgatactgaaatccgcaccgccgccgagtttgctgccggtctcggttttaccgccattagcctgcacaccgccgtgccactgatggccggagatggtattcgtgctctccgcgctgttaagcagggtgttgtgcctgcctttcacggtcacatctccgtcactgctgacattagtaccgttagcggtcaggtcgtttccggcctgtaataccacgccggttttgccctcagtcacgccggttttcgccgttgtgccgctttcgttatacacttcacgtccgccgctgagaccaccaccggcatttttcaggttgagcgattccacatttaccttcgccccggcatcatagccgctgacggttttgctgtgggtatcatccgcctgatccagcgtcagattatcaccggcacggaccgaaacgagtccttcctcactgcgcagtgtatcgccctgcaataccgcatcacgccccgcctgcacggtgatatcccctttcgccgacagcgaaccggtcaccgctttgctgctgctctctgttgccagacgatgcccgccgctgcctcccgcgctgatcgcaatatcctgtccggtggatgtcgccacacgcaggcttcctttgccctcagtcacagattccgactgatgatgtgtatccgctgccgccgcagactgataatcgccggtgctgatcgcaataccgccgttatccgcccggtactgtgttccttcatcaagaacacgatccgtggtgttcaccgcaaccgatcctgcattaacagaggtggttttcgcctgtgtgttcccgctgatggtctgccggttttcccctttgccactcagatcaacgccgatatccggcaatccggtggccgcggtactgtcagccaccccggcaatattttcaccggctttggccagcggacgggagactttgctgtaatccagcgaaacaccgaggctgccttcgccgcctttacgggtttccgtggtgcgatcactgttgtgagccgcccggtgctccgagttttgcgcagtttccgtataagcgccgcccaccgtatgtgatgcgccttctgcgagagggttttaccggcggtcagggggagattgccctgcacctgagtgccggaggtgaccgcctgatgctgctcctgtgtcttaccggtttcagtatgaccgccgctcagcccgccaccgagtttatccatgccgccggtcagataaataccgccatgtgattcccctttctgctgtgtccgggtttcacggttatccgctgcgttcagggtgatattttcagcggaaagcgccgcatccccctgcgtggtggtcagagaggagccggtaagggtgagatcgtttccggcggtgacagagacactgctgcctttgagttcactgccctgctgcgtgacagaatcctgcttttgcgtgtcgcgggtatggttgatatccagaccggcgcggtactgtttgccctcatcttctttggcatagccgctgattttgagtgtggtttctgttttgtcagactgtttctgtgcctgtgccgcacggacattgatatcgccaagggtatcaattttcagtgtgcccgcactttcaatcaggcttccggcgatggtgatatcattttttcctgccagccgcaggtctgcctctgatttcagctcactgcgttcaacacgggtatcttcactgttttcgcgaagagtactgcgggtgatgttaaacgcaccgccatcacggttatcaatgtgtttcgccgtccggctgatgccgttttcaatcaccagcgcgccctgcccggtctgcaccagactgtcctgtgtgccttttaccttactgccggtgacggtcacgccgttgccgccggaaagccagagcttaccgcctgcggtaacgtcagagccgtgcgccgtctcttccgtggtggcccggttctcacgggaaccaccgccgataccgccccacgaggtggtattctccgtatgcccctgatgctgtgttgcggtttgcgtgcctatagtgagattattgccggtgttgatgatcagatcctgtccggcgtgtacctgtgccgcctgcgcccggatgtcatgaccggcattcagtcccagattgccgcctgcggtcagttccgttttcaccagttgctcttttgacgtgacatcgccgtgtgtgccgctgagcagctttgccgtctcattgcgtttattgccggacaccgtctgagtgcgggagtcagtcacgctctcaagccggatatcccctttggcatccgcactgagatgcgttccggccgccagtgctgcccctttcagggtaatatcaccggttttggccgtcaggcggatatcaccgtcagcacggagattgctggtttcctgccggatgctttcgtctttgcgggtttcattgttttcccacgacatcttccactgatttgtggtgcgggtgtctgactgtgcaacctggtcgctgtcgagcgtgatggttcctgcctgaacggcgatctcaagcccgttcaggtcagtgccggtcagcctggcttcctgctgtaccaccagtgtgatgtttttgccgtccagtgaggtgcgggtgtagcgcccctgcctggtttcgccggtgacggattgcccgctgcgtttgtcttctgtccgctgatgttcattacgcagctgtccttcggtacgcagcgtatcgctgcccaggcggatatccccgccggtgacctgtgcgccggtgagtgtcagcgcgccctgtgactgagcatcgaaaccatttacagcatcaatattaccggccagtttcacaccgctgccctgcgcggtattcaccagacggattttaccggcgcgcatgccgcccagataatagctgtccagcggaaccgcgtttttcccggcggaaatggtctgcatatcagcggaaacggtattgttcccggtgatcacattcagtgccgccgcgcggatctccccgtcggcattaatcgcaggtgcgaccagatccagcaccttaccggtagtgatcccgttatgcccgatcgtcagtgaattggtgttatccagcgtactgtacgcactgatcattccgttctcaatcagcggattacccacgatcagcccggcattattggtgttgataaaaccacagccctgacagctgatcccgttcgggttggcgaggatcagatccgccgccatgccgaacacttcctgctgacccagcagcagagaggggttacggctgaccacttcgttgaggatcaccccggcggcctgtccgttcaggtttttgttggcctccagcatacccgccagctgcgactgcccggcggtcagggcgttattaaagaccgcgccccggttatccacattaaaatcaagatactggttatgagacagcccgttactgttcggcgctgtaatattgacaatatccgttccgtttacctgagaaaccccggggccgttcgggccgccgtccgccacaatccctgcggctgcactgttcagcgtgacaaaggccagcgccatccacgcggccaccttacctgacgaagagagtttaaagcgttcttttttcattgtatttccttaccatccaacgactgacggagcagatcagaactgatatcccaggcgcagagaaaacagggtgtcctgtgcgggcagtgccgccacataggtccgggcgcggctgatttgcgcatccagctgtgcgccgccgtaactgacattgacccctgcggcgatacccgcggcagactgccatcccgcctgcccggtctgagccataacccgtccgtagtccgcaccggcgcggggtgttaccgtgatcccctgccggacaaaacggcgggaaagggggttttgccagtaccatcccttatccgccgataacgagccgtcgtgaaaccctctgatcgcgctgttatccgacagtgtcagccactccaccccggggaggtgatcctgtgtgtactgaccggccagatgactgctgaacagatatgcgtcttccgacagcgaaaactgctgaacataactgagtgagaatttgcctttggtgtactgcggatccgagcccggtaaggtgttccgggtatctgccccgaacagtgtggtgcccttctccgccgataaagaggtgctgataacaccgcccggtaccagaatcagcccggtgtaaccggcttcagcgatactcagggacgggctgctgacgccaatcagtgtgtcattgagatagttgcggctgcgcttgtaagtcatctgcgccatcagggaatcaatccgcgagcggttacggaagatgacataatctgcccgcagtgcggcctgagcgctgtccccgcgcagaatgacatggttataacgcagcgcctgactgatgcggtaacgggaaagactgccgtaagtgctgaccgtcagtgcgccgtaaggcacggaatagaacagcataccggagcggctgtaacgcgccgccggattatcggttgtggcggagccgcccaggctgacaaaatcagataatccggccgggctgtctgcggtgacagcggcgcggataacgttgcgtccggtacttttctgcccgtaattatctgcgctgagagaaaaaccagccggagtaccgcgctgattaatcagccggatcaccgatcctcccggttcgctgccgggcagaatatccatcgtgacatggttggatttcaggcggtttgcctgatccagcccctgctccagttccgtgattttcagcggtttgccggtcagagaaggaaacagcagagcggtattaacaccgcgatccgtgctgtcgatccgctccacggttccttccgtcacgccgatccccagctcgtgataatcgttgaccggcagaaagcggatccgtgcagtgatatagcctttctccagataccgctccatcagttccgccaccagcacattaatgtcacggctgcggatacagtctgcgggcagcggggaaagtgagcggaggtcgtcctgagataacagtgtgataccggagagatacacgccgctgaccggcagacagtgttcattctctgccgcacgcagtaacggctctgcgggggtgatagttgtctgcggcttgctcagttgccggtaagtctgctgttccagcagatcactgacctgctgtccggcatcctgcatcgcccggcgcgaggcatcagcgcccggattttccgccgcagcggggaaaggtgctgcatataatggcgggcaaaaaaacagccctgataataatatgcggcgtaataatgtcagcagtttggtcaattcgtcttacttatcctttgtgccggttgccgccgcagcggacagaaatgccggttttctccggtataacgccggatgaaaaagagccgtgcttttatctgttatcggcagaaataagaaaaacttaactgacaggatgtaagatggcgtccgcccagcgggcagacgcacaaaacagacggattatttatggcaggcaggtttgctgtggcggcatccggagagatgatcgatgatcgggcactccgcactgtcatccccgggacaggaatcagccagtgccagcaggcggtcacggatagccgtaagctccgtaatggttttctcaatctgcttcactttgcccagtgtcgccgatttcacatccgccgcgtggcggttcggattacggaacagcgataacagctcacggcactcatccagcgtgaacccgacctcttttgcctggcgcagcagggtcagttcatccacatgccgttcactgaaataccggtatccgttctcaccccgttccggtggcgtgatcaaagatttatcttcgtaaaaacggatcgcttttggtgttaaacccgttttttgtgcaatatcgctgatattcataacttctccttgaccttacccttgagggaaggtttaccatcatcgtaaatcaaaattcccgttcccccgaacagaattttttctcttgcgccgtgtgctgatatgcggcgtgatgatgcgaaacatgtaaggaaaaaaagtatggctaataccactattcttgcgttacaggggctgtcctgcggacattgcaccggcagtgtgaaaaaagcactcgacgcccgcccggatgttgaatctgcggtggtcacccttgatttcgccaaagtgaccggcgatgcagatgcgcaatccctcatcaaaactatcgaagaagcgggttacgacgctcagattgcaaacaaacccggtacaattttacagctttccgggctgaattgtatgaaatgtgccgcgaaaacgcaaagtgcattagaagcggttgacggtgttgcggctgcggtggttgataccaaagaggcaaaagtgtacggcaacgccgatgcacagaccttaatcagcgcagtggaagcagccggttttcaggctgcggtggcgggagaaaacgcctccccaaaatctgaaccgctgacgccgtctcagactgaggctgcggcagcggagcactgtgacattccggccaccccggacaacacccctgccatgccggtgattgaggaggatgacgatagtctctctttcctgctcgacggcatgacctgtgcaagctgtgtcagcaaagtacacaaagcgctgctcagtgtggacggcgtggaaaatgcccgtgtgaacctcgcggaacgcagtgcgctggtcaccggccatgcctctgcggaggcgctgatcgccgctgtggagaaagccggttacggcgcggagctgattcaggatgatgccaaacgccgtgagcgccagcaggaagtggctgttgcccatatgaagcgattccgctggcagtctgcactggcactggcggtcggtatcccggtgatgatctgggggatgatcggcgacaacatgatgctgaccccggcgaacaacgggatctggctgaccatcgggatcgtcaccctggcagtgatgattctggcgggcgggcatttctaccgcagcgcctggcagtccctgaaaaacggcagtgcaacgatggataccctggtggctctcggcaccggtgccgcatggctctattccatcacggtaaacctctgcccggacgtgtccccgccgcaggcgcgtcacctctattatgaggccagcgccatgatcatcggtctgataaacctggggcatatgctggagcagcgtgcccgccagcgttcgtcaaaagcactggagcgcctgctggatctgactccgccgaccgcccgtgtggtgacaccggaaggtgagaaagatgtcccgctggcagatgtgcagccggggatgatcctgcgtctgaccaccggtgaccgcgtaccggtcgatggtgagatcacggaaggcgaagtgtggatggatgaggcgatgctgaccggggaacctatcccgcagcagaaaaccaccggtgatactgtttctgccggaaccaccgtgcaggacggcaccgtgctgttccgtgccgccgctgtcggcagcaaaaccacgctggcacgcatcattaaactggtgcgtcaggcacagagcagtaaaccggaaatcggccagctggcagataaaatctcagccgtctttgtgccggttgtggtggtgattgctctgatcgccggtgctgtctggtacttcttcggccctgcgccgcagataacctatgcactggtgattattaccacggtactcataatcgcttgtccgtgtgcactgggactggcaacgccgatgtcgattatttccggggtcggacgcgccgctgagtttggtgtgctggtacgggatgcggatgctttacagcaggcaagcaccctcgacaccattgttttcgacaaaaccgggacactgaccgaaggcatgccgcaggtaacggaaatccataccttcaacggtttcagtgacgatgatgtcctgcgtctcgcggcagcgctggaaagcggttctaatcacccgctggcccgtgccatcaccgaacgtgcgaaagcgctgacactgccgtctgttactcagttccgtaccctggcggggatggggatcagcggggagtctgaaggccggacactgctgctgggtaaccatgcgctgatgcaggcacaaaatatcagcacagccggggaagcggatgcgctggtacaatcccaggccggtaaaggcgtgacgccggtgatgctggcagttgacggcaacatcgcggcaattctttccgtccgtgacccgctgcgtgaggacagtgtcagtgcgctggcgcgtctgcacaaacagggttaccgcctggtgatgctgaccggggacaacgaagtaaccgcccgggctatcgctaaagaagccggtattgatgaagtgatcgccggtgtactgccggacggcaaagccgctgccattgaaaaattacagcaggccggacgccgtgtcgcgatggtcggtgacggtatcaatgacgcacctgcgctggcacgggcagatgtggggatcgccatgggcggcggcagtgatatcgctatcgaaaccgcagcaatcaccctgatgcgccacagcctgcacggtgtggccgatgcggtggctatctcgaaagggacactgcgcaatatgaaacagaacctgctgggtgcctttatttataacaccctcgggatcccgatcgcagccggggtactgttcccgttcaccggcacactgctcaatccggtagtggcaggggcggccatggcgctatcatccattacggtggtcagtaacgccaatcggttgttacgttttaaaccaaaagattaataactcaaccaataagggagcgaatgattcgctcccttattttttcctgctgattaaccggatattacttatcagggttgaaaaaaaagcgcgcttgcagtcaactaaggtatcgtttcacgacaggagtcgtcatgaaaacactgttccgccggctgaaagattaccttatcccgcctgatccgcagggtggctgcacctggccttcggttgacctcacattgcccggggatatctcactgcatctggtcggcagtattcatatgggatcggaagcgatgtatccgctgcccggcccgctgctggaaagaatcaatcgtgccgatggcctgattgtggaagcggatatcacccgtccggcaccaccgttcccgggacaggacccggaattcccccgtctgccggtaagtgagcgcttaccggagcacctgagagatgactaccgccgctattgtgaggaacagcgccagccggtaccgacgctggataccctgcccgcctggcaggtggcgctgatcctgcagtccgcccaggcacaaagcctcgggctgcgtccgcattacggcattgattatcagatgctcaatgccgctcacgggcagaatatccccgtttttgagctggaaggcacacaggcacagttacagatgctgctggatttcccggacgaagggctgagcctgctggaagataccctggcctactggcatgacaatgcccgcgcacttcagattatgctcggctggtggctcgattaccggccggaaaaactcgctcagccactgcccgccaccttcagcgagcagacgtatcagcatctgatgataagccgcaacgacgcctggaaaacccggctgacacaactgccgcccggcaattatgtagtggcggtcggcgcactgcatctttacggcgaccataatctgccgtccattttgtgttaaactggcaggccttgtgacactgccgtctgaattatctgcaaggaaagacctatgacaccggctgtaaaacttctggaaaaaaaccggatttcattcaccctccatccgtatgaacatgatccgaatgatcataatttcggtgatgaagcggtccgcaaactcaatctcgatgcccgtcaggtatataaaaccctgctggtggcgcttaacggtgataataaacacctcgctgtggcagtcaccccggtatcagaacagcttgatttaaaagcggtggccaaagccctcggcgtgaaaaaagcagaaatggctgacccggcgaatgcacagaaagtcaccggttatctggtgggcgggatcagtccgctgggacagaaaaaacgcctgccgaccctgattgatgagggcgcacaggaatttgcctccattttcgtttccggcggcaaacgcggcctggatatcgaactggcaccgcaggatctggcgaaagtactggacgggaaatttgccccggtggcgaaacgagactgatacacagaaaaaagcacttcccgggggaagtgctttttagcttattattacaacaaactttcatcaatgcgtcagagaaacagaaccagtaccagcaacactgcgttccctgctatggcggatttcgagcttaagcccctgttgttttcttactattccggatgttttttcacccatagaaacaatacccggtgcatttttcaggcgctggtatttaatttgccaagagtctccttcatatttcataaatgctgatccctggatattttccagaactgttccgctgtagttttcatgatatccgtagtcgcgatattccattgctccaatcattccatgcccatgctcagacgcatgtaatctgttatactcggcatcttctttacctccctgaacatgtcgtaccctgatagtcgtatcatccagtttatcagcaacaaacgagcacccgctgaaccccggcgtgaataccaactgaggctgaccattttcaggatgggcaggaatatccgcatatcctccctgcggaacccaatatgctaatgttgttcctttccccctctggaaagccgatgtttcggtatcaataatccgtaatgcattgataccgttatttccggccggtatatgaacagcattaaattccattattccgcctttaacggcagaaagagaacttcgcgtcgaactgtccatttttaccttcgccgggttaatcaggtcagtaagcagaggtgtttgctgtaatgtactgtcagctaatacatcatgcagcctgacgggttctcctttaaataattcagtaaccgtattcgctgccggaggtatcaacttagtgccccgaatttccctgtcactgcctgtactgatacccggttgataaagagatgttccgggaatttgtgtgcgcggataagcaacaagcccctgttcatcagaaaatgacaccggattattcctcaccattgaatacagattcagtccgtcaacagttcccgccgggtctgcactcagccagcgccctgcccacggctgataatagcggtagccgtagtaatacagcccggtcgcatcccgctctttgccggaataacggtgggttttgtagtcaatgccgctgtccgcaccggccaccagcacggccgtgccgccgaacggataatattcctcctgactcagcaggttaccgtcgccgtccgtttccaggccgctgctgccgatcagattgtcataactgaaccgctggtgatcttttttgccgtccggccagtgcagcaaccgcacctgtgcccgcccggcaacaccagcacagatcacctgatagttttcttttccgcttcgcagttccagccccggcagatagatcacctgctgtgtctgtgtgctgttaccggttttctgcacggcggttttcagaatacgctggctgcccgcgtcataacggtagctttcgcggtcaccggcggcaccgttacgtaccaccggcgtaacctgtttcagctcaccgcgcgcagtccatgacagagtttgtccgggctggaattttgtctgctgcccgcccggggtaaacaggtctttcactttctccggcgtgtccgccagggttttcagtaccgcgcggttgctgcgctgactgacagtgatatccgtggtgtggttattgccggtcttcggtgctgaatgacagatttgtgtcatattcccggcacgatcatagacatagttgcgggtgtaattggtgtaactggctttatcaaacggggaaatatcagggagggaactgcgttgctgtccggcattggccatctcgcgcccggtggcactgaccagctgatacagcgtgtcataggtgtatttgttttccggcaccactttctgattatgccagaagcgcgtctcctcggcgctattggtcacacacagtacattaccgaccggatcgtattcatagcgcagatcctgaaatatttttttccgtgccggatgttcggttttcacggcgatcaggtgctgggtttgcgcttcgtaagtgtaagtggtcacgacgttgttgccgtgctcctcacgcagtttctgtccggcagcagaatattccacagacttgatgatgatcttttctgccccgcctttcaccgttacccggctggtgctcagtaatccggcgatatcataagtcactttttgctgatgacccgcggcatctgtggtgttcagcaccgcaccggtggcatctgccgtggtttgggtgatgtatttttcaactgacagcaaactctccggattgctttccggccagttaaccgcgatatccgggttatctgcgtctttcagcaactgacgggtcactgacagcggcacgccggtcagcgcaatgctgtccgtctgcatcagccccgccggatcataatggtgtgtacaaatacccgcgaggttttttgctttctccgcctcactgttgcctgcatacacaaagcgttcggttacctcagctttctgcccggcggtctgttccgtgatactcagcggacgcccggctgaatccgcaccttcataccggaaagtctgagtcacggccttgctgcagttatcctgccccttatccgtgcagatctgactgatgctgatcatcagtcgccctgccgcatcattcagtgtcagcgatattcctgcatccgcgctttccgtacgcagcacctgtccggagagtgaggtgacatagcggaaattgctcagcccggacgcctgcatgcgcggatctgcgctctgctgtaaaaaaccgcgcgcatcaaactgatggcgggtaatacgctcatcggtattatccggggtatccggatggcggtgatacacaatatcgcgtaccgcctgcccccggttgctcagtaccgtcaccgacggtgtttttttatgtaaggtgctttctgttttgctcattaatagtgtccttttgaaaagagggatatttgtccggttccggaatctccgtcacggacagacactcattttaaaaataatgaacaaatcaggaagcgccaatcgtagcaaaacacgctttattttaagttttaataatagaaacaatccattaaaaacaattggttgtatatataaaaatatagcaattaacttatttcataatcctcatgaataaaaaaccggggcaagccccggttttttatgactgtcataatcaattatttgtttttataaataatttcgcccttcggctcataatctgccgctttcagcggtgaatgagcttcaatataccctttcagtacttccgcatcgacaaagccggtattgacatagcccgggtgagaatcaattttcggataaccatccccgccgatcgcattgaaattcagtgtcgccatacggtaggtttttgccggatccagcggtttgccgtcaatcgtcacatcactcacagagccgtcctgattcagagtcagcccgacgttgtaaaactgtgcgtaagcccctgaatcagttttcatattggccacggcggtcagatacggcagtacttcgctgcctttaaaatcgacatacaccagttcgttggcaaacggctgtactttcagcacatttttataggtaatatcgcccggttcgatagaatcacgcacgccgccgccgctcataatggcgaaatccgcatttgcacgctctttctgtgcggccagcagcaggtgccccatactggtctgttcaaaacggactttgctgcgatcaccttccagtttgctgtcaaccgagccgactttgatattcagttgctcattgcctttttcctgatacggtgtcagcagtttaagcatgtccgggctttcgctgatttcactggtgtaatacacccgctctgatgtgccatcctctttggtgacttttttcttcagattcaccgggataagctgatagtgtttcagcgtgaattcgccgttgcggaactgaaagtccgcacgtccgacatatttaccccattcatgggcctgtacaatccaggtaccgttctggttgtccggtgcacacggggtgcccggtacgtaatctgcaattttgtaattcttgttttccggctgcatacagacaggatcctgcgagtgaccgccgacaatcatatccagataaccggccggcaggctgcgcgccatttccacatctccgggggcgttggagccgtgattgctgtcatcgtagtgccccatgtgggtggctgcgataatgatgtccggtttttccgtttcgcgcagggcttcaaccacttttttggcttcttctgccgggacacggaattcggtgtcagggaagttccccggattaccgattttcgctgtgtcatctgttgtcaggccgattaccgcaatttttacaccctgcttatcaaacatggcgtacggcttaaacaggcgttcaccggtgcttttcttatagatattggcggacaggaacgggaatgtggcccatttttcctgaatacgcagcgtttcaagcggattatcaaactcgtggttgcccagcgccatcgcgtcataaccgaccagattcatccctttgaaatccggctcggcattttgtaaatcggactccggcacgccggtattgatatccccgccggagagcagcagcagtgagccgcccttctcttccacttccttacggataccatctaccagggtcttctgggcggataaaccgtattcaccgtgatcgttctgccagaaatggccgtggtggtcattggtgtgcaaaatggtgatgtcgtaggttttatctttttcccaggcattcgccagcgccggaaaaagcattgcggataccgccagcgcacaggctgtggttttcagtgtaaatgtcatggtcattccctgtgtgtctgaatgatgataccggcacagaaacaactctctccggcgtcctgctgaaagtatgatgaaaattcacaaatttttacaccggttatgataaacacggcaaaaaagtgcgatctgactcaatgttttgtcatttagcggatccgcacaaatacgataacgcatccttagaaaatcgttaaatatcaatatacaacagagaataaatgcctgttcatccaccgcgtatcagtgtggttattttataccgctgagatattaccacgctgttaccggcgtcaaaaccgcaattaaacctgtatttttcagctgatttttataaatacatctgcatcgatagcaaaaacagactaaagacacttaataatctgttaattaacaataatattgaagattaaagtaaatcaatgatggtgcacgcggggatcacaaagagcagaatacgctgaaaatagtcaaagctgaatggtatctgctgttaagtcctgttttttacataattagttatatttttaacgcgatttatgtcacgaaaacatgtattatatttatagctaacccacatccgttcacaccactaatcaaaaggagaatgaaaaaagtgcattcaacgcctcttatcacaactattgttggcggtctcgttctcgcttatttactcggtatgttagcgcagcggttaaagatttccccgttagtgggttatctggcggcgggtgtgttagcaggcccttttaccccgggattcgttgccgatacatcactggcaccggaactggcggaaatcggggttattctgctgatgttcggggtcgggctccatttttcactgaaagatctgctggcggttaaaaatatcgccattccgggtgctatctgtcagatagccgtcgcaactattttaggtctcggtcttgccagtctgttcggctggggattatttgccgggatcgtatttggtctgagcttatccaccgcgagtaccgtggtgctgctgcgcgccctggaagagcggcagctaatagaaagccagcgcggtcagatagccatcggctggctgattgtcgaagatctcgccatggtgttaaccctggtgctgttaccggctgccgcttctatcattaataacccggaggccagtgccagcacatcagatctgctgataagcctgagcattactatcggtaaggtcgtggcattcatcctgattatgatttttatcggccgccgcgtgatcccgtggttactcgccagaacagccgctaccggctcccgcgagctgtttaccctggcagtactggtgctggcgctgggtattgcttatgccgctgtcgcgctgtttgatgcctcgtttgctctcggcgcgttctttgccggtatggtgctcaatgagtcagaactgagccaccgcgccgcacaggataccctgccgctgcgtgatgccttcgcggtactgttctttgtctctgtcgggatgctgtttgacccgatggtgctgattaaccatccgctgggcgtgctcggtgtgctggcgattattatcattggtaaatccgccgccgccctgctgctggtgaggatgttcggccataaccggcgaacagcgctgacagtcgccgtcagtctcgcgcaaatcggggaattcgcctttatcctcgcgggaatgggggtcacgctggaagtcctcaaccgccaggccaatgacctgatcctggctggtgcgattgtctctatcatgctcaacccggtgctgttcacactgctggaccgctatctggaaaaaaccgaaacaccggaagagcagcaggaagaagaaacgctggaagaaatcacccaggtgccggtcaatatctgcggacataccattattgtcggttatggccgcgtcggtgcgatgctggcggataaactgcataataaagggtatccggttgtggtggtggaagatacccgcgcccgctttgaagagcttgccgaacgcggcttcccttccgtgatggggaatgcggtggcacaggatgtgctggagcttgcccgtgccgattgcgccagtgcgctgctgctgaccattccgaacggctatgaggccggagagattgtcgccaaagcccgcgccatgaacgcacatatgacgattattgtccgcgcgcattatgacgacgagcgcacctatattatggagcgcggcgcaaaccgtgtggtgattggtgagtttgaaattgcccgtgcgatgagcacactgctggtggaaaaccagactgatcatgagttcggctgtccggtcaatatcaatccggcggcggaagcagagacggaaggccgctcactgcatgacatgctgcgcaaacctgaagcagatgccgccccggagaaccagaatccgcatccgtcggcataatttgttttaatcaacagaaatacaagcccggtttatccgggcttgttatttatgctcggctaataattttatattatttaatcctttttacagagtctgatacccatagtgagatcagattaataacacctcctgtaatgatcgcgatagcataattaatatctgtaaaaaatgaaaaattgaaatacatttcttttaatatactcaatttcaaaagaggaaatacggtgacaaataatattgatataagtatggatataattactctatttattattttttgttttagtattaccctcctaaaacagatgacatttacaagactcagtaatactgcaataaaatactggccggcgtcaggcatcgcacctcctctggagaaaaagacactcatccggatgatatggatttatcagaatacatgatcatgacagatattattatcttttatttacgggattcagattatttttacatcacgccgaacatcattataagatgaattattttacatttaagttaattttaatatcacaccttataattatattcgataacatataaatattaattctgcctgacatttatattgttattcctgataaaaaaacgccggataattccggcattttttatatcagttattgttatcagcgttcccagtatgactcttccaggctgtcttcacggtccggtaaccctttggtcagacgcggtgagtgctgaatcagtacctgatagctgacacggttggcatatttgcagacctgcgccagtgaagagtatgtcagataacggcgctgatgcttactggagttcgggatattcatccggtgatagctgttggccgtaatatcatgcagtaatgcggataatgccccgtcgccggcaccgttggtgttcattatcttatccgggccgcccatataaggttcgatatgggaatagacccgcgccgcgtcctgacaatctttctgacgcattgcgcggctgaattcatagcggttaaattccgccagcgcacccggtaataacgggtgagtagtttcgcgcataaattctttttctgaataaccggccatatataacccggcaggacctgcggtacacaacaccagatccacccagtccagggctttatctgacgccagaagcgggtcggcaacgccggtcagtgccagcgcttcttcttcgttcattgccagcacagagacattttccgcaaggaaatcacgccaccactgcggatcttccgcaatcacatgtttggtgcccagtgtcagaaccaccggaacatcatgtttccgggcatattcgatagctttcatggtggcatccggcatcggttcgcccggtttgcagcgtaccagataagccgtcagcaccagtgcggaggcttccgcaataatcgcttccggaatgctttccgggcgcagctggttcatcagcccggggctgatggcaaatgtccgctcgccgttttcactgatcagggtaaaacagcggccaatcggtccgtcgacaccctgtaaatagttgagatccatacggctggaggtgttgcacagataataataggcatagctgccaatctgaatattattgcacatggtgcccagcagcacagaacggtcgtccgccagaacagaataattgtgaagggtattaccgatagtaccaccggcaaattcatgggtgatcagcgaacgctcaatcagctcacggtacagctcttcagccacatcatcctcaatcaccagcgaatgcccgcggctgagctgataacggcggataaaatcatcatccacattggcttcgatatccaccagcgtctgatcaataccaacgatatacgcgcgggtattttcatcatctttcatcagttggacaggctgtaataacgggtcacgcaggctgaccgggaaatagtgtttggatttgcgtctgccggggaatttcataaaggttcatggccggaaaaaaagatggcgtattttatcataacgcggggaagaatgtgagcggacagaaccctcaatgtccgctcaaccggaaattatgctgatttttttctgttaacaaacatattccatgcgaaaaccgccatcactgacagaataaaccctaaaaaggcggatgcgatgagatacattttagtgccggggccgtctttcaccaccggcagatccggggattcggtcacggtgaacggaacaatgttcagtgagaaaggcgcgatacttttgatggttttcagggcataggctctgtccagaagttccgcatccacagccggtaaatcgagggctttcagggagtctctcatctgcatcactgccggacgccccatggcactgtaagaggcaaccgggtcagcttccgggttctgaggcggaacagatgccgctgccggcgcaacccgttcagccgcagccaggtaagccagcgtctgctcccgctgatgttccgctctcaccagcgccacattatactgactctgaccggcactcagcgcagcggccaggttttcctgtaactgcgtctgcatcacattctggctgtattgtgcggtgtaatcgagataatccgacaacatctgctgtgctgtctgcggatctgcagcggtgaaggtcactttggcagtggccggtttcagtatgtcgccgtccgttttctgaaaaccaaaagagccggaaactgctgtatcgccctgtgagaggcggaatgattcctggactgacggcgactgccagactgtatcaaaaacactgaatgcagccggcagatcagataccgcagtcacattgagtgcattcatctgctgacggactttatccagctccggcatatcgcgtagctctgttgctgtcacttcggcggtactggtccatttctgcggcagtattttggagacaccgaatccggcggcagcgaataatacggtcacaatgacgataaaaaccttatggcggtataacagtttcagcagatcaataatatcgatctcgtcattattcaggttcactgaacccttctcattcaccatgtccgtagcacctgtcctgtctgcaatgaaatactgaatttcacttaaaatgaacagtaatatctgtcatttttcagctaattaattgttacatgattaatgttaacattaatttctcaaaattctacgcataacagtggtatatttcggactattccagattggaatgcgaaaaaactagccaaccaactcttgcaacagttttatatgaatatcagcatcattaagggactgaatgtaatgatattcctccccgccggaagacaaaaagaatgctttattctgttccttaatttcctctaacgtttccaggcagtcagccgaaaatcccgggcacatcacctgaacagattttacgccttttgagggtaataacttcattgtttcatcagtataaggcgtaagccacggctcacggccaaagcgggactgataagtgtgcatgatatgttcagacgggaaattgagcctttcccgcagcaatgccgttgtggcctcacattctgccgggtaaacatcgccttcttccgcataacggacaggaataccgtggtaggacaaaatcagccggtcaggtaccccgtgctccgcaaacgcggcctccgctgactgtgccagagcctcaatatagagcggatgtgtcgcgtaactgcggataaaatgcagtgacgggaatgtccggcggcgtttaaagatatccgccagcccgtcaaacaccgcagcggtggtagagcaggaatactgcgggtacagcggcaggacatccagatgtgtcactccctgcgccagtagggcatcaacggcggattccagtgacggtgaaccatagctcatccccagttccaccggtgtgcccggcatctgtgccgccagtgctgcctgctgacggcggctgtataccagcagcggagaaccctcttccatccagacagactgataaagtttcgccacacgcggcgagcggaacggcagcacaataccgcgcagaatacactgccagagcagcggagagacatccaccacacgcggatcactcaggaactgcttcagatagcgttttaccgccggagtttccggtgcatccggagtgcctaagttaaccagtaaaacgccgcgtttgtgttgatttgtcatcagaaaatcctgtcagcaactgagaatgattgtcagggtaatgtattgtgtgtaatgattcttattcttttctgccatgttcttcatgttcttcatccttttgtccgcaggttcgctggctgcggctcactggcggcgcaggataaaaaaaagcagccgtttggctgcctgacagaaataagtgccggattaacccaggatacgggctaattcctgactgacttcgcttaccggacgggtgccgtcaatacggttgtatttcacgtcactcatctgagcttctttctgatagtactggatcagtggtgcagtcagctgatggtattccaccagacgcttacggacagtctcttcctgatcatctttacggatggtcagttcttcaccggtcacgtcgtctttattttctgtcttcggcggattgtattttacatgatacacacgacctgagcccgcatgtacgcggcggccgataatacggtcaacgataatctcatccggaacatcaaattccagaacgaaatcaacggtgataccggcttctttcattgcatctgcctgcggaatggtacgcgggaacccgtccagcaggaaaccattacggcagtcatcctgtttgatgcgctctttaaccagtgcgataactaatgcgtcagtcactaatttgccgttgtccatcagttcttttgcctggagacccaattcactgccggatttcactgctgcacgcagcatgtcacccgtcgagatctgagggatcccgtatttttccatgataaactgagcctgagtccctttaccggcgcccggagcgccgagcagaataatacgcattgcgtaaaccccttgctggttgcttttttataattcggataaaaacaagctaccataccatttgtcagggtatggactcaagaaaagcggggaaactctgacgttcgtttttcctcatttcaataaaaaaaccacatgatcgtcatgaaatcatgtggtttttaagcgggttatgcgcgattgtgctcacccggcgcgggaacgcctgtttttagcctaataacagactattcatccgggaaacaaattcgttcggatcttccagggttccgcgttcaacaaacagtgcctggtcgagcagcagattgatccagtcggcaaagcggctttcgtcctgctgttctgcggccagtttcaccagcggatgctccggattcagctcaaagttatatttcacttccggtgcctgctggccggcggcggcaaacagtttcgccatctgagtgctcatatcatcggcatcggtggtaacaatcgccggggtggaggtcagacggtgagtcagtttcacctctttcacacggtcgccgagcagggttttcacacgctcaacaaacggtgccagctctttgtccgcttcttctttcgctgccggatcttcatccgccagtttttccagcgattcatcggccttactgacagactggaaggttttaccatcaaattcattgaggtaattcatcatccactcatcgatacgatcggagagcagcagcacttcaatgcctttcttacggaacagttccaggtgcggactgtttttcgcagccgcatagctgtctgcggtgatgtagtaaattttctcctgaccttccgccatgcgggatacataatccgccagggaaacggtctgcgcggaggaatcttccttcgtgctggcaaaacgcagcagtttggcgatcagttccgcattggtgctgtcctcacccgggccttctttcagaaccaggccgaactgctgccagaaggtctggtatttttccgcatcattattggccagtttttccagcatctgcagaacacgtttggtcagtgcgctgcgcagactgcgggtgacggcgctgtcctgtaaaatctcacgggaaacgttgagcggcagatcattggaatctatcaggccgcgcacaaagcgcagatagttcggcataaactgttccgcgtcatccatgataaacacgcgctgaacgtacaggctcaggccacggcgctggtcgcggtgccacaggtcaaacggggccacggacgggatatagagcaggctggtgtactcctgcttcccttccacgcggttatgcgcccatgtcagcggatcagcaaaatcgtgggagagatgcttgtaaaactcattatattcttcatcactgatgtcgttcttattgcgcgtccacagtgcctgagctttgttgattttttcccagataacggtgccgtcttcttcatttttgctttcgatttccaccggcagcgcaatatggtcagaatatttgccgataaccgagcgcagacgccagtcatccaggaactcatcttccccttcacggaaatgcagggtgatttcggtaccgcgtgaatctttatgggttttggcgatggagtaatccccttccccttcagattcccagaacaccgcctgatcagacggcacacccgctgcacgggtgatcacagtgactttgtccgccacgataaaggcggagtagaaacccaccccgaactggccgatcagctggctgtctttggccgcgtcagagccgagtgactccaggaaagctttggtgcctgatttggcaatggtacccaggttatcgatgacctcatcgcgggtcatcccgataccgttatcactgatggtcagggtgcgcttttctttatccgcggacagccggacatgcagatcaccgtcattttcatacagtgaactgtcggataaggcacggaaacgcagcttatcggccgcatcggaggcgttggagataagctcgcgcaggaaaatttctttgttggaataaagtgagtggatcattaactgcagaagttgttttacttctgactgaaaaccacgggtttcttgttcttgcagactcatgaataacctcagactgacttatcaacgaaaaaaaacaggataaaaatcaggtggggccggtctttgggttttcaaggcaaacggggaattttttgtgacaattctgaggaaaagtgacagacggcgcaagccgtctgtccgggtaacaggcagaaaccgccgtcagtaatcgctgttataacggattttctgacgcccggcgatggagtgggacaaggtcgtgccatccaccatttccagctcgccgccgaccggcacgccgtgggcgatacggctggcggagacatcatactgcgcgcacatttccgcaatatagttggcggttgcttccccttccactgtcgggttggtggccaggatcacctcagtgatggtttcctgagacagccgctcctccagtttatccagcccgatatccatcggaccgataccgtccagcggtgacaggtgtcccatcagcacaaagtagcggccggagaactgccctgtctgctcaatcgcgtggatatccgccggactttccaccacacagataagaccggtctgctgacggcgcgggttggcgcagatagtacactgttcctgctcggtgaaggtccggcagtcccggcagtggccgatttccgacatggcacgggtcagtgcctgtgccaggcgcatcccgccgctgcggtcgcgctgtaacagctgaaacgccatacgctgtgccgatttcggcccgacgcccggcaggcagcgcagggcgtccatcagtgcttcaagaagcggactggtttgcatcagaacggcatcttaaagcccggcggcagctgcattccgctggagactgacgccattttttctttctgggtttcgtcgatacgacgcgcggcatcattgaatgcggcagcaatcagatcttcgagcatctctttgtcgtcttccatcaggcttggatcgatttccacgcggcggcagttatgtgcgccgttgatagtcactttaaccaggcctgcaccggattcaccggtgacttccgtatttgcaatctcttcctgcatctgctgcattttatcctgcatttgctgggcttgtttcatgagattgcccaaaccgcctttaccgaacatagttttctctctttgactaaattgcgtattctaacgcaaggtggttaaacaggccggatactctcttcatccagttccgcatcaaaaaaggtcagcagagtctgaatggttttatccgtcacaatggactgacgcgcctgcgccagcatctcttcatagattgcctgccgccattccagcggcgttttcatgctgacatcatcgtcttcacaaatcgtgagactgataactttaccataaagttcactcagtgcatcactcagcacgctgtgtgctgattttgaattcaggtggcgctgtgaggtgcgcaggtgcagacagatactgtcttccccggtctgctctttcacggcgttcagcgccagttgctgcaccagtttcggcagctgcattttatcaatatccgccgcccacggatcccgttcccgggcagcaatcgccagtttttcagccacttccggcgttttttcgtgctcaagggcttttttgatatctttcggccgcgcaaccggtgttttctcttccggttcatcctgcttctgcggacgccactgatacggctgcggtttaccggatactttcggctgcggtgcggacacagcgcggccccggcggttttcagtcacggcagcgagtcgctccagtgctgagttcgccggtttacccttctcagttaaggtaaccggctcagacttttttgacggcgggatctcctgccggttcagtgcgtcacgggctttcagcagctgggctgtcgggttgttttccgtttcctgcggcatcaccggcggcggcgtactgcgcgccggtgcggccggtaccgctgtctgcggttgtgacggcagagaaaccggtgccacggacggcgcggtgatcacttcatcaatcacattacgcggatgaaatgccagtgcgcgcagcagcgccatttcggcgcccatgcgtctgtcaggggcatacggcagctctttacggccgaccagcagtgtctggtaatagagctgcagatccgccggggcaatagctcttgccaggatacgcagacgttcgtctgtcaccccggcactgttatcctgtaccggcagcagttgcagcatggcgattttatgcagcgcggccagcatttctgtcagcaggttatcccagtccgcgccccgtgatgcggcatcattcacgccgttcatcacctgaacgccatcccctttcaccagggcctccaggatagtcagcggctgttcgtcgtccagagtgccgagcatctgcgtcaccacctctgtggtcactttcccggcccccagggcaatcgcctggtccgccagactcagcgcgtcacgcatactgccgtctgcggcacgggccagtaacaaccgtgcacgggcatcgttttcaatctgttctgcggtcagaatggtatcgagctgctgactgatctgatccacatccagcgctttaagatggaactgtaagcagcgggataaaatcgtcaccggcagtttttgcggatcggtggtcgccagcaggaatttgacgtgctccggcggctcttccagggttttcagcagcgcgttaaagctgtgacgagagagcatgtgcacttcgtcaataagatagactttgaaacgcccgcgcgacggggcgtactggacgttatccagcagttcgcgggtatcttccaccttggtgcgcgacgcggcatcgatctcaatcagatcaacaaaccgcccctgctcaatttccaggcagttctggcatttaccgcacggcgtggcggtgatgccctgctcacagttaagacctttggcaaacaggcgtgccagggtggtttttccgaccccgcgggtaccggaaaagagataggcatgatgcagccgctgatgttccagcccgtttgcgagcgctgtcagaacatgctgctgaccgataacctgtgaaaatgtttgtggtcgccacttacgggcaaggacttgatagctcatggattccgcagagagtgaacatgattttccatcatgctaccacagcctcaccacaatgggcgaggctgagtttgcgtttaatacggggagagactcagccgccggcatattccagcaggcagaagctgtgcacaccttccgcttcaaggcgttccgcgccgccgagatcaggcaggccgataataaaggctgcttcatgcacttcaccgcccagacggcggatcagacggatggtcgcattgacggtgccaccggtggccagcaggtcatcgacaaccagcacgttgtcaccgctgctgatgctgtctttatgcatctccagggtatcagtgccgtattccagatcataggtctcgctgagggtatcacacggtaatttcccttttttgcggaccggcacaaagccgacacccagacgtaacgcaaccggtgcgccgaataagaatccacgggcttcagtgcccacgactttggtgatccctttgtctgcgaagtgctccaccagcatatcaatcgtcagacgataggcttccgggttggccagtaatgtggtgatgtcgcgaaacagtaccccttccttaggatagtcagggatagtccggatactttctttaataaattgcagttgttcagcagttgcgctcataatgggtgccatagagataacacgaaacctcagaatctatgcaaatcaggggaaaattgcaaccgtatcccgtgactttgccgattatttgttgttttatatcaaacagactaaaaaatgcttctgtaactatgaacccgggcacatttcactgaggcggataatgaacaccagacaattgttacaggcgctgcggcagaaaatcagcgcgctggaagagcagattgccccgatagcagaccgggaactgagccagcgccgcttcgatgataccctgttcgccgcccgtaataaaaccctgcgcctgtgcatggatgaattactgcaccatactgaccagctggcgcagtgtgcggacgaaaaccgggctgaacaggtacgttttctggcggaaaaaattgtcgcccagattgcggccctgaaccgcgaggccgccactcaggcgctgcggcagaaagaacagagctatgtgaaacgggacagccaggtggatctgtatcagcgcctggcgcagcatcaggattatgagcgccgcctggcacagatgaccgatgaccgtgaactggcactcggccgcgcacagacctttgccgagcagcaaaaactccagaaagagctggcggcactggccgggcgtcttgtccgctgccgtcaggccttacagcgcattgaacggcagattgaacgccacgacggcaccgaattttaatcagataccggataccccatgagtcttgaaaatgcccccgatgaggtaaaactggcggtcgaccttatctgtctgctggaagagaaccgcatcccggccgcaaccgtgctcgcggcgttacagattgtccgccgcgattatgaaaataaactgcgcgatacagagagcggtcaggccggctgagcgccgtcatcctttccctgcacctgcacttctttgccgctgttctgatcgtggagatacacttccaactgattgaaggcgatattaatatcgttctcacgcgccatccggtcaatcgcgcggttcacttcatccgtggtggcactgcggtcaccaatggtgcgcacatagaaacgcagctgatgatcgaggctgctggcaccaaactcggtgaaatacacgcccggtgccgggtcggtcatcactttcgggttatcggtggccgctttcagcaagacctctttcactttcgccagatccgagccgtaagccacaccgacattaatcacaatccgcgttaccgtatcggacagtgaccagttagtcaggcgctcggtcataaaggctttgttcgggataatgacttctttgcggtcaaaatcaatcaccgtggtcgcacggatgcggatcttgttaaccgtaccggagaaagtcccgatagtgacggtatcgccgatacggatcgggcgttcgaacaaaataatgatacccgaaacaaagttagcaaagatttcctgtaacccgaagctgaggccgaaggttaaggccgctgccagccactgtaatttaccccacgacaccccgagggtgccgaacgcggcaatcgtcccgatcccgataatcagatacgtcagaatggtggtgatggcatatgaggtgccctgacgcaatgagagccgcgagagcacaaggacttcaagcaggccgggcaggttgcgcatcattatccaggacaccaccacaatcaggacagacaggatcagatccccgagcgtgatcgcctccaccacattccccagtgcggtatcgacgttgtaatgccacagcgtgatactgtcaaagaaggagaaaatggtaataaaatcagaccatatgccgtagaacgccgcagcaaagacaataaacaggaccatcgaggtcagacgcagtgactgctggttaatcagctccatcgacatcggcggctcttccacaatcacatccgggacatcatccccctcatgctgctctttatgctgaacctgctgtttctgacggcgggccagcgcacgctgataggtcagacgccgtgccgccagtgccaggccgcgcagactggtatgatagacgatataccacatcagcagcagatagaggctgtctatccagcggctgctcaggcgcagtgcggtgtagtaatatcccagcccgaccagcaccaccagtaccagcggggagaacgtcagtaaggtcagcaggaacgcccgcaccagatgagagcccttctcgcgccagatctcaatgcagaacggcagtgtgaatgcaaagacaaataccagtgccaccggtaccaccagctgaccaatcacatcatccaccaggcgcagcgggtattccatcccgtaagccgcccacagcataatcggcagcagcggcagcgccaggcgcaccagtctgcggcggccggtacggcagatttcaggatcgatcccgaagtgtgtgactgcaattccctccggtttcataatccggtaactccactcgaacagcacccagaagagagccagctggcgggagatagtccacatcagcgcggaatccgcactgcctgttttcaggcagaaatagccgaaggcaatcacaaacagtgaggacggcagggttttgatcagcatcagacccagcgccatcggtgtgtagatctggcgatcttttttcagccgcccgacatcggcattaatttcagccagtttggtatcaatattcttggtaccgaaacgcagcagcagcgcaataatcagcagcgggatagtaataaagagggaatcgacaaaaccgttgatcaggctttgcagcgaccagttcagatccagtgacgtcagttcctgtttggccgcgcccgggaaggactggaaccaggccaggttgaccggtttgttactgttgacccagaaaatctgctgcgcgagggttttctccagtgaggccaccacggtgaccagctgagtctgatcgagctgcaggttaatcgcctgggaaatctggttacccatttgggtattcagctgatccagtaaatcctgacggacagataccacctgcatcagcgcatgtttctgagcccgcagctctgcttcggtcgccggcatatcatgggttttggcgtactcgtcaatcatagtactgacaaagttatccggctgataaagcttgtcacgctgctggttgatttcaaactgcgccagacgcatgtccgcaattctgtccggcaaatctttgatcagcagatccggcggcagatcgatctgctctttaaacaggatacgggagagcagcaggctgccgcgcagcacggtaatctgctctttgaggttgcgctcggattgcagtgcgcgatccagaatactgcgtaccttaatggtgcgctgcaccagctggttattatcgcgggtggcggcgaccagtttttcacttaaatcatgattgagcgcgatttcacgctgcaccagcggatcatcctgcatattgcgctgggtatcatccgaactctgagcctctttggctgcctcttccgaataatccagccgcttgccgctcaccgtttcctgaatcacatcaatattgctttccagctgtttgatgcgctccaccacatagtcacgctgtacctgcagcaggttctgtaactgcgtgttcgactgtaatgcccgtttctgataatcaatctgctgctgtaagtaatactgctctacctgaagggcttcaatttccgtcggccgcagcactttctgggccgccatcgaatcattcagcaggacgcggatctgctgcaggcgctgcacattggcatacataatattctgcgcgcgttccggctgagtctggagagcaatcagatcactgttataagaagagaggttattctgtgcggtctgcaacgcctcaagggtgctgttaagtttcagctccagttgtgagagcggcagattctcaatggaggcccggtattccgccacgccttcatcagttaatgatttaatctgcgttaatttttgagtgacctgctctgacagtttcggggcttcatccacccgttttttcagtgcctgtgatttctctttcagggcatcgagattgtcataaaacaccagcgcccgctccagatcctgcactgacagcttatcagcggcagtctgttctttgcggttattcagggcattgagttcggtctggatggtgttgcggtcaggaatatcctgtacggctgccaccgcgctgttctgcaccagcaccggcagcagaaatataaaacaggtaaaaagacggaggaaaatctgcctcagcagaccggaagccgggacacggctgattcgcttcataataatatccacctgtatctgcccttccccggctgtctgtttcaggttatctgattaaaaggtaatgattttttctgcatcaagtgaccactgcgccagctcggccagtgtcccgacctgcacgccgtccaccagcggaagctcagtgataccgcgggcatcggtgcaggttttgcacagcttaatgtctgttttctgtgccagcaggatctccagcatctgtttcaggttataaccctctttcggctgctgaccgcgtaacccggcgaccaccgcatccgacatcagaaaaacattcatcggcacctgactgtcctgctctttaatcgcaattgccagacgcagtgcgttaaataaagattcactgccatacgcagcgccattggcaataattaatacaggcttcatacatgatatccttaaggttagtgttataaaatgtaaatcaggcgtctgccggcggaagctgcatatttttactgagcattaacatatccagataaccgtcaaccaaatattcagcctgcccgctgatattaaaactctcgctggaaaagagccagttttctaacagcccggttatcattccgcgcagcatgatggcggcacggcgcaggtctagggttgccggcagcagccccagtgtgacactttcaatcaggaatgactctattcttgagtattccgcagcatataaattttgtctgatggtaattaattcgctcatttcaccggtaaattcacatttatgaaatgaaatgctcagaatagcccgcattttgggatcagaagccacagacgtcagaatgtaaattaatattttcttaaacactaaaagtggattatccgggtattttgcccgatactcttgttcaataaagccaattttcgtatcggttatcgaacagacttcagtaaacagatcaactttatttttgaagtgccaatagatcgcaccacgggtcacacctgcttgctttgcaatatccactaatgacgtcgcagacacaccttgctcactgaaggcggttaacgcggcatcaataatctggcggcgggtttctccggcctgttgtttagtttttcgtgccatgtaaggcctgtgtcatctgaagttaatttacatacattcgtgtatgtttgtattatagcacgctgatttattagttaatcaaccatatttaacggttaaaaatcgacattttatagaggtttactatgcgaaaaaacagaggcgttctacctctggcgatgctcgttctgtccgggagctttctgctgtccggatgtggtgaagagcagaagcaagggggcgaaatgccaccgccggatgttaaagtcgtcacactgaaagccgcaccactgacagtgagcacggaactgccgggacgaacttctgcttaccgcatcgcggaagtacgccctcaggtcggcggcattattttaaaacgcaactacaaagaaggtagtgacgtcaaagaaggcgaatcgctctatcaaatcgatccggcgccttttcaggccacgctgaacagcgcgcaggctgaactggcaaaagccagagcgaatgccgaactggcccgcctgacagtgaaccgctataaaccgttgctgggaacaaactatatcagccgtcaggattatgatgaggctgtctccacacatgcacaggctcaggctgcggtccgggctgcacaggccgctgttcagacagcacaaatcaacctgaactacaccaaagtcacttcaccgatttccggtctgtccggtaaatcaaacgtgactgaaggtgcattagtggcatcgggtcagtcccagccgctgacactggttcagcagattgaccctatctatgttgatgtgactcagtccagcgatgattatctgcgtctgaaacacgaaatcgccagcggtatcgtggataaagaacagggtaaaatcgcggtcagcctggtcaccgctgagaacaaagattatacccataaaggttatctggaattctccgatgtgactgtcgacgaaaccaccggctccatcaccatgcgtgctgtcttccctaacccgcaggaatcgctgctgccgggcatgtttgtccgcgcccgtgtggatgaaggtgtgcgtcctgacgccatcctggttccgcaggaaggggttatccgtacagcaaaaggcggtgcggtggttaacgtggttaacgccaaaaacgaaatcgaagtccgtccggtcactgtcggtcagtcttacggtaacaaatggctggtcacctccggtgtgaataacggtgagcgcgttgttgtcgaaggcttccagaaaatcaaagcgggtgctgccgttaaggcaacagaagcagatttaaatgcacagccggcggctgcgccgaaaaatactgaatctgctcagaagtcccaataaggagtcagtgattcatgccaaagttttttattgaaagaccgatatttgcatgggtaatcgcaattattaccatgcttgcaggtctgttggcgatcatgaaactgccggtggcacagtatccgactgttgctccgccgactatttcaatttccgcaacctatccgggtgcggatgccgagacggttcagaacacggtaacccaggttatcgaacagaacatgaacggtatcgacaagatggtgtacatgtcttcaaccagtgactcagcgggtaatatgaatatctcgctgacctttgaagctgacgccaacccggatattgcccaggttcaggttcagaacaaacttcagctggcaatgccgctgcttcctcaggaagttcagcagcagggtattactgttgagaaatccaccagttccttccttctggtggccggtttcgtgtctgaggacggtaccatgtcccagaacgatatcgcggactacgtcggttctaacgttaaagacccgatcagccgtgtaaccggggtgggtgaaacccagctcttcggtactcagtatgccatgcgtatctggctcgatccggacaaactggtgaaatataacctgagtaccattgatgtcatcaatgcgattcaggtacagaataaccaggttgccgccggtcagctggggggaacaccgccggtgccgaaccagcgtctgaacacctctattattgcgcagacccgtctgaacacacctgagcagtttcaggaaatcatgctgcgggttaatactgacggttcggttgtccgcctgaaagatgtctcttacgtggaactcggtgctgagaactacgggattattgcgcgttataacgggaaaccggcagctggtatcggtattaagctggcaaccggtgccaacgccctggataccgccaaagcggtccgtgagaaactgacagaaatgtcagagtttttccctgacggcctgcaggttgtttatccttacgatacaacaccattcgttaaaatctccattttcgaagtggtgaaaacactggtcgaagcgatcatgctggtgttcgtggtgatgtatctgttcctgcagaacttccgtgcgacactgatcccgactatcgccgtaccggtggtactgctggggacctttgccacccttgccgcattcgggtattcgataaataccctgacgatgttcgcaatggtgctggcaatcggtcttctcgtggatgacgccatcgtcgtggtggaaaacgtcgagcgtgttatgcaggagaccggcctgccgccgaaagaagccacaaaagtatcaatggttcagatccagagcgccctggtgggtatcgccatggtgttatctgcggtatttattccgatggccttcttcggcgggtcaaccggggcaatctaccgccagttctcggtcaccattgttgcggcaatgatcctgtccgtcttcgtggcactgatcctgacaccggcgctgtgtgcgaccatgctcaaaccggtcgccaaaggcagccacggcagtcagaccggtttcttcggctggtttaaccggatctttgagaaacagacccaccactacacagacagtgtcggccgtatgctgcgcggcaccggacgttatctggtgatctatgtgctgctggtcgcgggtatgatcgtaatgttcacccgtctcccgacctctttcttaccggaagaagaccagggcgtactgctctcgatggttcagttaccaccgggctcgacccaggaacagacacagactgttcttgacggtgtcagcaagtactacatggaagatgagaaaaaactggttgagtctgtctttaccgttaacggcttcggctttgcgggtcagggacagaacatgggtctggcgtttatcgttctgaaaaactgggacgaacgtaaagggaaagaagataaggtggaagcggttgttgcacgcgccaaccagcacttctttaccaacacctccgccatgattttcgcggttaacattccgccgattgtggaactgggttcatccagcggcttcgacctcgaactgatggataacgccaaccagggtcacgaagcactgaccgctgcccgtaaccagttactgaagatggcaggcgagcatccggatatgctggtgcaggtgcgtccgaacgggatggaagatacctcacagtatcatatccatgtcgatcagcagaaagccgaggcattaggggttgatatcaaaaccattaacgccgcgctgagcaccatgttcggcggaagctacgtcaacgactttatcgaccgcggtcgtgtgaagaaagtgtacgtgcaggctgatgcgccgttccgtatgcagccgaaaaatattgccgagcagtatgtccgcaataaccagggtcagatggtaccgttctctgcctttatcgatacgaaaaaggatccgtggaccttcggttcaccgcgccttgaacgttataacggtattccggccatgcagatccagggcagcgccgcaccgggtaaaagtagtggtgacgcgatggctctgatggagaacatggcgaaagaactgccgcagggctttggtgttgagtggacaggtatgtcttaccaggaaaaactgtccggtaaccaggcacctgcgctgtataccatctctctgattgtggtcttcctctgtctggcggccctgtatgagagctggtcggttccgttctctgttatgctggtggttccgctcggggttatcggtgcactgttactgacccatgcacgcgggctggataacgacgtgtacttcaaggtcggcctgctgacaaccatcggtctgtcggcgaagaacgccatcctgattgtggaattcgccaaagacctgatggagaaagaaggtaaagggctgattgaagcaacactggaagccgttaagatgcgtctgcgtcctatcctgatgacatcactggcctttatgctcggggttattccgttagtcctgagtaacggtgccggttccggtgcacaaaacgccgtaggtaccggggtgttcggtggtatgatcgccgcaacctcactggctatcttcttcgtgccggtcttctatgtggttatccgccgccgcttcagtaagaagaatgaggacattgagcatgctcatgcggtaacgcaaaagagcgatagtcctgacggattttaatcctgcttaaacataaaaaggtcacattagtgaccttttttatttttttgacatgatgaatatttttaaatttgagtaagaaaaacttaaataaacaatagatgaatgtaaattataacattttacaaatgtaaggttttgtcataacacgttatgattcatcacctgccctttcccataaaaattcagtaaatttaagcagatgagtaattatgacctgtgtatcagcgcatttattctgcatttaaatttactttttttgtattttggctagtgacaagggccgaaatagtgttatattactaacagggctaactcagacctttttattcacatctttttccggaacatcacgttcactgactgaaacagattaacacgtaatcagcgtctggttatccgcttgtgctgaacggaactttacattacctttatttataattaaaggctgatgatatatataatacaccgacgtcgataacgtaataacttactcatgtgttaattataatttaacgtttttcagcgccttatcattcccggttacattcaggaggtgattatggacgagtattctccacgaaattacgatattgcggtactgaagtatctgtgtgatgaactttgccgtgaaggcacacaaaccctcatcagaagcaataattattgggttaatgatttagcctcagattcaaacttaaaacttaacgaattattaggttacattgctgacgtgacctggagttttaagataaaacatacacaaaataaggatctcatctcatttgtcgatgaatacatcgatgaaacttacgcgctgtttggtcagatggaagtttcatttaatgacgttgaggaatggaagaagatggcatcactggtaagcagcatgctgaccagcgaggggcatcttgtccactaacggaatacagacttatatatcagtatattgcgtactaacaactcagcaagaagataacatatgatgactaaactggactatctcatgcgcttacgtaagtgcacttctattgaaacactggaacgtgtcattgagaagaacaaatatgaactgactgatgatgagctggaggttttttattcagcagccgatcatcgtctggccgaattaaccatgaataaactgtatgacaaaatcccggcatctgtctggaaatttgtccgttaattcaacctgctgtaaccgcctctctttcaggcaatagtcttatttttagtgatcccgggccaaaggcacagctgactgactttggctttcgatcatgcccgctatttatcccgctattctttacgtatattacgatacagatataatttataacaaaagaatatattttatgtttgtttcactcatcagattattaaatgacgttacccatttaataaactcaatgcagaacgaaaatttcattttcactgtttaccactataatgggttaaatcaaaaataagatttttacctgaacatgcggttttatgtgaaactctctcttttacactaagaacataaaacaaattttacgtatattgctatatccatatatctgatgttgcccgccaaatgccggagtttgtgcggacaagggataatgttaaattatgaatatatgaataatatgcgccggatgaacaacagaagaaactctttgtgcaaacggaggcaaacagtatcaataacgggataatcacagagacgggtacaacagaaatgggtgggggccttgccagcgacatcccggcacacaattcccctgctatggctgcttccttccggacctgaccgagttaacaagttcatgttgcgggagaaccaacaaagcccccataggaaccctcaataatgaggcggtgccattatccgggatcattactgaaatagcaaggcaaccggcgctgaccgctgtatttttacacaccactgacacaacaacatacctctgccggtcaggaaccgcacataacggcggtttatcatttttcaattgcactgacagcgattagaatgaccggttcctgctgaaaatacttaataagggtaaccatgagcctggcattagaaaatctgataaacctgatggcactagaaaaactcgaagacgggttattccgggggcaaagtgaagatctcggcctgccgcaggtctttggcggacaagttgccggacaggcactgtatgcagcgggacagaccgttccggctgatcgccgcgttcattcattccacagctattttctgcgtccgggcgacagccataaaccgattatttatgatgtggaaaatctgcgtgacggcaaaagtttcagtgcccgccgtgtcagcgcgattcagaacggaaaaccgattttctatatgaccgcctctttccagggggaagagagcagttttgagcatcagaatgccatgccggaggttccgggccctgacggactcgcctctgaaactgatattgcccgcaagatcgccgcgaatctgccaccgaaaatgcaggcactgttcctgcgtgagcaggctattgaatggcggccggtgcgtttttacagcccgtttcagaacccggagaatccgccggtgcgttatacctggctgaaaaccaacggcacaatgccggatgatcaggcgctgcatcagtatctgctcagttatgcttctgactacaatttcctgccgaccgctctccagccacacggctacggctttatgcagccggaaattcagattgccacgattgatcattccatgtggtatcaccgcccgttccggctggatgaatggctgctgtatgccgtggaaagcccgacagcgtccggcggacgcgggtttgtccgtggtcacttctataatcaggccggtgtgctggttgcatctactgtgcaggaaggcgttctgcgcttacgggatatttaagcgcctgcataaaaaagcccccgctgcacatctgtgagcgggggcttacttttttgcagttatgcgcggttataggcctgctcgccgtgcgtgctgatatccagcccgctgatctcatcctcttctgtgcagcgcacgccggttgtcagtgccgcacatttgaatgcgatgtaagtaatcactccgctccagagcacagtaaccaggatgctttctgcctgaatccatacctgatgcagcatagtgacaccttccgcgtaaccggtaccgccgagagcggacgcggtaaacacgccggtcagcagacagcccgcaataccgcagacgccgtggatcccgaagacatcgcagacatcatccgctttcaggcggcgcttcagtgcggtgacgccccaataaccggcaataccgctgataaggccgatgactatcgcccccgcaatgcctacagttccggccgccggtgtgatcccgaccagccccccgatacagccggaacacgcaccgagaagtgagggcttacctcgcatgcaccactctgcaatcacccacgccagcacccccgccgccaccgcaatcacggtattcaggaaagccagtgccgcaataccatccggttttccggccgatccggcattaaccccgacccagccgatatagaggatagccgnacccgaaccagccgatatagaggatagccgtaccggtaaagaccatcggcagactgtgcggtttggtggcagttttccccggtaacaggcgcggtcccaatatgtaagcaccaactaacccggcaaccgccgcgttgatatgcacaacggttcccccggcaaaatccagtgcgccatcttccgccagccagccgccgccccagaccatatgcgccatcggtacataagccagagagaaccagataacggtaaacagcagaaaggccgtgaatttgatccgttctgccagtgcacctgtgataagcgcaacggtaattgccgcaaaagagccctggaaaataacatgtgtcagctggctgatactgccgctgttactgacaggcgttatcccgctgagaaatgcatgagacaggccaccaatcaccccatttccgtcagaaaacgccatgctgtagccataaaaaacccataacaacagcaccagtgcaaagctgacaatcacctgtgtcatgactgataacacattctcacgccgtaccagtccgccgtaaaacagcgcgataccgggaagtgtcataaaatacaccagtgcggcacaaatcagcataaaaccattatccgcacgaaccattccttccgttgcactgaatgccggaagcggcagcacagcggacatcacaacaggcaaaaccatttttcgtttcatcatctgagtatctccgcgcggtttaaatagcttcatcattttgttcaccggtacggatccgcaccgcctgtgtaatgtctgaaacaaatattttcccgtcaccgatactgccggtgtatgccgagcggcaaattgcctcaataatgcgatcaagggcatcatcaggcacaacaatcgtaagctgtgtcttcggcagaaaatccgtgctgtactcttccccccggtacagctcagtgtgccccttctgtctgcccgcgccccgcacttccagtacggttaatccctgaataccttcttcgttcagcgcatctctgacgtcattaagtttaaaaggcttgatgatggccattatcattttcatcgcattctccgcttcaggttgctggtgtcctgagggcaaattgcaaaagtgatgccaataagcagagtggaaattaaatctattaataacaaagggatggaaataaaaaaggtgcctgatgaatcagacaccttttccggtgatgcggggattgcacttttttacagcatcatgcacctgtttatgtgaacgatctcacaattatagtgcaggggtatagttctcttccggggcgttaagtgattccccgacctgctgcagctgatacatctggtaatagcggcccttctctgccagtaacgcccggtgagagccggattccgccatttcgccgcggttaagcacataaatggtgtccgcatcgacaattgtggacagacggtgtgcaatcaccaccagtgtggtttcacggcggatcagctgtaaggctttctggatagcctgctcagtaccggaatcgatattggcggttgcttcatccaggatcaggattttcggggtctgcaccagcacccgtgccattgccagcagctgtttctgcccgtcagacaaggtgttaccctgctcgcccagttcggtatccagcccgtattcaagctgtgagacatgctcactcagttgaaccatctccagcacccggtgaatgcgctcatcatcaatatcccgtccgagggtgatgttgtcacggaaagaggcggccataatgaccggatcctgctgcaccatcgcgataccctgccgcagtgctttatgtgagaattgttccagcggacgcccgccgaggctgatttccccggcctgccacggatagtagcccatcagcaggtttgccagtgtgcttttcccgctgccggtgtgcccgacaaaagcgacaaaactgtgctccgccacatcgatgctgatatcgcgcagcaccggttttccgggctgataggcaaatgtcaggtgtgatacgcggatactgccgccggtcagcggctgatcatccgccccgtactcctgctgcgggctgtccatcagctcaaaaacacgctcaccggaaatcaccgcctgctgtaaaacagactgctgggatgtcagcgtgatcagcggttcattcagccgcccgaggtaggtgataaacgcatataacaccccgacgccgataacaccggtgccctcaaccccgaacaataacatcagaccacagaggatcgccgccgaaaacaggctcagcagcggacgcagcaaaatgccgtccagccgcagtgccgccattctgacctcataatgacggcggttggcggcaaacatccgttccccgaaacgcgcctgctggcggaactgctgaatcactgtcatgccgctgataatttcatggaaaccatcgttaatatcagccagatagctgcgcacccggcgcacaatcggcgtgctcagccgctgatagatccacatcaccagaatcactgccgggaacatggcggttgcccccagtgccatccgccactccagggagtacatagcgataagcatcaccacaatcagcgccacgctgcggaacagcgtcggcagcacgttgacaaacaggtctttgatcatctccgtatcattggtgacacgggagataagctgcccgaccggctgggtatcaaatgcactcagcggctggcgcagcgcggcatccatcacatcggcgcgcagtgtctgtaccacgccgacagcggcctggttgaaataaataagctgaaaatagtgcagcagcgatgcggcaatctgtaaggcgataaaccctgccaccagcaataatgtcaccgacaggacaatctggtttttcgccaccatattgtcgataaaatagctcaccagaaccggtgccgcgacttcagcaatcgctgtcagccacagcatcacaatggcaacggccatcggacgacggtagttacggccatagccgagcagacgtttcagcgacggccacaggttttttgccgcttccgggcgggtctgttcactcatcgagcgcggcctctaactgctgataatgatacatttcgcgataccatccgttctgattaatcagctcctgatgacgcccctgtgcactgataccgccctgttgcagcaccagaatattgtcggcttcggtcagcgccgagagccggtgcgcactgataatcaccgtacgtccttccccccagcgccgcagattctgcaggatccggtattccgtctgcccgtccaccgcagaaagtgcatcatcgaggatcaggatctccgcatccatcagcaaagcacgggcaatggagatccgctgtttctgcccgccggacagcatcacgccccgctcaccggcctgagtctcataaccgagcggtaatcgttcaatatcatcatgaacactggccagccgggccgcgtgttcaatttcttcctgtgttgccccgggccgcccaagcgcaatattattggcgatagtatcggagaacagaaacggcgtctgattcaccaccgccagccgggcatgccagccggcgaaggtcagttccggcagcggtctgccctgaaaacagatatttcccgcagtcacatcataatgacgctggattaatgccagcagcgtggatttgccgcagccggtcgggccgcacaacccgagcaactggcccggtctgagggtaaaacgaatatcatgcaggaccgcccggcggctttccggatagcagaactcattcacggcaacggacagttcgccgcgtcccggttgcggggattctgtaccatccgccagtaccggcggggtttcaagaagggattggatccggctgtaggccgcgctgccgcgctcaacgatgttaaacatccaggctaatgccagcatcggccagatcatcagcccgagatacataataaagctggtcagcccgccgagcgtcagtgtaccctgcatcaccatccagctgccgccggcaaccgcgagcaggtttgacatcccgatcgccattataatggtcgggtcgaaacgggcatctatctgtgccacatgcatatttttgcgtccggcttccgccgcaacggattcaaaccgggaagactggtgatcttccaggccaaaagctttaatcatccggatactgctgaggctttcctgcgcgtggttattcagggaggaaaatgcgccctgcgctgttttaaagcgctgatgcagctgctgaccgtaacgtttgatagccagtgccatcagcggcataggcaacagggaaagcagcgtcagctgccagctgatctcaatactcatcgtcagcaggaccaccagtcccatgacaaaagaatccaccagcgtcagcacaccctctccggcggcaaacaccactttgtccacatcattggtactgcgggcgatcaggtcaccggtccggtaacggtgataaaaggccggcgactggcggctgaactgctgataaaaatcctgacgcagacgtaccgccagcttgtaggaggcaccgaataaccagacccgccagatatagcgcagaatataaatcaccagcgcgataagcagcatcacgccgacccagccccacagagtggtggtggtcatcgtctctttggtcacgccgtcaacaatgatgccgacaaagcgcggcggcaggatctgtaacaccgcgataatgatcagaaaagtgaccgcaccggtatagcgccgccattcactgaggaaataccattttaattgggcaaataatctcacaggatcccgtataacatctcaggttaataatcagtccgctttgcatttctccggaatcggcaatgcggtggtgtactttatgcgctccatcgcaaaattggaagtcacatcaatcaaaccgggcacaccgttaaccagttttttgtaaaaatgatcgaagcatttcatgtccaccacctcgacctgcagcatgtagtcaaattccccggccatccggtaaaactccaccacgtcaggcatcttctgaacaaattccacaaactgagtataccactcactgctgtggtgctgtgtcttgatcatgacgatcaccgtcagtcccagcccgagcttttccgggtccagtagtgccacacgtttgcggatgtatccttcatcttccagccgtttcagccgtttccagcagggagtggatgtcaggttcaccgcttcggacagggtgttcagtgataatgcagcatcttcctgcaaaagttgtaacaatttacggtctgttttatctaacatatcaccaccagagagaataaatttctccatatcatgcatgatacagaaaatagaaaaagccttttctctcacagaattgctaagatgcatcaacagaccgtgaggagatactacatgacaacccaatggaccacatccgccattaatgccattcaggccgattatcagcgcagtgctgacacccacctgatcccgctggaattacccgtttacccgggggtttcattatatctcaaagatgaaagcactcacccgaccggcagcctgaaacaccgcctggcgcgttcgcttttcctgtacggcctgtgtaacggttggatccgcgaaggcacaccggtgattgaggcatcttccggcagtaccgctgtctcgaaagcgtactttgcccgcctgctcggcctgccgtttatcgccgtgatgccgcgctgcaccgcacgccgcaaaattgaacagattgagttctacggcggccggtgccactttgtggacagcagcgcgcagatttatgcggaatccgagcgtctggcccgcgaaaccggcggccactatatggatcagttcacctatgccgagcgtgctacagactggcgcggtaacaacaatatcgccgaaagcatttaccgtcagatgtcacgggaagcccatccggtgccgcgttacattgtgatgagcgcaggtaccggcggtacctctgccacgctcggccggtttatccgctaccagggacatgacacaaaactggttgtcgtcgatcctgaaaactctgttttttatgactgctaccatcagaaatgctcacatctgcgctgcgataccggcagtaagattgaaggcatcggccgtccgcgcgcggaaccgtcttttatcccgggcgtgattgatgatgtgattaaagtcagtgaccagtgcagtatcgccaccctttactggctggagaaactgctcggccgccgtaccggtgcctccaccggtaccaatgtctggggcgcactgcaactggcgaaacagatgcatgaacagcaacagaccggctccattgtgactctgatttgcgacagcggcgaacgctatccggacacctattacaatccgcagtgggtggcggacaacatcggtgatctgactgacgcacaggcaacactacccaaatggtgatgcagccgttaccataaaccttatctttttataatgaggtttaccgatgaaacgtgctgtagtcgtattcagtggcgggcaggactccacaacctgcctgattaaggcactacacaactatgatgaagtgcattgtgtgacgtttgattacggacagcgccacagtcaggaaatagacgttgcccgtaaactcagcctgaaactgggtgcagcggcacataaggtgctggatgtctctctgctgaatgaactggcggtcagcagcctgacccgtgataacatcccggtgcccgggttcagtgaaagtgaacaaagtgatattccgaatacctttgtcccgggccgtaatatcctgtttctcaccctgacggcgatttatgcttatcaggtcaatgcagaagcgattatcaccggtgtctgtgaaaccgatttttccggttatccggattgccgggacgagtttgtcaaagcactgaacaaagccgtcaacgccggtcttgcccgtgatatccgctttgaaaccccgctgatgtggctggataaagcacagacctgggcgctggctgactattacggacaactggataccgtccgcacagaaacactgacctgctataacggtattcagggggatggctgcggggaatgcgccgcctgccatctgcgccgcaacggactggacggctatcttgctgatcgcagtgctgttatggccgccatgaaaaaaattaccggcctgcattaagtgtctgttacgcccggcaacccgccgggcgctcttctgctctgatggtgatcagtcctctttcggtgccgtcagcaactcaaatttatcgcggatctccccttcgatcgggatcgctttaccggttttcatatttacaaagacaaaggtcacttccgcatccgccacaacctgcttatcttcctgacgggtaattatctgtttgagaacaccgcttttctgccccgcgtgctgtaaatagctgtctatcaccagccgctctcccacatacaccggcagccggtagttaatattgatattcaccaccaccacggcgatatccatctgtttaaaccagcggtaagcatcatagctttccagccagtcccagcgggcggcctccagaaactccagataacgcgcattgttaacatgtccgaaggcatcaatatggtagccaatcactttaattgtggtgctcataatatctctccctttactctgtttccggtattcccttccccgtcagcccggggaagggaaatcagcctctgctgatattacaactctatcttatcgctgttcatcgtaaaaatacgctcaccaataccatatacatccttcagttgttccgcagaagtaaatggtccgttttccgtgcggtactccacaatccgctgtgcttttttcggcccgacaccactgagttcccgggccagttcttccgcagtcgcggtattaatgctgatgcggtttgtttcctgtgcaacagactgctgaacctgcgcactgtctgccggtggtgcagcctgagccagtgcggaagtactgaaaaaaccgccggttaacagtgctgatgttaataataatgcagatgtccattttgttttcatgctatttctccttttgtgtttagcacgaaacggagtgtcgcaaaaattttttctgccgggggattttcagaacagaaatgcgaaaggctgcgaacgcagcctttcagatgatgtaaaacgacattttatttttcggcacagatcgaaaaattttagttcatatttctcacatcaatatctgcgttagcacgcaggttcagcagtaatgattccagctcagtagacgccatttgctgacgcagcactgtacgcagttcagttttttcctgatccgttgccgtaccggctgtcactttatccagctgtaccagaacaatattacccttgccgtcaatggtgcggctgtaggtcggtttaccgtccgcaggatgcggctgggtaaaggcagcattgataaccgggtctgacggattcaggcgctgaacagtctgctctgcaccgaatttcacaccggcttctgttaacgcggcgtcgcctttaccttctttcagtgccgtcagcagtttatccgcttctgcattcagcgcagcttccgctttgctgcgtttcaccagcgcgtcaatgtctgacttcactttttcgaaggattccactgcttccggacgatactcatcaacacggatcacaaaggcacggtcaccggaaacggtgatgatgtcagagttagcaccggaaggtcctttctcatcaaacagtttgttttccgttaatgcttttaatacttcaggatagttaaccgcatccggcaggctgttcagagcaaaccagtcagtctgtacggctttaacgccggttgcctgctcaacgcccatcagggattcgttatcgttcgcagcggcttcactggctttctgctggaggtcaaagaaggctttgcttgccgcttcgcctttggccagacgggtggcttcttctttcacatccgccagcggtctgacggtttccggctcgtacacatccagacggaaaatcgcgtagccgttatccactttcagaacctctgaaatctgaccggcggttgtcagcccggcacctttaatttcagggatcagcgcggcgtcttccatccagccgatcacgccgccgttacgggcagtcagtttatcggtggatttttctttcgccacggttttgaaatccgccccgtttttcagttcattcagtaccgctttggcatcatcttccgtcgccagagtgatctgactgtactcgccttttgccggcacagtgaaacgcgggatatttttatcgtagtagtcctgaatctgttcttcagtgactgacgtgttgtcctggatattcgcggcatccagctcaacaaaactgatttttaaggactgcggcgcgatgaagctgtttttattcttcgcgtaataagcctgcagctcttcatcggttgtggtctgttttgcctgagcagaagccagatccagtgtcgcggtacggatggtacgtgactggagtaaaacagctgccgcattggtcacttcggaatcaagcacaaatgagtcacgcacaaacggctgaaccagctgtgcctgaatcatctgcttgcgcagataagttgcgtagttgtcaccggtgataccgttacgggacaggaatgtctcatacgcctgctggctgaactgaccgttaacctgaaaatcaggctcctgacgaatcgcgctgataatctggtcatcactgacagtgatacccaatttccgtgcatactgttccagcagaatggtgtcaatcatctggttcagcgcctgagaacggatttgtttaacgccctcttcggtgctgactaactgcgagaacagatcacccagctgagcctgctggcggttacgctcttcctggaaggcgcgctctaactgctggaccgatatttcagtatcgttcactttggcagcatagttagaaccgctgacgaggtaaccacccacacctgtcagaataaatgacaggataatgatggcgaagacaattttaatcacagggttgttcgccgctgtgcgcaggttttccatcataagaaatccaaactccgctttggtaaaagaaaaatcaggtcaggggaaattatgccctaaaacaaaaaaaagcgcatcattctgatgcgcttcctgtttagctttatacggtttttgtgcccggggcagataaatatcccggtgcctgaggaaaaactcagccgtttactgcgtctttaagacctttacctgcacggaaagccgggactttcgcagcggcgattttgatctcttttccggtctgcgggttacggcctgtacgtgctgcacgctcacgaacagtgaaagtaccgaaaccaaccagagccacgtcatccccgcctttcagagaatcggttactgaaccaataattgcatctaacgcgcgaccagccgcagctttagaaatattagcgtctgcagcaattttatcgaccaattgtgacttattcactattatcatcccctttcagaattttcggcccggatttacgaagtatgttcctgacagccacagccgttatatcaagccttttcgctcttggcaagattgcagacttcgcatgtttcgtaagaatgttcgctaaattagcgggacaaaaaaaggctgacaagtcctaaagtacctgtcagccctttatttatctgaacttcttgacgcaggtcactatttcctacgcctttttacttaccacttccataccgaaagcaggattcactaaggcaagtgaaagaacttcatctattgttttaaccggatgaatatccagatccgcttttacgttatccggaatttcttccagatcacggcggttttcgtccggaatcagaacagtcttaatgccgccgcggtgtgccgctagcagtttttctttcagaccgccgattggcagcaccagaccacgcagggtaatttccccggtcatcgccacatccgcacgcacagggttaccggtcagcgcggaaaccagcgcggtacacattgcggtaccggcactcgggccgtcttttggtgttgcaccttccggtacgtggacgtgaatatcgcgtttttcatagaaatcattgttgatccctaatttatccgcacgggcacgcaccacggttaacgctgcctggatagattcctgcatcacttcacccagtgaaccggtgtaggagagtttccctttacccggaaccgctgcggtttcgatggtcagcaggtcaccgccgacttctgtccacgccagaccggtaacctggcccacgcggttttcagtatcagcacggccgtaatccactttctgcacacccaggtaatctttcaggttgtcctgattaatctcgatgtgtttcagtgttttatccatcagcagctgtttcaccgctttacggcacagtttggagatttcacgctccagtccgcgcacgcccgcttcacgggtgtaataacggataatgccgaggatcgcgctgtcatcaatatgcagttcggttttcttcagtgcgttgcgttcaatctgcttcggcagcaggtgacgcttggcaatgttgagtttctcatcttccgtataaccggacagacggatcacttccatacgatccagcagcggtgccggaatattcatggagttggatgtcgcgacaaacatcacgtcggacagatcgtaatccacttccaggtagtgatcgttaaacgcgatattctgttccggatccagcacctcaagcagtgcagaagccggatcaccgcgcatatccgatgacattttgtcgatctcatccagcaggaacagcgggtttttcacaccgacttttgccattttctggataagtttacccggcatagaaccgatgtaggtacggcggtgaccgcggatttccgcttcatcacgcacgccgcccagcgccatacggacatatttacggccggttgcacgggcaatcgactgccccagcgaggttttacccacccccggcggtccgacgaggcacaggataggccccttgattttgctgatacggctctgtaccgccagatattcaaggatgcgctctttcacccgctccaggccgtaatggtcactgtcgaggatttcctgcgctttaagcagatcttttttcactttactgcgcttgacccacggaacctgaatcatccagtcaatatagctgcggacaaccgtcgcttccgctgacatcggcgacatcattttcagtttctgtaattccgcttcggctttctcttttgcctctttcggcatctgcgcttcttcgattttgcgtttcagcgcttctgcttcatccggcgcgtcgtccatctcacccagttctttctggatagctttcatctgctcattgagatagtactcgcgctggcttttttccatctgctttttgacgcggttacggatgcgtttctcaacctgtaacaggtcgatttccgattccatcatcgccatcagatattcgagacgctcaaccacatctgacatttccagaacagactgtttgtcctgtaatttcagtgtcatatgggaagcgatagtgtcagccagtttggcgacatcgtcgatactgtgcagagatgtcaggacttccggcgggatctttttattcagcttgatatagccttcaaactggttgatcgccgtgcgcagcaatacttcctgctcgcgctcgtccacgacaggggattccatcagctctgcctgggcagagaagaaatcgccgttgtcacttaatgttttgatatgcgcacgttgcaggccttcgaccagcactttgacggtgccgtccggcagtttcagcatctgtaatacagacgcgactgtcccgacggaaaataaatcattgacgcccggctcatccgttgacgcttctttttgtgctaccagcagcacttttttatccatatccatcgctgtttccagacagtggatagatttttcgcgcccgacaaataaaggaataaccatgtgggggtagaccaccacatcgcgcaaaggcagtaccgggatttcaatgcgttcagcacgctcaggattcatagagcactctcttcgtttagcttacgccttgttgggaacgtcgtgaaacgcgttatcacgggttccactccatagaataatcaatatatggggatgcatttctcacattcaacactttatttagtaagaaaagcaaaatgagggaaaattccctcatttagttaatattgataacaactgcgctaactttccgttactcgccggaaacctgagcttccggtttgcggtaaatcagcatcggttcggtctggttggttatcacgttttcatcgataaccactttttcgacattttccatcgacggtaaatcatacatcgtgttgagcaacgcagcctcaacgatggaacgcagaccacgggcaccggttttacggttcatggcttttttcgcaatggcaatcagtgcttcacggcggaactcaagttcaacatcttcaatgctgaacagcgcctgatactgttttgtcagcgcgtttttcggttcctgaaggatctgaatcagcgcatcctcactcagttcaccgagcgttgccacgacaggcagacggccgataaattccgggatcagaccaaatttgatcagatcttcaggttcaacctgagccagtaattcgccttctgtcgctttgtctttctcgccgcgcacttccgcaccgaaaccgataccggaacgggtattcagacgctggccgaccactttatccagaccggcaaacgccccgccgcagataaacagaattttcgaggtatcaacctgtaaaaactcctgctgcggatgtttgcgcccgccctgcggcggaacggcagcgatagtcccttcaaccagtttcagcagtgcctgctgaacgccttcaccggaaacatcacgggtaatcgacgggttatctgatttacgggagattttatcgatttcatcgatatagacgataccgcgctgtgctttctccacatcatagtcgcatttctgtaaaagcttctgaatgatgttttccacatcctcccccacataaccggcttcggtcagtgtggtggcatccgccatggtgaacggcacatccaggtagcgggccagagtttcagccagcagggttttaccgctgccggtcgggccgatcagcagaatgttacttttacccagttccacgccgtcagcggttttatcgccgttgcgcagacgtttgtagtggttgtataccgcgactgccagcacttttttagccagttcctgaccaatgacatagtcatcgaggtgctgacgaatttcatgaggcgtcggcagttcactgcgctcactgccacgggccgggatcagatctttaatttcttcacggataatatcgttgcataaatcaacgcattcatcacagatatacactgacgggccggcaatcagtttcttaacctcatgctgactttttccgcagaaagagcagtacagcagctttcctgaaccgtctttgcgtttgtctgtcatcagtaaacctcacttaatcagtacagctcaccgcctgtgagccgcaaaaaatgtcacagcaccgcagtaccctgccgcccggcaggatacgggcagtgcctgtgttacttaccggtgtgtgtaaatatggtcaaccagaccgtattcctgcgcttctttcgcggacaggaagcggtcacgctcggtatcacgctgaatttcctcaacggatttaccggtatggtgagctaataaatcattcatgcgcgctttcactttcagaatttcctgagcatgaatttcaatatcagtggcttgtccctgatagccgcccagcggctggtgaatcatcacccgggagttcggcagacagtaacgtttgcccggcccacctgccgccagtaaaaaagagcccattgagcaggcctggcccacacagatggtgctgacctgcggtttgatgaactgcatggtgtcataaatggacatccctgcggtaatcacgccgcccggcgagttgatataaagactgatgtctttttccgggttctcagcttccaggaagagtaactgtgccacgatcaggtttgccatatgatcttcaacctggccggttaaaaagataatacggtcttttaataaacgggaatagatatcgtaggagcgttcaccgcgtgaagtctgctcgataaccatcggcaccagcgccatgttgggtgcgaaagtatcctgattgtcgtgatatgacatgtccatctcctgattgaattttattggtgcctggcggataccggttattttacttgagatccggtgcgatgaccatgcgctatacgcgatccggtcacataagcagcatatactgtccggcagataccctgtatggcaaatatgggggataaccaccgcagttttcaaggaatattgtcagaaatgacgaaaaaaccgcagacaatacacattgcctgcggttttatatcagataaacagccttcggccgttcacaaagagagaggattaacctgctgcctgaacctggttcatcagatcagtgaagccggtttctttatctgtcacttttgctttcgccagaacagtttcaacagcctgctcttccagtgccagattacggataccatccatcatctgtttgtttttgttgtagtattccacaacttcagccggatcttcgtacgctgatgccatttcgtcgatcagcgcattaacgcgatcgtcttcggctttcagttcgttagaagaaatcacttcgcctaacagcagaccaaccattacacggcgcttagcctggccttcaaacagttcgcgtggcagttccatcgcctgtttttcagagccgccgaaacgctgtgccgcctgacggcgcagttcttcgatttcgctgtcaacagctgctttcggtacatcgatttcgtttgctttcagcagaccgtcgataacctgggttttgatacggttgcgtactgcatttttcagttcgcgttccatatttttgcggatttccgctttcagaccttccagggaaccgtcgccgataccgaaacgtttgatgaactcttcagtcatttccggcagttcgcgctcttccacttttttcaggctgatagcgaatttcgctgctttccctttcaggttttcagcgtggtaatcttccgggaatgtcacttcgatgtcgaattcttcaccggctttgtgacccacgataccgtcttcgaagcccgggatcatacggttctggcccatgaccaggacgaaatcagaagatttgccgccttcgaactcttcgccgtcaacagaaccggtgaagtcgatagtgatgcgatcgtcagctttagctgcgccttcaatcactttccactcagcctgctgtttgcgcagagtctcaaccatgccgtcgatgtcttcgtctttaacttcaacaaccggtttttcaacttcgattgtttccagacctttcagctcaatttcagggaagacttcgaactcaacagtgtaagtgaaatcctgaccttctttatacggctcatcaactttgtagtcaggcgcgccgacagggttgattttgttttcgatgatagcgctgacaaagttacgtgacatcaggtcgctcagtgcatcctgaaccgccacatcgccgtaacgctgtttgatgatgttgtgcggcactttacctttacggaaaccgtcgatacgtgctttcttggcgatttcagctaattgtttagttacttctttgtcaatatcggctgcaggaacggtgattaatacacgacgcccaaggccttcagtcgtttcaacagaaacttgcatcttattacctcaaaaaagtctattgctcggtcaactccatatctcacaccggcccgatgcctgtgtgaaacgataatgaaccggggcggtcgcatttaaaaaccgagttcccttatattcagaagcgtcccgaaaccatacggaatttcagacgcgacattatagcgatgctgacaggccgcgtcgagaagtgcagacaaaagagtctgaatttcaccctttttctgttaaattttgtgctgtgcgctgctttttcactcaaacagcggcttactttccgccaccgtgacaacgcggggacggattcaccgggccctgactgtgattccactcatccggggtataagtatgcagcgccagagcatgaaccccgccggccagctcatcagccagcagcgtgtacatatgacggtgacgtgccaccgggcgcatgcccgcaaaggtctcactgaccaccaccaccttaaaatgggtttccgatcccgccggaacattgtgctggctgctctcattcaccacactgatataatgaggcgcaagcgcgtgattcagtttttcttcaatacgctgctgcattacagcaggaaatgatgccgacataactatccttccggtcaatactggctttcagagaaagctcagtgtagtgagttttttatcaaaatccataccattcgcggataaagccgattatcatcatgcgttaagccgaacactcacacccccggcgtttatccggtgctgtgactgacttcaacaacttgtaacggattcatattatgttgaaaaaatacctcctcccgctgttcgcaatgctcttactggccgggtgtcaggcaccgtccaacaccctgtccattgaaccggtgatgaaattaccgtctgcggatccgacgctcggtgctgccactatctcgattaccggcgtggataaacgcccgtcacagactctggccgaattcagccgtaacggccagctggcacagttgcgcccgtcccgtgacctgcgtttcctgatgcaggaaaccctggaaaaacagatgactgcacgcggttttatgattggctcaccggcaaatgccaatgtgcagatttccatcaatacctttaaggcggatgtgcaggaaggcagcctgcgccataatatcaccgtcaacattgatattaccattctcgccaccgcgcagaataacagcacaaagagccggacgttccgcaccagctataatgtgcagggcccgttaagcgccagcaatgaaaaaattactgacgcctttaaccgcgcactcagcgatatcgtcgcggacatggctcaggatacccaaatcagccagttcattaagcagaacacccgctactaatctgccgcgccgcccgcagccggataacgccgggcggcctgctgttttcagtcactgtcaatgcgccgcagcctgcggcgtgtgaggataatcatgctccggagtatttgggcgacatacagcgagcgtaatgcccgtattcttttactgctcggtttcgcatccggattaccgctggcactgaccagcggcacactccaggcctggatcaccgtcgaaaacgtggatatcagaaccatcgggtttttcacccttgtcagccaggcctatgtgtttaaattcctgtgggcaccgtttatggatcgctaccagctgccgttcctcggacgccgccgcggctggatgatcaccacacagcttctgctggttgtcagtatcgccggtatggggatgctgaaacccacggaacacctctggtggctggctgctgccgccgcgattgttgctttctgctctgcctcacaggacatcatttttgatgcctataaaacggatttgctgtccgcgaaagatcgcggcaccggggctgcgatatcaacattaggttaccggctggccatgctgctctccggcgggctggcgctgtttatcgcccaccgttataccggctggcagaatatgtacctgctgatggcggcgatgatgctgataggtgtgtttgccacactgcgcgcaaaagagccggaaaccgatgccccgccgccgcgcacactgcgtgaggctgtccgggagccgctggcggagtttttctcccgtaacaacacctggctgctgttactgctgattgtcctttataagatgggggacgccttcgccctgacactgagcacgccgtttctgatccgcggagccgggttcggtccggacgaagtggggcttatcaacaaaaccctgggactggccgccacgattgtcggggcactgtacggcggttatctgatgcagcgctggagcctgtttaaatccctgatgttcttcgggatcctgcagggattttccaacctcggttactgggtgctgtctgtcacaccacaaaatatctatatgatgggcggcgtggtatttatcgagaatatctgcggcgggatgggcacagccgcctttgtcgccctgctgatgacactctgtaaccggtcattctccgccacacagtttgccctcctgtcagcactgtctgccgtcggccgcgtctataccggcccgtttgccggctggatggtggaagcttacggctggagctggttctatctgttcaccgtgtttgccgcaattccgggattgctgctgctgatgttgtgccgcaaaacgctgctatacacccagaaaacggagcagtttctgccgaggcggcacttccgcaacggctaccggacggcgatgtcactgctcggtatcaccgcagtactgttcgccgccagcctgatcctgctgctgaccggggtatttgaactgacaccgggctttattccggacacgctgaaaggcgacctgtttatttacggcctgaatatcggtattgccgggttgtttctcggcggactgctcgattattgtgcactccgccgcgataaactggcctgacaggctgttacgaatatcagaaaaaattcaatcaaaagtttataaagccggtttttaccggctttttttatgtttaattttagattcaagtcacaatttttgtaatttatttcttaaaattacattcaaaaccacaaatacgtcacatcacccattttcctttttgtgccttcaccctatattcgcgctgttacttctgacttctatactctttaacgaccaaataaacagctaataaattatgaaaaaaacgactattgcagccctgatcgctgcaaccgccgcgttttctgcgcaggctgaatatcagtggggttttgctaacgtcagcatgaactatctggactggaccccgcataccactcacaaaagcggcaacagcacgcacaaggatgactttgcgtatctggagcttgagggcggtgccggtttcagctggggtgagctctatggtttcttcgacctcgagaacgcgtttaacagtaaaaacgattccgatgccggtgataaccagcgttacaccttcaaaaccacggcgcgtatttacctgggtgataccggtttcaacgcctacggtcatgtctacggtacttactctctgccgggtaacggcggtaacttccatgaagtgaacaccctgtacggtatcggttataacaccgaattcaacggcttatggttcaaaccatttgctgccctgcactatgttgatcaaacgttttacagcggcaacaacggttatgttctcggctgggttgccggttatgactttaacctgtggaatgaaaaattcagcgtcaccaactggaacgaaatcgagcttaaccgcaacgatcgttacggcaacggcgggcgggacggcggcaacggcgcgctggccttatggtggacaccggttccgtcagtgacaaccggcattcagtaccgctatgcggataacaaactgggtgaggatttttaccagcaggctgtggtttacagcataaaatataacttctagatcacatttttccgctgcggggggcaaaaaccccccgtatttttaccaggaaactgtttctgaacaaaaaaatttcaccattacgtcacataaagtgtaataatcagtgtttcatcctttcggtatttccttccctaatctaagcttaaatataaatttgtctcctgattgttaaaattgtgatttttatttcacgatttcataaaaattggctcacttgtgatccttttaacataaagaggcaacaaaccaaccaatcttattacatatatttacactgatcttaccttgccgtaatatgtgcggactgatgaaacgacaagagtacttgagtacctttgtttttggggtcgttggatgagacttatgaactacaaaaagagtattggggtaatctcgctgctcgcatctgcacttttgctgggcggatgcgatatggcactgatgaacccgaaaggcactatcggtgctgagcaaaaaacactgattttaaccgccattggtctgatgctcattgtggttattccggtcattatcatggcaatcgtttttgccctgcgttaccgggaaaccagaaaagcaacttaccgtcctgactgggcgcattccaataaaatcgagctggtcgtctggactgttccgattattatcattctgatcctgggtaccattacatggaaaaccacccatgagctggatccgtacaagccgctggtcagtgaccaggagcctgttaccatccaggttatctcaatggactggaaatggttatttatctatccggatcaaggtattgcaactgtcaatgagatcgcattccctgtcggtgttcctgtcaatttcaaaatcacctctgattctgtgatgaactcgtttttcatcccgcagttaggcggccagatttatgcgatggcaggtatgcagaccaaactgcatctgattgcggaagagccgggcgtgtacaaaggcatttctgccagctacagcggccacggtttctctgacatgaaatttaccgccactgccaccccgacacgcgaagccttcgatgagtgggttgcgaaggtgaaagcctcaccggacactctgaccaccaccgaagcgtttgacgcactggcaaaaccgagtgtgaacaacccggttgtctatttctccgcggtcaaaccaaacctgtttgtggacaccattaacaaatttggtcacagcggccacggtgccgggaagacacacgaaggcgaaagccattcaatgatgaacatgagcgcagatgaacacagcagccatatgcctgcagctcatgccgggaatgaggggtaaagcatgttcggaaaattaacactggatgccatccccctgcatgagcctatcgttgtaattacggtactgggtatcattctgggtggtgctgcacttgttggtcttatcacctacttccgcaaatggacgtggttatggactgaatggttgaccaccgttgaccataaaaaaatcggtattatgtacatcatcgtttcgatggtgatgcttatccgtggttttgctgacgccattatgatgcgcgcccagcaggccctttcgtctgccggtgaagccggattcctgccgcctgaacactacgaccagatctttaccgcccacggcgttatcatgatcttcttcgtcgcgacaccgtttgttgtcggtctgatgaacctggttgtgccgttacagatcggcgcccgtgacgttgccttcccgttcctgaactccctgagcttctggttcttcgtggtcggcgtgatgctggtgaatatctctctgggtatcggggaatttgcacagaccggctggctggcctatccgccgctgtcgggactggaatataaccctggtgtcggggtcgattactggctgtggagtctccagatatccggtatcggtacattgctgaccggggtgaatttcttcgctaccgtgctgcgtatgcgcgcaccgggcatgtcgatgatgaaaatgccggtcttcacctgggcggcattctgtaccaacatcctgattatcgccgcgttcccgattctgactgtcaccttaaccggcctgacattagaccgctacctgggcacccatttcttcaccaatgatatgggcggcaacatgatgatgtacatcaacctggtgtgggcatggggccacccggaagtgtatatcctggttctgccggtcttcggggtcttctctgaagtcaccgcgacattctcgaaaaaacgcctgttcggctatacctcactggtatgggcaactatcgcgattaccgtactgtcctttatcgtctggctgcaccacttctttaccatgggctccggcgcgaacgtcaacgccttcttcggtatcgccacgatgatcatctccatcccgaccggggtgaagatattcaactggctgtttaccatgtatcagggtcgtatcgagttcaaaaccccgatgctctggacagtcggctttattatcaccttctccgtcggtggtatgaccggggttctgctggccgtgccgggggcaaactttgtcctgcataacagcctgttcctgattgcacacttccataacgtcatcatcggcggtgtggtcttcggatgcttcgccggtaccgcttactggttcccgaaagccttcggtttcaccctgaacgaaaaatggggtgtccgcgcattctggtgctggttcatcggtttctttgttgcctttatgccggtttacgtactgggcttcatgggaatgacccgccgtatcagccagaacattgacccgaccttccacaccatgctgttaatcgcagctgtcggcgtggcgattatcggtgtcggtattctgtgccaggttattcagttctacgtcagtatccgtgaccgcgaccagaaccgcgaccttaccggggatccgtggggcggccgcacgctggagtgggcaacatcttcaccacctccgttctataactttgctgaagtaccggatgttcagtcccgtgatgaatggtgggatatgaaagaaaaaggcaccgcgcataaacgtcctgcaaaatatgaagaaattcatatgccgaaaaatacggcagcaggtgtgattatcgccggtttcagcctgatctttggtttcgccatgatctggcatatctggtggctcgcgattgtcggtttcgccggcatgatcgtcacctggattgcaaaaagcttcgacgaagatgtggattactatgttcctgtggctgaagtcgaaaaaatcgaaaacgcccactacgaacaactgagcaaggcaggtgtggataatgtcaactaataccctgactcaacataataacgcccatgataatcatgggcatcacgatgcaggtgcgaccaaggtcttcggattctgggtctacctgatgagtgacctgattctgtttgcgagtctgttcgccatttatgtggtgctgaaagacggcaccgccggcggcccgaccggcaaagaaatctttaacttacagtttgttctggtggaaaccttcctgctgttattcagcagtatcacctacggctttgccatgctggcaatgaaccgcaatcaggtgggtcaggttaatctgtggttatttgtgactttcctgttcggcctcggcttcgtggcaatggaaatctatgaattccatgaattaatcagcgaaaactacggccctgaccgcagcggcttcctgtccggtttcttcaccctggtggcaacacacggtcttcacgtcactgccggtcttatctggatcatcatcatgatcatccagaccagccgccgcggcctgaccgaagtgaataaaacccgcctgaactgcttaagcctgttctggcacttcctggacgtggtctggatttgtgtgttcaccgttgtttatctgttgggggcactgtaatgagtcattcaaatacagccggtaccggggcaagccacggtagtgtgaaaacctatctgatcggctttatattgtcggtcattctgacagtcatcccgttttatatggtgattgagggaaccgcctcaacatctgttctgctggcgactgttgtgattactgctgttgttcagattcttgttcacctggtgtgcttcctgcacatgaataccgcgtctgaagagcgctggaacctgattgcgttcctgttcacgctcctcattatcggtatcgtggtcgtgggttcactgtggattatgtacaacctgaacatcaatatgatggttgattaagagttgccgatatgatgaagcaatacctgcaagtgaccaaaccgggaattattttcggaaatttaatttctgtggtcgggggattcctgctcgcctcaaaaggtgacattgattaccctctgttcattgcgacattgctcggtgtctcgctggtcgtggcctccggttgtgtttttaacaattacatcgaccgcgacatcgactccgtcatggaacgcacgaaaaaccgccctctggtaagagggcttattgacccgaaaatcagtctggtttatgcctctgtgctgggtattgccggcatggtgctgctgttagtggcagccaatgtggtggcaatgctgattgctgttgtcggctttgtggtttatgtcggggtttacagcctgtacatgaaacgcaaatcggtctacggcacactggtcggcagtttgtccggtgcggcaccgccggttatcggctactgcgcagtgacaggccagtttgataccggcgcactgatcctgctgttaatcttcagtttatggcagatgccgcactcctacgcgattgccatcttccgtttcaaagattaccaggcggccaatatccctgtactgccggtgattaaaggtatttctgtggcgaaaaaccacattatcctgtacatcatcgcctttatgtttgccacactgatgctcgccatcagcgggtatgcgggatataaatacctgattgtcgccgcggcagtcagtgtctggtggctgggcatggcgttatcgggctataaaacaacgaacgatcgtgtctgggcacgtaagttgttcgtgttctccattgtcgctatcacgtcactcagtgtgatgatgtctgttgacccaagcgtctccggtgatgttctgctggcctacagtcgttaacacacactttctgtaataacaaaatggcagggctcccctgccattttgtgtttagtaaaaaccacaaatctcattagaatgtggtgtctgtctttttgaggttatcccatgaacgataataaaatgaccccgcttgagcgtcgtgcgacctgggggttaggctcggtattttctctgcgcatgctcggcatgttcatggtattgcctgttatcaccacgttcggactcgattttaaagacgccaccagcaccctgataggctttgccattggtgtctacggcctgacccaggccatcttccagatccccttcggcctgctttctgacaaaatcggccgcaagccgctgattgtcggcgggctgattatctttatggcgggcagtattgttgccgcactcagccactctatctacggcgtgattgccggacgggcactccagggcgcaggggcgatctccgccgccgtcatggcattactgtccgataccacccgtgaacagaaccgcaccaaagcaatggcgtttatcggtatcagtatcggggtaacctttgcggtcgctctggtactcggcccggtactggcagatatcgtcggtctgtccggcctgttctggggcattgccctgctcgcctttctcgggatcctcgtcaccctgtatgtggtgccggacaacaaagagcaccgccagaaccgggaaaccgccgtggtaaaaggtgcgattaaacaggtgctgatggataagcagctcgcccggctgaatttcgggatcctcgccctgcacaccctgctgatggccacctttgtcgcgcttcctctggtgatgagtgatgcagggctggcacgggaatctcactggaaagcgtatctgtacacgatgctgatcgcctttgtgtctgtgctgccgtttattatttatgcggaaaaataccgtaaaatgaagcaggtttttgtcagttgcgtggtcatgatggcgctggcagaaatcgtgtttctgctggcaggcaaaaacctgtggctgctttacggcggattacagattttctttatcgccttcaatgtgatggaagcaattctgccgtcactgatcagcaaagaagcaccggcgggctacaaagggacggcgatggggatctactccaccagccagtttatcggcgtggcgctgggtggcagcctcggcggcctgctctacggtatcaatggtgcggtaacggttttcggcggtggtctgatactgacactcatctggctggctgtcagtctgacactgcgtcagccgccgtatgtcagcagtctgcgtctggaattaccggaaaatgacgtgaataatccggatattgccgctaaattacgcggacaaccgggtgtgtgtgatgtggtgattattgcgcaggaacgggcggtgtatgtaaaaacagataccagactgtcaaaccgcaaacaactcgaagccgttttacagggctgacaggaaccggcaaccatgctgacgcaggctgccggataacactcagtcgcggaagtttttgaactggaaaggctgccccagttttccttcgcgtaccagtgccataacagactgtaaatcatcacgggatttgccggtcacccggacttcttcaccctggatttgtgtctgcactttcagtttgctgtctttgatcagcttgacgatctttttcgccagtgcagcatcgatcccctgtaacagggttgcttcaacactgtacagcttaccgctgtggacaatctcatccggtaccgtcagagacgcaccgtcaattccgcgtttcgccagtttttcccgcataatatcaaccagctgattgacctggaaatcagattcactggtcattttaacactgttatttttctcattgagctcaatcgtggcggtaatgttgcggaaatcccagcgactggtcacttcacgctgtgcgttttccacggcattgcgcacttcatgtaattcaacttcagaaacaatatcaaatgatggcatcggaagacctccctatattcaactgaccggcataataccgggtttatcaaaccaacaaaagcactatatttcccgctatatttactaaggtgcaaacggacaaaaagtggtactattcagtgatattgctcacatctttttcgctgtccggagtccttatgaaaataacagtactgggttgcggcgcaatcgggaaactctggctcgctgcactgtcaggcaatcatgaggtgcagggatggatgcgtattccccagccctacctgaatgtgaatattgactctctgaacggagagccgttttacgggcaatttaccacaaacgatccggaattccttgcacaaaccgaattattactggtttgcctgaaagcctggcaaacctccgaagccgtaaatcagctgctgccgcagataccggaatcctgcccggtgttactgctgcacaatggtatgggtgtagcgcgtgagttgtcccgctgcccgaatccgctgctgaccggcatcacctcccacggcgcatatgaagaaaacggtctgctgcatcacagccgccggggactgacccacatcggtcctgtgaatgaacgcgcccgtcattacggccatctggcggatattctgcatgatgcactgccggacgtagcctggcatgatgaaatcgatgcggccatctggcaaaaactcgccgtgaactgtgtgatttccccgctcaccgttatctatgactgtaaaaacggcggactgatggcgcatctgccgcaaatccgcgtgctgtgtgatgaagccgctgaagtgatgctgcgtgaagggatccacactgacggtgatgatatctatgaatatattcttcatgtgattgaaaaaaccgccgatcacagctcatccatgcgccgggatattctttacggccgttataccgaaattgattacatcaccggctatctgctgcaacgcgcccgttatcacgggatcctgctgccggaacatattcacgtttacagcctcgtcaaacaaaaagaggaacaaaatgcccccttcagttctcatttgtctcgctgacggctgcgaagaaaccgaaaccgtcaccaccgctgatctgctggtccgtgccggtgtgacggtcacactcgccagtgccaatgatgacagcagttgcctggtaaccggctcacgcgggatccgcattatggccgatgtgccgctggtacgggtggcggacaccccgtttgatgccattgtgctgccgggtggcctgaaaggtgcggagaatctgcgtgacagcccgctggtgattgaaaaaatccgccgcatgcattgtgacgggcacattgttgccgctatctgcgcggcaccgtctgtcattctggtgacccacaatctgtttccgctcggtaatatgaccggctatccggcgctggaagataaaataccggcaaaacagtgggtcaatcagcgggtctattttgatgagcacgttaacctgctgaccagccagggtccggccaccgccatcgattttgccctgcgtctgacagaacgcctgtgcggacaggaaaccgcagcaaaagtggcggcagaattagtactgccgccggggatatgggattatcaggataccccttaccgcacgctggctgatcagggctgaataacaagcggagccggtgttgcgggctcctgtattacctcaggagcctgttccggttctgcacccttttcaggctccggaaccaccatcatccagactttgggtttcagtgaataatgtcccgctttcagcgccgcccaggccgcctgcttctcttcttctgaggcatactgaatatcctggtaatcacgctcttcccagacctgtttatccggctgaccgtctgtaacttctgtggcttgctgccagatctgacaatagaacgataaatcagaataaccgctgacacagaccagcgcatcatcctgtccgtcgccgtccgcatccgccataaagccgagacactccccgcccgcagaggattcagtacagaaccaggcgcgtgtcacatcatattttccttcccaccaggattccggcagcgccgggctgcccgttactgtgagcattacctcccgcagtgtccggcggttatcctgatcataagaggagtacgtcagtgctttactgtattccggattttcattcagcaccgcgagtgccgcctctccccgtttacccaggccttccagggtatagcggatatcagaagtgactttgattctgcccttttcaatacccgccagaatactgtttgccgtgatctgtttaaaatccgccagcggactgctgatcaccaggataatcgccatcagcgtcagtaatccggctttgttgaccggcccgagtaatacagcccatccgctgcgtttccataacagtgccgcgctgtacgccagcacaaccaccgccagaaacagtgcgatacaaaatccgtataaccgatcaatactccagctgtactgattaacacgcaccagaatgccgtaaaccgataacagcgaaaaaacgttcagcaacagcacgccggccagcaccagcccgttgagccatgaacggaaacgcggcacacattcattaccgtaaaccagattcagcagcaggatattcagcgaaacaaaccagatcatggtgaatgaacccagcccgctgacacggacgccggttaccacggataacagtaatccgcctgccgcaatcacaccgataacagtcagcagcggtaacagtacccgcgccacataaccggcgattttgccggtgctgaacgtgaataccgtccggataaacacaaggctgatattgaacccgaggcagaaactcatccagaaatacagagaatcattcagccagtcactgagaaattccagattcacaatcctgaacaggtaaaccgccagaaacagcatccccatcaccagcaggccgataagccccgccagcgcacccagcacggtatttctgacatactgctctgtcagcagcgcataatccgggttccacgagccggacaactgccgcagctgaaaccacggcaaaatcagccagaacagcagaaccatcagaggaatgagtgaagagagttcacgggtgtgacccgccgttgcctcactcagataccagtaattcatccagacacagagaacggctgtcagcagcagccctgcccagagtgccgctgaagaaaaacggttgatcagataagtgaataccgacggcacaaacagcgccagcagcatcggcagccagaccagcgaccccggtatctgccacgaactgcggataaggtaatcggatgttgcattcagtgtaagcccctgaaggagcgccaccacaataacaataacatagacaaaacggcttgccggtgcctgaaccgtactgtttttcattctgaaaccccgtcagtaatgtaggttgctgccggacagcatagtgccggaaccggcacaacggtatcccttaaactctgaaaaaagacaataaaaaaccccgtctcctcagaggcggggttcagtgacaaagaatatatcacggctcagggacgatacaccttcacattggtatagccctgttctgccagataaagtgcctgcagacggctcatcaccccgcgatcgcaatagagcagccaggtggtctccgccggtaaatcaccgaactgagtgctgagcttgtagaacggtagtgttcgcacttccgttccctcaattttcagcggatgcgcttcctgttcatccggcgagcggatatccagcaccacatcggtggcagacagttctgataccatctccacttcagtaacctgctgctcactctgctgcgcgatcacccggatatccatattctgcgcgttaagcaccacatcatccagaatcgcaaagtcgaatttctcttcttcggcttcgattttctctttcaccgctttcacagtcgggtttttcgagatcacaccgcagaattccggcatggtacgggcaaaatcttcagtaccgatctgacgggcgagattgataatggtttctttgtcgtgtgaaatcagcggacgcagcaccagggtgtctgtcgcgttgtcgatcatgcgcaggttagtcagcgtctggctggaaacctgtcccagcgcctcaccggtcacaatcgcctgcacgccgtaacgttccgcaacacgggatgccgcacggaccatcatccgcttgagcaccacgcccatctggccgtcatccactttttccagaatttctgccaccaccggctcaaagttcaccgccacaaagcggactttgtgcgagctgccgaagcggttccacaggtaatgcgccacctgtttcacaccgatttcatgtgccgcaccgcctaaattaaagaagcagtagtgaacacggcaaccccggcgcatcagcatatagctggagacaccggaatcgaacccgccggagatcagagacagcacatcttcctgagtcccgatcgggaaaccgccgatcccttccagacggcgtaccacgaggatcagtttgtcatcttccacttccagattcaccgtcacatccggatgcgtcagttttaccttcgcggacggaatatgctggttcagaccgccgccgacatagcgctccagctcaatggagctgaacgggtgcttaccacggcgcttggcacggacacagaaggttttgttttccagtgatgcggcatacatttcgaaggtctgctcatagatattatgcagatcggtaaatgcgcgctcttccacctgtaaaatatgatggataccgggaatgcgggtcaggcggtcagccacaccttcgccaagctcttctttcttcacgcggacttcaagatagtcccagtgacggacaaccgccacgtcttcggccagatctttaagcacattgcggatgttactggtcagaattttaataaagcgcaggcggacactctgacttttgatggtaatttcaggaaataatttaatgataaacttcataacggtttactggctatcggcttgatttgcaaaggacggggcggccggtgtcaggcagcggcaatccccgttgatgaaattgaaaggcggcagtatatcaccatatctcgatctgccccgtaaaaatcgtaaatgaaaggcacaattttcactgaaaagtgtaaactaggaattatttgcgacataaatgcaacatcagtgaaaaacagaccatgaccaaaaaaacatccgcaacgaaaaccgatgcactgagctttgaagcatcactcgatgcccttgaagggatcgtcacccgtctggaagcgggtaacctgccgctggaagaagccctggccgagtttgaacgcggtatcgcactgacccgcaccagccagaaaaccctgatggcagccgaacagcgggttcagatcctgctgaatgatgatgaaaacgccccgctgagcgattttacacctgaaaacgactgaccgcccggatccggcggttcctgtgtgaacgagaatgaccatgccagaacaaactcccgaaacattccgcaaccaactgacacaggccagagagcgtgttgatcacgttcttgatgagatcctgaccacactgccgtttgccgccaccgacatgggtaaagccatgcattacggcgccctgctcggcggaaaacgtctgcgcccgttcctggtgtacgccaccggtgaaatgtttggtgtgacggctgaaaacctggatgccccggcagcagcgattgaatgtattcacgcctattccctgatccatgacgatttaccggccatggatgacgacacactgcgccgcggcaaaccaacctgccacgtcgcctttggtgaagcgaatgctattctggcgggggatgccctgcaaacccaggcatttgcaattctcgccgcccggccgatgccggatgtccgcccgcaggaccgtctcgcgatgatcgccgaactggcggatgccgccggtcttggcggaatgtgcggcggccaggcacttgatctggcggccgaaggaaaaaacatcggtattcatgcgctggaacaaatacataaccataagaccggtgctttaatccgtgcttccgtccgtatgggcgcgatgagtgccggtgaagcaggctatgctgtattaccggcgctcgacacttacgcacaggctatcggcctggcgtttcaggttcaggatgacattctggatgttatcggtcatacggatgtgatcggaaaaagccagggcagcgacgccgctcacgggaagagcacatatccgtcactgctcgggctgaaagcggctcaggataaagcacaggcgctttatcaggaatcactggctgcgctttcacagcttgaagaacatcattacaacacagcaaccctgcgtgaacttgctaattttgtgattgaacgtaacagctaatccgtccggcacgttccggtattttcagaaactttaataagaattagtgagcattacatgagtattgatatcgctaaatatccgactttggcactcgttgagacgcctgatgatttgcgtctgttaccgaaagagagtttaccgaaactctgcgatgaactgcggcaatatctgttaaacagtgtaagccgttccagcgggcattttgcctccggtctcggcacgattgaactgactgtggcactccattatgtctatcagactccgtttgataacctgatctgggatgtcggccaccaggcctatccgcacaagatcctgaccgggcgccgtgaccgcattgacaccatccgccataaaaacgggctgcatgctttcccgtggcgcgaggagagtgaatatgatgttctgagtgtcggtcactcctccacttccatcagtgccggtgtcgggatggcggttgccgctgcccgtgagggacgcaaccgcaaaaccgtctgtgtaatcggcgacggcgcgatcaccgccggaatggcctttgaggcaatgaaccacggcggggatatcaaatccgacatgctggtgatcctcaatgacaacgagatgtctatctccgaaaacgtcggtgccctcaataaccacctggcgcagctgctttccggcaagctctacaccacactgcgtgaaggcggaaagaaagtgttctccggcctgccgcctatcaaagatctgctgaagaaaaccgaagagcacatcaaaggcatggtggtgccgagcaccttctttgaagagctgggcttcaattacatcggcccggtggacggacacgatgtactggcgctgatccagaccctgaaaaatatgcgtgacctgaaaggtcctcagttcctgcatattatgacgaaaaaagggcgcggttatgaaccggctgaaaaagatccgatcagctggcacgccgtcccgcagtttgatccgtcaaccggcacactgccgaaaagcaaatcgtccaaaccgaccttctcaaaaatcttcggtgactggctgtgcgaagaagcagaacacgatccgaaactgatggcgatcacccccgccatgcgcgaaggttccggtatggtgcgcttctccaaatctttcccggatcagtattttgatgtcgcgattgctgaacagcactccgttacttttgccgccgggctagctatcggcggttacaagccggttgtcgctatttactccagcttcctgcagcgcgcctacgatcaggtgatccacgatgtcgcgatccagaaactgccggtcctgtttgctatcgaccgcgccgggattgtcggcaacgacggtccgacgcaccagggcgcgtttgatctctccttcctgcgcatcctgccgaacatggtgatcatgaccccgagtgatgaaaacgagtgccgccagatgctgcacaccggttatcactacggcaaaggcccggttgcggtgcgttatccgcgcggcggcggctgtggtgccacactccagccactgactcagattgagatcggtaaaggtgttgtgcgccgtgaaggggagaaaaccgcaattctggtcttcggtaccctgctggaagaagtcctgaaagcggcagaaaacctgaatgccaccgtggtggatatgcgttttgtcaaaccgctggatgaagccctgatcctggagatggcagcgcgccatgacacactggtgactgtcgaggaaaacgccgttatgggcggtgcaggcagtggcgtgaatgaattcctgatggcgcagcgcaagccggtgccggtgctcaatatcggcctgccggacagctatgtgccgcagggcgaccaggaagagatccgcagcgatatgggcctggatgcagagcatattcagaagtccatcgaagcgtacctggcaaaagcctgattatccttccggacacaaaaaaccctgctggtgcagggttttttatatcatcaataatgccgcttactctgccaccgctttcaccgcgaagtggtcaaacccgctcagagccggttttacctcctcacctttgctgaaatagcggatgccgtcactctccggtttcatctgcccgatacagcagaaaggtgcgccggtgtgtgccagtgccatttccagtgcgccacggttgatttccggaacggtaaagcacagttcataatcctcaccgcccgccagtgcacgggctagagcctgctccggtgatgaacaggctttcagtgcctcagacatcggtaagttatccagttcaatcctggcaccgcagcggctggctttcaggatatggccgagatcggaaatcagcccgtcagagatatctatcgcagaggatgcgaggtcacgcagtgcctgtccctgcaggatacgcggctgcggacgcagatggcgtttcagcagatattctttgtgtgccgggtcttcgggctgcagctcacccagcaaaatcgccagtccggcggcgctgtcacccagcgtgccggtgacatagatccagtcaccgttacgggcaccggcgcgtttcatcgcccggccggccgggaccagaccatgaaccgtcagtgtcaggctcatcggaccgcgtgtggtatcgccgccgattaactgcataccgtaataattcagttgctcaaagaagctgtcgctgaactcacccagccacgcttcatcaatagacggcagtgtcagcgccagtgaaacccaggccggatccgcgccgatagcggccagatcacttaaattcacagcaagggatttccacgccagatcacgggcagaaacggaaggcagaaaatgaataccggacaccagggtatccgtgctgacagcaacctgctgtttttccgctacggtcatcagagcgcaatcatccccgatacccagttcaacgtcccggcggtaatagtgctgccggtcaaaaaaacgccggatgagatcaaattcaccacaagccataatcagaaattccgcaatcagataaagacaaaaggccggttaaaccggcctcttttatatcatgtcatttatgtccgtgcataaaagtatcagatgattactttctgcgggcatttggcgcggctttatcaagcacgccattgacaaatttgtggctctcttccgcgccgaacactttcgccagttcaatcgcttcgttgataaccactttgtaagggacatcctcacggtagcttaattcatacatcgccagacgcagaaccgctttttccacctgacctaactcctccagctggcgggagaggtacggagccatcagtgcatcaaggcgcaccgcattcgttgccgcaccgaagaacagctcacgaaaataggcgacatcaacgtctttgacatcctgctctgacagaaattctgattcaacatccgcaatattattgccggataactgccacgaataaagcgcctgaacggcacattcacgagcacgacgacgagctgcaggtttcacacatatccccttactaaaatccggattcagcctttgatggctttaattacattaatcatttccagcgcggtcatcgcggcttccgcccctttgttaccggctttggttcccgcacgttcaatggcctgttcaatattttcggtggtcagtaccccgaaagtaaccggaatcgagctgttcatcgcaacggcagataacccggagctgcattcaccggacacatattcaaaatgtgcggtgccgccgcggataacagtacccagcgcgataatagcgtcatattttccggtatcggccagcgttttcactgccagcggcagttcataagcacccggcacccagaccgttgtaatgttctcagaggagacctggccaatacgctcaagcgcatcaaccgcaccgtctaacaggctgtcgttgatgaagttgttaaagcgggcaattgcgatggcgatacgcgcacccggcgcactgacaacacctttaatgacgttcatagcctttccttcttacgagtttcatactgcggggcgcggattttatcacattctttccgtcaccgcgcctgtgtttttcaaactccggaataaaaattaaattccggcgtaaattcagaggttaataaaccgggatcagccgcaggcggagatccggcccgaccatcgtgcagtcgtcgatccgcagctgcggcgcatcacgcagatgcgcaagcggcggcagtgtaaagagatcctgtgcatcactgcccagaatcttcggtgccagataaagcacgatttcatccgccagtccggctttcagcagtgcgcccgccatatgtgagccgcactctgtccagatatggttaatattgcgtttgccgagctgcatcatcagcagaaccaaatcaacaccacagccgttctccggcaggatcatttcctcaacgtcaccctgccagttatccggctgagaagcgatccgcgccagccagcaactacctggcaattgtgtgacacggtgctgagcggtcacccgctgacggctgtctgtgataatccgcaccggctgacggatatccgtctccggatagctctgctgcaacgatgccgggaaatccgcatggcggacagtcaggcccggatcatctgccagaaccgtggcactggtggataaaatcgccccggcctgtgcccggaactgctgcacatcctgccgcgcggcttttgaggtgatccactgactttcaccattggctaatgcggtttttccgtcgatcgaggccgccattttcagctgaatatacgggaaaccggtacgcatccgcttaaagaagcccttattcagggcttccgcttcctgcatcagcacgccgtggctgacttcaataccggcttcacgcaatttaaacagtccgcgcccggccacctgcggattcggatcctgcatggcggccaccacccggctgacgccggcatttatcagcgcttcggcacacggcggtgtgcggccgtgatgactgcacggctccagtgtgacatacgcggtggcgccgcgtgctttatcaccggccatgcgcagcgcatgtacttccgcatgcggttcaccggcacgctgatggtaaccttcaccaacgatttcgccgtcacggacaatcacacagccgacattcgggttcggtgccgtggtaaaacgccccagcgccgccagttcaagggcgcgggccatataaaattcatcagaatgcatcatgttcagtcctgcaggcgggcaatttcctcgccgaattcacggatatcctcaaagctgcggtaaaccgacgcaaagcggatatacgcgactttatccagctttttcagctcgctcatcaccagttcgccgacaaacttagcagaaacttcccgttcgccggtagcccgtaactgcgatttgatgtgactgagggaggtttcgatatcgtcagagctgacgggacgtttttccagcgccttctgcataccgcggcgcagtttttcttcgtcaaacggttcgcggctgtcatcacttttgaccacacgcggcatcaccagctcggcgacctcaaacgtggtaaaacgttcgtggcattccaggcactgacggcggcggcggacctgagaaccatcacccaccaggcgtgagtcgatgactttggtatcaacggcggagcaaaacgggcaatgcataaattatcctgcgggtcaatgaactgttgcggtagtttaccctgtttatacataaaaaacaccctgcatgcatgcacatacagggtgttttatgtttttttgcggcagaaattacggcaggatagattcctggtccgcgccttctttttccactttctgcacaatcaggtgctcacgcttcatacccagtttcagggccagcgcggacgccacgtagattgaggaaatcgtaccgatagacacaccaatcagcatgaccagcgagaagcctttcagcattgcaccaccgaagatatagagcatcagaaccactaacagggtggttgccgatgtcataatggtacggcttaacgtctgagtcagggaaacgttcatgatctcatacgaggtaccacggcggattttgcggaagttctcacggatacggtcagataccacgatgctgtcgttcagtgagtaaccgataaccgacatcagggatgccacaatggtcaggtcaatctcaatatggaacagcgacagtacgccgagggtgatgataacgtcgtgcgccagcgcgataaccgcacctaacgccagacgccattcaaaccgcatcgccacatagatcaggatacagattaatgccgcgatcagcgccattgcgccggtctgagccagctccgcacccacactcgggccgacgaactcaatacgcttaaccaccgcactttcatcaatgtttttattgatcacattgataacggttttacccagttcctgacccgcagtaccttctgccggcggcaggcgtaccatgatgtcacggctgctgccgaagttctggatcagcggatctttaaacccggcctgcgcgacggtatcacggattttatccagatctgccggctggctgaagttaacttcaatgacggtaccgccggtgaagtccagaccccagttaaaccctttcacgccgatgattgccacagaggcaatcagcagcagtgccgagatggtaaatgccacgttgtcccagcgcataaagtcatagactctgcggccgtggtttaattgttcaacagtataatcctgtgccacaacgtgctccttaaatagacagcttattaatacgtttaccgccatacagcaggttcacgatggcgcgtgtaccgataatcgctgtaaacatggaggttgccacaccaatggctgtcgtaatcgcaaaccctttaatcgaaccggtaccgaccgcgtaaagaatgacagcggtaatcagtgtggttaagtttgcgtcgataatacttgagaaggcgcctttatacccttcatggattgcctgctggacagaacgcccgttacgtagttcctctttgatacgttcgtttatcagaacgttcgcatcaaccgcaaccgcaagggtcagcactatccccgcaatccccggcatggtcagcgtagcacccggtaacagcgacatcaccccgacaatcaggataaggttcgccagtaacgcgctgctcgcgatcagaccgaatttacggtagtagatcaccatgaacagaattgaggccatcaacccccacagacacgcttccagaccctgctcgatattctgcagacccagagtcggcccgatggtccgctcttccacaatctggattggtgcaatcagggcaccggcacgcagcagcagtgataactgacgtgcttcattggcattatcaatcccggtgatacggaagttcgaccctaaacgggactggatattggcaatgttgataacttcttcgtttttctcaaggattgagcggcctgcggcatctttacgcccgctgtctttatattcgacaaacagggtcgccatcggcttatacaggttatccttggtgaaatcggacatggtgttaccaccggcgctgtccagcgagatgctgacctgcggctgaccgtactcatcactctgtgaagtggagtcagtaatgtggtcaccggtcagaattacacgtttgtacagggcgactttgcgtccgtcacgggtgtatttcacttcagtatcacccgggatacggcctgcttcgatagcggcagggtcaacagcaccgttgaccagacggaattccagggtggcagttgccccgaggatttctttcgcccgtgcagtgtcctgaatacccggtaattccaccacgatgcggtccgcaccctggcgctgtaccagcggctcggcaacaccccgttggttaacacggttacgcaggatagtgatgttctgcatgacagcatagctgcgcgcttcacttaagcgctggtcgctcatcacggcagtcagcgtgttatctgaaccgtctttgaagactaaatcgcgcaggcgttttgataacagcgagctggcttcggtacgtgatgcatcatcacggaagcggacttccacgccgtaatccgctgatttgcggacggaggcgaacggaatgctgttctcacgcagcagcgagcggataccgtcgaggttctgctcctgcagtttacccagcgcggtttccatatccacttccatcaggaagtgaacaccaccacgcaggtcgagacccagtttcatcggctcaccacccacggcggtcagccatttcggtgtcgccggggcaaggttcagggcaacaacatattgttcacctaagcctttcaccagctcttcacgggcacgtaactggatatcaggatttgagaaacgggcaagaatcacaccattttccagtgcgaccgacttactcgcgatctgatctttttctaaaatggtccggacctgatccagggtctgttcattggcggcggttccccgcgcgccagtgatttgaacagccggatcctctccatacaggtttggaagcgcataaagcaaaccgatgaggatcgcagcgatcagcatcagatacttccacaaaggataacggtttaacacggcagtcccttcgggaaaatcatactacaggaagattacagcgccttcagtgtacctttcggtaaaactgctgcgacgaaatcacgtttgatggttacttcagttgtttcgttcagttccagaacgatgtagccggtgtcagacactttagccacacgaccgatcagaccaccggtagttaacacttcatcacccttggtgatggagtccattaattgcttgtgtgatttagcacgtttctgttgcgggcgcaggatcatgaagtagaaaatcagcacgaaaacgaccagcataacaatcagagacatcgggctgccctgagaagcggccgcaccggttgatgctactgcgtcagaaatgaaaaaactcatcaaactatcctcttgttattcacataattatcaggcagataaacctgccggtggtgtatcgcctatgttatacaccaccgggtgatcccgtttcggggaaatcactcacttaacggcggaacgggtttcccgatccgctgataaaattcagcggcaaatgcttccagacggccttcttcaattgcctgccggatacccgccatcagacgctgatagtagcgcagattatgaatggtatttaagcgcgcgccaaggatttcattacagcgatccaaatgatgcagatacgcacgcgtataattgcggcaggtatagcagtcacattccgcatccagcggcgatgtatctgatttatacttcgcattacggatttttaccacgccgtccgtcacaaacagatgaccgttacgggcattacgggtcggcatcacacagtcgaacatatcaataccgcggcgcacaccttccaccagatcttccggtttacccacacccattaaatagcgcggtttatcttccgggatctgcggacagacatgctccagaatccggtgcatatcttctttcggctcgccgacagccagaccgcccacagcgtacccatcaaatccgatttccaccagtcctttcacagacacatcgcgtaaatcttcgtaaacactgccctggataataccgaacagtgcattcgggttacccagctcatcgaaacggtcgcggctgcgtttagcccagcgcagagacatttccatggattttttcgcgtaatcccagtccgccgggtacggtgtgcactcgtcaaaaatcatcacgatatcagacccgagatcgtactgaatttccatcgatttttcaggacttaagaagattttttcaccgttgatcgggttacggaaatggacaccttcttctttgattttgcgcattgcgcccagactgaacacctggaaaccgccggagtcagtcagaatcgggcctttccactgcataaagtcatgcagatcgccgtgcagtttcataatttcctgaccgggacgcagccacagatggaacgtgttgcctaataagatttgcgcaccggtctctttcacttcttccggtgtcatccctttcactgtgccataagtccccaccggcataaatgctggggtttcaacaacgccacgatcaaaaattaagcgaccacggcgcgcacggccgtctgtcgtctgcagttcatatttcacaaaacctccggcatcagaaaaacagtctgatgatgtttaattagcggcagtcagtcagcagtcgctgaaatctgccggatcaataatctgtagtatatcagtcgtcgtgaccgactttttcaaatttcgcctgcgggttgcgggtaataaacatcgcatccccgtagctgaagaaacggtaacgttcacgcaccgccgcttcatacgcctgcatggtgtgctgataaccggcaaaggcagaaaccagcataatcagcgtggattccggcagatggaaattggtgatcagcgcatccaccacctgatactcatatcccggataaataaagatttgggtatcatcaaagaatggcgctatcagtgcatcctgtgccgctttcgccgcactttccagggagcgcacggaagttgtgccgaccgcaaccactttattaccccgcgctttacacgccagcacggcatcaaccacattctgcggcacttccgcatattcggagtgcatgatgtgatcttcgatattatccacacgcaccggctggaaagtgcccgccccgacatgcagggtgacaaaggccatttccacgcccttttcgcgcagtgccgccagcagcggctcatcaaagtgcagcccggcagtcggtgctgccaccgcgccggggcggtcattatacacggtctggtataactcgcgatccgactcttcatcagggcggtcaatatatggcggcagcggcatatgaccaatctgattcagaatggtcagcacatcgcgctcatcatcaaaacggatttcaaacagcgcatcgtgacgcgccaccatggtggctttcacgctctcatcttcgcccagcagcagctccgcaccctctttcggtgctttcgatgcgcggacatgcgccagtacacggtgctcatccagcatccgctccaccagcacttcaatctttccgccggaggctttgcggccgaacattctggcagggatcacgcgggtatcattaaataccagcagatcaccgggattgagtttattcagcacatcggtgaagataccgtggttcagttcaccactgataccatcaagcgataacagacgacacttgctccgctccgcctgcgggtagcgggcaatcagttcgtccggcagttcaaaagtaaaatcggcaacacgcatgagattctcggtttcatctcaaaaagaaaaacaggcgcaatagtctagtgccccggtaagcagggcgcaagaaataacccgccgacggcggaataaaaggctgcggtattatgaattttctcgcacatctccaccttgcctcactggcaaacagcagttttctcggcaatctgatggctgattttgtccgcggtgctccggaagaacagtacagcgcaccggtcgcggcggggatccggctgcaccggcgtattgataccctgaccgattcacacccgctggtgcgggaagcccgtcagctgttccgcccggaataccgccgctacgcgccgatcacgctggatgtggtctgggatcattttctttccctgcactggtctcagtttgaaccaaaaacttcactgaccgatttcacacaacacgtccgcacagtgattgagccacaactggcatttacaccggtgaaatttcaggagctgaatgagtttatgtggccgcagcgctggttaatccgttatcaggagatcccctatatcggacaggtgctggcggggatggcaaaacgacgtccgaaacttgccgcactcagggagacaaatcaggattttaccgataattatcagtctcttgagaatatcttcttccgcttctatccgcagatgatggacagtgtgacaaagccgtttacaggtcagtaacggtttttacgttcattcacacaattagcacttgaactttactcaaataactctatcttattcgggtagcagatagaataatgaactattgataggtaaaacctattatattaatcggtattatgatctttaataccatccccggattctttattctgtctgttgtttattgccatactctatataatcttacaggagtaaattatggttctggtaacccgtcaagcccccgattttacagctgcagccgttatgggtaacggtgaaattgttaataacttcaacctgaaaaaacacctgaacggccgtccggctgttatcttcttctggccgatggacttcactttcgtctgcccttctgagctgatcgcattcgatcaccgctatgaagaattcaaaaaacgcggtgttgaagtgattggtgtgtctatggactctgagtttgttcataacgcatggcgtaacactgctatcgacgatggcggtatcggtcaggttcagtatccgatgattgcggatatcaaacatgacatcatgcgagcttacggtgttgagtttccggaagctggtgttgctctgcgcggttctttcctggtggacaaaaacggtgttgtccgtcatcaggtcgtcaacgacctgccgctgggccgtaacgtagacgaaatgctgcgtatggttgacgcactgcaattccacgaagagcacggtgatgtgtgccctgcacagtgggaaaaaggtcaggaaggtatgaatgcatctccgaaaggcgttgctgacttcctgaaaaagaactccggtaaactgtaagttccggcagttaaaagatacaaaaaccagcctgcgggctggtttttttgtgcctgaatcacgggcaaaaaaataccctgcacatgacagggtatttttataatccggactatcaggcgtgtttgtgattcacttccggctcagcgcccatcaggcgatcaaccacgatagaaaccaccagcacagccagtgacggcgcaagccatgccaggtcatatttgaagaacggcagtgactcaatccatgacggcatataagggccgaacattttagtggctttcagcgcacccatcgtcccgaggatcaggctgaccagcattgccggcgcaaccacccgtcccggttttttccagaaacgcagtgtgaaactcagcaggatcagcacaatacacggcggataaatggataccagcaccggaatggagaatgcgatcagcttgctcagccccaggttggaaatcaccatggagaacgcaccgaggatccacaccagagtgcggtaagaaatcggcagataacggctgaagaattccgcacaggcacaggtcaggccgatcgctgtcaccatacaggccacaaaaatcagtaccgccaggaagaagctgccgtagttaccgaaggtatactggacatactcatgcagaatttccgcgccatcggcagggttcgggataatcgacccgctgttttcccctaatttgaacagtgccagatagaccagagtcagcagcacaccggcaatcagcccggcccacatggtataacgggtcagcagtgaggagttttccactccgcgtgaacgggcggcattaacaatgacaatcccgaagaccattgcgccgagggtatccatggtcagataaccattaataaacccgttggagaacgccattgctttatactccggcgttgccataatggcatcaccggccggccacatgactgcagccaccccgaggatagccagagccagcattttaaccggtgccagcacatggccgacgctgtccagcaatttccccggatacagggaaatgccgatcacacaggcaaagtagatcacgctgtaaatcagcagggaaatatcagattccccgccgaccagcggcgcaatcccgattttataggaaacggtggctgtacgcggcgtggcaaacaacggcccgacggacagataggccacaacagccagcagcagcccggcgtatttaccgactggtgtactgagtgcctcaataccgccgccgacttttgccagtgcgatcacggtcagaaccggtaaaccaacgccggtgatcaggaacccggctgccgccgtccagaccatctcgccggcctgaaggccgaccattggcggaaatataatatttcccgccccgacaaacagcgcgaaggtcataaaacctaaggctaaaatatctcgtgaagttaaacgatgcgccatattatttttgtctgtaactgttaatttaatgtgaaatattcaataaaaatatcggaaataaaaatccaactccctgatctgtcaccggcgctatctcctgctgttttaacattccattagcactacgttattcatattaagttaataactatagtgattatatttaaaaaacagtgatatttgccaataactcactacaagtaaaacttttatagcgcagaaaggcaatagtcaaagcaaaaaccagaactatataccgaagtctatttccaaagcagcgattgctgttatgtaagcttcaataaacactatatgatttgtttatattttaatcagacattttaaatctgctgaaattagcagcgatttaaaagaagaaagcggcaaaagccgctttcaggtcgttgacaaacccgcaagggttggcgacgtccggctgaggttgtaaaaataaactaggaaaatcaatttattgattttcggctgataacacaaagcaggaaaaaccacgttttatcctgctttgtcagcaatatcaaagcggcaaaagccgctttaatgggaaggtttggcgataagccgcgcaggaatggtaaaactgaactccgttccctgtccgggtttgctggtaatatccagatgggtgtggtgatgctgtaaagcgtgtttcactattgccagccccagaccggagccgccggtctgccgcgaacgggatttatccacgcggtaaaaacgttcagtcaggcgggacagatgttccgcgggaatgcccggaccgttatctttcacactgaacaccgcgttaccgttacgcagcgcccaactgacctcaatccgtgtattttccggtgtgtgattcacggcgttatacaccaggtttgacatggcgctgcgcagttcttcctcatccccgaaaatcttcagtttgtcatccaccgcaaagcggatgtcgtggttgccccggctgagcgtcacggcttcctgctgaagcattatcagcatccccggcacatccacgacctgatccagcccgcttttaacagccacttcaatttttgagagctgcaaaagctgtttaaccataccgtccatacggcgggggtgtttctgcatggtcagaatcgcttttttattcatcggattatcaaaatcctgatccgcaagcatttccagatagccctgcaaaaccgtcagcggcgtgcgcagttcatgactgacattggcaaagaaatcacgccgcgagttttcaagacggcgtttttccgtcacatcgcgggcaaccatcagcaactgcccttctgaatacggcatgatgcgtaattccatcatactgccgttattcagttccagcgtcagcggcagggtataatcacctgcagtcagataacggctgaaatccgggtaacgcagaaggttaaagatgtgctgcccgttatcatccggccagcggaaaccgagaaggtgctgggcatgtttgttacaccagaaaatattgccgtcttctgtcatcatcaccaccgcatccggcagggattctgccccgctgcgaaagcgtttgatcagggtggcgagttcacggcggcgcttgcggttacgctgctgaagctggtagataccgtaaaaaatcggctcccagctgctgcggccgggcggtggcagcatactgcgatccagccacagccagtcagacaatttcagtaagttatagctgtgccagacggcagcggcaaacagggcaccggcaagaaaccagccggtatagccgaaaaaaagtgacaaaaagagtgccggcaggcagaaaaccagtaattccagtacaatttttttccacgaaagacgctcaagcacgcgcgatcctcttgcggtttacattattatcagtaacggacagagaagcggtaacccgttccccggactgtctgtatcattttatcgtgtccgtccgcttccagcgccttgcgcaggcggcggatatgcacatccaccgtgcggtcctcaacatagacattttccccccagacatagttcagcagctgttcacggctgtaaacccgctccggatgggtcataaagaagtgcagcagtttgaattcagtcggccccatttccagcggattctcattactggttacgcggtgggatgccgggtcgagtgtcaggccgttcatggcgataaggtcatccgccgccatcggggagatgcgccgcagaatcgctttaacacgggccactaactctttcggtgagaagggtttggtcagataatcatccgcgccggtttccagacctttgacacggtcttcctcttcaccgcgcgccgtcagcatcatcaccggaatttcccgcagctgactgtcccgtttcatatgtttgataacctgaataccggaaccgcccgggatcatccagtccagcaggacaagatcagggaaaggctccaccagccgggcaatggccgcatcataatcatccgcctcgataggctgatagccattctgctccagtacaaaacagaccatttcacggataggtgcttcatcttcaacgactaaaattcgtcttgccatggcgttccctgtttaccgttaatttcatttcatcagacagtgccgcgattatgcgtcacttttgtgacagatttatgaatatcagccgatacctcagcctgcaccgcaaagataatgtcattaaactgacatactacacacaaaatgcgtgtcagatcgtaaaatactggatattcatccaatgtttatttttaccgcctgatttccgttatactctgttttcagtaaaccgcctaacgcaatgcgcattcagttcgcccggcaggaataaccgtatatatgaaaatcattcacacatcagactggcatctcggacagtatttttacactaaaaaccggttacaggaacatctgcagttttcagactggctgataaacctgataaaagaacaacaggcagatgccctgattgtcgccggagatgtgtttgataccgcctccccgccgagttacgcccgtgagctgtataaccgttttgttgcacaactgcaacagaccggctgtcatctgattgtgcttgccggtaaccatgatgccgttgccacactgaatgaatcccgcgaactgatggcctgcctgaatgcggatgtgattgcccggccggatccggcgcgggatctgatcgtactttataataagcagaatcaacccggtgcgattgtctgtgctgtgccgtttctgcggccgcgcgatattctggaaagtcaggccggacaatccgaagcagagaaacaactggcactgctgaccgccatacagtcacattatcagtcgctttatgacagagcggtggcaaaacggactgaactgggcgcggaagttccgattattatgacaggccatctgacaacagtgggtgccaaaacctcagaatctgtccgtgatatttatatcggcacactggatgccttcccggccggtgcatttccgcctgcggattacattgccctcgggcatattcaccgcgcacagtccatcggcgacagcgggactatccgttacagtggctcccccgtcccgctcagttttgatgaatccggacaggaaaaaagtgtttttctgctaaccctggataacaacagcattacggcgattgatgcagtgccggttccctgttttcagccgatggtctgtctgaaaggcgatctggataccatcagtcaggcgcttgaacagtttccgtcccgtgatgaacacacacagccggtctggctggacatcgaagttgccgggcgggattacctgccggacattcagaaacgcattcaggcactgacagagccgctggccgcagaagtgatcctgctgcggcgcgagcgcaggcagataaccgtagataacagcgaagctctgcgtgaaaccctgaatgagctgacgccggatgatgtttttgcccgccgtctggcactcagtgataccgaagaagaggatattccgcgtctcaccacccttttccgccgcgtttgtgagcaggttcgtgaccgggcagagagtgacagcagagaaatcagtaccggtatccgcggaaaaagcagtccccgcacagacaaccggaaaggaaaaagtgaatgaagatcctgacattacggtttaaaaatatcaattcactgcagggcgaatggaagattgattttacggcagagccctttgccggaaacgggttgtttgccatcaccggcccgaccggtgccgggaaaaccacgttactcgatgctatctgtctcgcgctctaccatgaaaccccgcgcgtaaaaacatccgcatcccagaatgatgtgatgacccgccatactgcggaatgtctggccgaagtggaattttccgtcaaaggaaaagcataccgcgcgttctggagccagcggcgcgccagagataaagccgacggtaatcttcagccgccgaaggccgaactggctgagtgtgccaccggaaaaatcctctctgacaaactgacacaggtcagggagagcattattgagattaccgggctggattttgcccgttttacccgttctgttctgttatcacagggaaatttcgccgcctttctgaatgccgatgataatgaacgggcagatttgctggaagaactcaccggcacggaaatttaccggctgatttcccgtcaggtttatgaagactacaaagccgcgcaacaggcgttgtctctgctggaagcgcagaccggtgctatccggctgatgacagatgatgaacggctcgtgtgtcaggctgaactgaccacactacagacagatgaacaggctcagcttatccgccagacacagttacaaactgcactgcaatggtggcagcaccgcgacacactgaatacagaaacagaacagcgacaacagcagcatgccgctgttcttcagcagatacaggatgcccggccgcagcttgaccggcttgcccgtggcaaaccggcggaaaaactgcgtccggccagagaggcagtgcagaacagtgccgccttaagtacacagctgaccacccgtatgcaggagctcacacaaacaacagagagtaccacccgctcgctgcagccactgagcagtcagtgtgaggagcagcaacagttactcaccgggctgaaacagcagtatcagcaactggaaacactggcagagaacgaaatcaggccgctggataaccggctgcagttgctgaacagtcagtctgatgcactgaaacaacactatcagacacagttgcaggaacagcaggcactgaaaaaccagtcagcacaacttcagcaacaactggcgcaaacccgtgacagttatgcgctcagcacacagttcagacaggaaaatgcgcagaaagcagagcttccgtctgccattgttcagtggcggcatgagctgcacacccggcaggaataccggactcagatttccgcactgacagaacagcagcaggcgggggaaattcagcaacaatcactgaccgcagcacacacagaaatgacagacaaactggctgcccgcaatcagtctgttctgccgctgaaaacagagctgacggccttacaaaccacgttgcagcaggcccggcaaacggaaccggaccagcagttaaccacgcaactgcaacagaccggtgaaaaacgcggattactgcaaaaactggcatctctggcaccggaaatcaccctgctgacccgtaaccgggaaagtcttctgcaacaacagcaggtatttcaggaggaaattaaggtcctgacagactggattgcacaacaggaaccggtcctggctgaccagcagacacatctgcgtgacctgacagcccgttatcagctggagcaaaccattgtcaggctggaggcggaacgtcagcgtttacaggtcggagaaccctgcccgttatgcggcagtaccgatcacccggcggtcacggactatcagcagataacaccggatgaaaccgcacagcgtctggaagcactgacacacacggtcagagaggcggaaaaaacactggcagcgaagcaatctcagttggctttcacccgcacacaacacgaaaaactgagcagtacactgcaggaaaccggagagaccctcgcgacccataccgcacaatggcagaaaatctgtcttgagggtgggtttgactccctgactgattccccggcatcactgaatgacatcacccagcattatgacgggctgtatcagcagcaacagcaggctcaggaagcccgccgcgcccaggaaactcaggtattaacactgcaaaaccggttacagacggaagaggcggagtgtgaacggctgtcacaggcattacagcgcaacagtcaggaacagcagttcctggcgcaacagcagactgaacggtccgcccggctgacacagcttcatcagcagcaacagacactggaaacctcgctgacacaaacagtaaccgcctttggttacaccattccctcaccggcagaagccgctgagtggctggcacagcggcagcaggaaagggatcagttcgccgcaaatgaacagcagatacagcaaagtgcacagcaactcgcggaactgaccgcacagcagcaaaatctggaagcacagcaggcaaaactgaccacacaactggcagaacagtccgccgcactggctgcacttaaacaacagcacgaagctgtcacggaacagcggcaggcactgttcggtgataaaaatatcagtacggaattacagaaactgcttcatcagcaacaggaagcggaaagccgcctgaaagccctgacacaacagcgcgacagcctgcaacagcacctcgcggggttaaaaggggaagagaagcggctgcaacagcagattctggatgcacaggagcagcaccaccacaatcagcaggtttttcagcagcaactggcagaaagcccgtttgccggtgaggctgattttctcgccgctctgctcagtgaagaggaacaccaacagttacagacgctggaaaccgcacttaaccaggctcagctgaaagccgccaccagcctcggggatgccaaagctgcgctggcgcagcatctgtccgcacaaccggaagcgttccgcgaacagtcacggcaacagctgacagaattacataccgccgccgcacagcaactgcgggaactgagcagccgtcagggggaattgcgcggacggctgacggcggatgacaatctgcgggtacagcagcgcgatttactggataaaatcacccggcatcagcaggacgtcaccgcccgcagccgcctcaaccagctgataggctctgccgatggtgccaaattcagccgttttgcccagggactgacgctggattacctgatccatctggcgaaccggcgactggaaaaactgcatggccgctatgtgttgcagcgcaaaacggcagacagcctggagctgcaaatcaccgatacctggcaggcagacactcagcgtgataccaaaaccctctccggcggggaaacgttcctggtcagtctggcgctcgcactggccttatctgatctcgtcagtcataagacacagattgaatccctgttcctcgatgaaggcttcgggacactggatcaggaaactctcgatattgcgctggatgcactcgataacctgaatgccaccgggaaaaccatcggcgttatcagccatattgaagcgatgaaagaacgtattgcggtacagatctctgtcagaaaaatgaacggactcgggatcagtaaattatcgccggaatatcgtgttacagcggcgtgatattttcacgccgtcagcacacaatgattaattcaatgatatttattggaaatttttctgttggccgaattttttgaaacataaggttaaatattttcggtatgttttttgattcattgcttatatgctgttcatcatgaactgaagagagcgcggaaaccggtttttccgacaaaaaatttaacggagagtaacatgtctaattcatttatcgagttaattaaaaaacgcagaacaatttacagccttggtaataatctgcctgtttctcaggatcgtatcgccgcgctcatcaaagaagccgtgaaacacagcccgactgcgtttaactcacaatcatcccgcgtcgtggtgctgtttggtgagaaccacaaaaaactgtggaatatcgtgaaagatgcactgcgcgctattgtcccggcagacgcatttgccgctactgaaggtaaaattgataatgccttcctgtccggtgccggtactgtgctgttctttgaagaccagtccgttgtcaaaggcttacaggaacaattcgcactgtatgcggataacttcccgatctggtctgaacaggccagcggtatcgcacagtttgctgtctggactgcactgtccgaagagaacatcggtgcctccctgcagcactacaacccggtgattgatgagcaggtcagcaaagcctggaatatcccggctgactggaaactgcgcgcacagttagtgttcggttccattgaacaggaagccggcgaaaaagcctttatggacgatgaaagccgcttcagaatcttcaactaatcttccggacccggccgcgtattaagcgcagctgttcccggacgcatcaggcgctttacctgtcataaagcgccgttattaccttctgttatcgtgttaaaatatgccttgcccgccctgtgcgggcttttttttatcagactttcggccacaaccaggccgcaccacggacaccactggagtcgccgtgtaccgctttacggatcggtgtatcacactcaccaccgaaaacacgggagcgcatcagcgccggtaccgtctgatacaggcgatcgacgttactcatcccgccgcccagcacaatcacatccgggtccagcatattcacgacctggccgagcgcttttgccagccgctgctcataattcaccatcacctgttcagccggtaagtcaccctgcgacaaacgacggatgatctccgcgcctttgcagacctcgccggtcagcaccgtataatcagccataaaaccggtgccggagataaacaattcggtacagccctgtttaccgcaatagcaatccgccattcctttaaacagccggtcggcttcatcctgccacggcagcgggttatgtccccactccccggccacaccgttaccaccgctgtgaacctgtccgttcagcgcgatccccgccccccagccggtaccgataatcaccgcgaaaaccaccggaaacccggcgcctgcaccatcaaccgcttcggagaccgccaggcagtttgcatcatttgccacccgcacttcccgttgcagtaatgcactgagatccgcatcaaacggctgaccgttcagccagaccgagttggcattttttacccgtccggtgaccggcgacagcgttcccgggatccccactccgacagtgccggtctctccggtcgcggtttctgcatcgtgtaccagcccggcaatcgcctgtaatgtctgctgataatcaaaacgcggcgtatccgttcgtttacggaataattcctgcccctcattactgagtgcaatcacttcaattttggtgccgcccaaatcaataccgatccgcatactgtccccttctgctgtggatttacgctctgtctttcatgcttctgataatgcagggcagcggcctgacaatcaagtttccgcgcgaaggcattagagcaacgcggcaagatccgttatcatagcgggatgcaattctcaccgcgcaatgaccgcgcatcataaaacaggactgtccgatgtggtttaaaaatatactcgtttaccgccttagctcgccgtttccgctgtctgccgatgagctggaaaaacagctggaacacatggcattcacgccgtgcggcagtcaggatatgatgaaaaccggctgggtttcgccgatgggctcccggggtgatgcactgactcacgctgccggtaaacagatccttatctgtgctaaaaaagaagaaaaaatgctgccatcgccggtaattaaacaggaattgcaggcgaaaattgaaaagctggaacatgagcagcatcgcaaactgaagaaaacggaaaaagattccctgaaagatgaagtggttcatgctctgctgccgcgtgccttcagccgtttcagccagaccgccatctggattgatgcggaacgcggcctgattatcgtcgatgcggccagcgccaaacgggcggaagataacctcgccctgctgcgtaaaacactcggctctctgccggtgatcccgctgaccaccaaagatccgattgaactgacgctgaccgaatgggtgcgctccggtgatttaccagccggttttgccctgatggatgaagctgaactgaaagccattctggaagacggtggcgtgatccgctgtaagaaacaggatctggtatcagacgaaatcgccacctgcattgaagccggaaaatgtgtcactaaactggcactggactgggaagagcggattcagttcctgatgtctgatgacggctcctttaaacgcctgaaatacagtgatgatttaaaagacaaaaatgaagatatcgaccgcgaggattttgctcagcggtttgatgctgattttgtcctgatgaccggcgaactgagtgcgctgatcagcaataccattgccgccctcggcggtgaagcggaacactgaaaataagatctgcgggaagcccggtaacaggctcccgcggatacccgctgttatgcccacggcagcggggctttttcatcattaccgtgctcgccgtaatagagtgacggcagaaaacgggacaagtaagtaaactcgttgtagcagtgcttcatcagcccgaaaccaatctcatccggcagttccgtcagcggatccgccagtgacgccccgagtaaaaaccggctgcgcagcacacatccgaactctgtatcataggtcatatgcagcattttgccgtcgatcgggtaacccagggtatcggttttcacatcatccccgaacccgatatgagcgcaaacagcaccggaaatctgatgcgtctgccgcgcggcagccagtttatccgcatcaaagaaatcctgtgcatcattgaatttcagtgtcgcgccgaccggcgggattggcccgagagactcaaccgcacggattgtcgccccgatataactctccccttttttccagacggaatcccagccgtgatgtgccacatgatcatgcgggtgccaccagcggatatgctgcgtggtttcaaaaaacgtgaaccaccactccagcatccgccctttacaaccgtgcaggtcggttctgacagacactgtcagcagcccttcctcgctgcgttccagacccatttccatccgcagtggttcaggggataataactggttaatatcatccagtgcccagggtaagttttgttttttcgctgacataacgtatactccataattaagaaacacatttcgtttcctaattaatattgtcccgtaacgggcatttgtcaattgaggaccgcacgtatggcaaaaaatgacccagccacagaatcccgcggacgtggccgtccggttgttccggaagaagaattgattgcaaaaatccgcgaggcatcacttagtctgttgttatcacagggatattccgcgatgacgatggatgcggtggcaaagcaggcgggggtctccaaaaagacgctgtaccggttcgctgacaaccgtgaagatctggcggagcagatagtgcgcggctggacggattcctttgtgccgctgtttatgcaggatgcaaaggatagagatgatttttatcagctgcttgaaaataacctgactatcatgagccacaaggtgctcagtgctgaggcggcgggattattttgtctgctgagcggtgagtttcccggccgggagttattgctgacccgctatcaggcaggcggaattgagcgcggacgtgcgctgctgacggaatggttgtcccgtcatcaggcgtttctgcctctgccggatccagcacaaaccagtgatttgctgttatcgatggtaatggcggagccgctgcgccagattgccctgaagctggcaccaccggcaccggattacccggtacaggcgcggatccgtgctgcggtggcattactgaaacgctgacgggcaccggcggataaccagcgcccggaactgcattatttctgtatcagatagcggattgtcggcccgtcctgctggatggacagcacagtgtagccgtggttttttgcatccagcgggatattgttgatagattgcgggcagtcactcaccacttccaggatctccccgggtttcagtgacggcatggcttcaagggtcgccactgccggatacgggcacggctcaccaaccatatccagccggtaatccggcacaattgcagtattttcggtattcatggtgtgctccttagtgtgcggcagaggcgacagcgtcagcctggtttttccggcggaagaagcgtttctcccacatcagtaacaggataaaggcgaaggcgagtaatccataagtaaccagcagaccaccggccgggccgaaggtatccagcagattaactttgtcgtagtcagtcgccagccacggtgccacggaatcccagtaataggccaggatcgtcgcgccgataatattacccagaccgacccaccagaaatgcacctgaccttccacggcacggtacatccagccggtttcgcagccacccgccagcacaataccgaagccgaacagcagcccgccaatcacggcgttagggcctgcccagaagattttcggctctgcgcccagttgcacatagctgtagatgccgatagcactgacggccataccgaggataattgctttagccatctgggtacgtccggtaatccagacatcacggaacgcggaggtaaaacagatttgcgcccgttcaatcagcagaccaaacccgataccgaacagcattgccatgccgagtttcggggatttaaacagcgtgaacaaagaccaggtaacacacagcaggaagatcagcataccaagacgaaaacggcgtttcgcccgctgcaaatcctgtgtcagtggtgacgctttgctgactttttgcagtttgaccggaatgcggaacatcggcagcagtgtgaatttcgcgccgaagtaagagcctgcggcagttgccagtgcaaagaaccaggcatgcagagagaattgcgggataccggtaaagaaggccgccaggttacaccccattgcaagacgagccccgaaaccggcgataatgccgccgataacggcctgccagatacggattttgtgttgcggaaggcggattttgacgttgttagcccataaggcagcggcgatacaaccggcaaacataccgataatcatcatgccgtcgatacgatccaggggcgagccctgcaaaccgatcaccttaaaatacccccagttttccggatgagcaccgaacagttgcagaatgtgtccgccccagcgcgtaaactctccggtgaccgcccagaatgtgcctgttaatccgaagtagtatgcggataagatgccggcggcgatcactgcgggcaacggctgccagaacctgacaagatacgttgatttaaatgtagaccagttcatttttttaccaaaaaaatcccgacagcgtcgggaatcgatgtcggagtacgtgtgtaccagtaggatctttatatgtgatccaccggagaatcatactcctgtataagataattcgcttattaatatttttaaaaatactgacatgtccctgaccaccggggatcagggaataaccggcaaagcggaaagacgctgacacatccctgttcgcgaaatctgctgaatcatccggtttgtggcaaggcggcaagggaaggattccggggagcatacacaagtatgtgacccgtaatcctgagtgcagctaacgcggccacaggccggaggatgacgcagattcggatcgcgccatccctggcgcttgacgctttcctctttttgccggttaacccctcatgtacttcaactctgttaaaaacagaaaaatcaatctgttaaatcattcgtttcacaggaaggcggcaaagaaaaatccccggggagcatacatcagtatgtgacccggggattttgatgcagccaacgcgtctgtggagcgaaggatgacgcagatcagcagatgcggggcagcggctcgttatacggaagatccagcagcctggtcgcgccgaaaatcccctgcactttcacctgttttgcttctgttacctgcccgatggtacaggcgtcctgacccagagggctgttacggagggctgccagcacggcggcttcggcttccggggctgtgacaatcaccactttaccttcattggcaaaattgagtgcctccagccccaacagctcgcacacaccacgtactgcagttttcagcggcagtttctgttcttcgatattcataccgcactgtgaagcatcggcaaactcatgcaggatagcggtgacgccgccacgggtggcatcacggacagctctgatgccgtcaatcgcccgcaaaggtgcaagcatcggctccagaaccgcacagtcgctgcgcagatcagcatccagcccgaggttctcgcgcagattgaggatcgccgcaccatgatcacccagtgtgccgctgacaataattttatcccccggacggcattgtgctgctgcccagttcagctgatgcgggatcacaccgataccggcggtattgataaacactttgtctgccgcaccgcgcggcaccactttggtgtcaccggtcacaatctgaataccgttggcttttgtggcttccgccatactgctgaccagctgagagagaatgtcaaacgacaacccctcctcaaggataaatccacaggagaggtagcgcgggattgcgccaccgacagacagatcattcgctgtgccgcacacggccagtttgccgatattgccgccgggaaaaataatcggatcaatgacatagctgtcggtgctgaacgccagacgatcaccggcggcctgtaattccgccagcggtattcgtgcctgatcttctttttcattcagatacggattggaaaatgcctgcaaaaacagggagtcaatcagttgctgcatcccctgtccgccgttgccctgggccagggtgatttcagtaataggtttcatgttattctccgcgccgatactgataataagctgcgcaagccccttcagaggagaccatcagtgcgccgagtgccgtttccggtgtgcatgcgttgctgaacagcggacagtccgccggtttgcagcggcctgttaatacatccccgcatcgcgcctgcgggttatcggcaacagactgcggctgcggccggaagcggcgttcagcatcaaattcatagtaagccggtgtcagctgaataccggagtccgcgatattacccagtccgcgccactcactgctggctttcagttcaaagacttccgccagtgctttctgtgccagcagatttccctgctccggcacaatgcggctgtactgattttccaccgccatcggcgcgtagttatcctgtgcctgtttcttcagctggcggataaccatcagaatagctgtcagcagatccagcggctcaaagccggtcaccacaaacggtttggcgaattcatcacacagcggctgatacggcgtgcagccaatcaccatactgacgtgccccggcgcgataaagccgtcgataaacacatctttctgctccagcagtgtgcgcagcgtcgggataatggtgatgtgctgacaaaaaacggtgaaatttatcagtccgctttttttcgccagctgtaacgtggccgccgtacccggcatggtggtttcaaaaccaagggcgaagaagacgacctctttatccggattatcgcgggcaatagtcagtgcatccagcggggaatagacaatgcggatgtcgctgccgtgacggcgggcatccagcagcgaaccgccgcgaccgggaacacgcatggcatccccgaaagtgcagaaaatcacccccgggcgggccgcgatttccagacaggcatcaatacgccccatcggcagcacacagaccgggcagcccggcccgtgaacaaattccacggaatcgggcagcagtttatccagcccgaacttaaagatggcgtgagtatgaccgccgcacacctccataatctgcaaaggctgtttcagcggatgcggccacgaagccatctcttcccggatctgcgccagcagtttttctgccagtgccggatcacggaactcatcaacaaaacgcatagaaatcccttattccgccgcaccgcgctgctgattcaccttgctcaggcgctcctgtaaccaggcaacccattcatccattccttcaccggtagtggcagacagaacaatgacatcgatatccggattcacacggcgtgccgcattcacacaggtttcaatattgacattcacatacggcagcaggtcgattttgttaatcagcatcaggtctgcggcagcaaacatatgcgggtatttcagtggtttatcttcaccttctgtcactgacagaatggcaactttgtgctgctcacccagatcaaagccggccgggcagaccaggttgccgacgttttcgataaataacaggctgttatctttcagtccgaggtgatgcatagcgtcatgcaccatctgcgcatccaggtgacaccctttgccggtattgacctgaatcgccggtacgccggttgcgcggatccgctcagcatcattggtggtttgctggtcgccttcaatcacggcacaaggaactttatctttcaggtaattgagtgtgcgggtcagtaatgtggttttgccggagccggggctggacaccaggttcagcgccagaatgccctgatcctgtaaatgctcgcggttatggacggcgatttggttgtttttatccagcacccccatctcaatctgcaccatccgtttctgggtcaggcccggcgcgtgtgtgcccgcttcgcccatcccgtaatgcatattgtctttatcaattaccggcacaaaagccgctgcatggtcatgaccgtggtcgtgttcatgatcatgtgaatgatgatggtcgtgagcatgttcgtgctcatgagaatggctgtggccgtgcccgtgatcatgagtgtgttcatatccgtggctgtgctcatgactgtgtccgtgagcatgctcttcaccggcttcacggccgtcataataatagtgattcacatcgccgttatgatgatagtggtggtgatgaataatgatggggcgggaatggttgtcatgttcatgatgatggtgatcatggccgtggtggtcgtggctgtgaccttcaatctgcacgtttccttcgctgcaaccgcatgtgctgcacataatcctgactcctgctcgatttattggctccggcgcggcattgtggtcagactcgtgacaggtgcgggcatctgatcacgctgtgtcgggcagtcaacataaataaaatattacacataaaagccggtaaaccattaccggcttttatgtatccgttattaattatattagtagcaaatctgcggagtgcccgctttgactttgcgcaggtcagatggattttccctgcgcaaagagtgatgtgtttacgcgaaactcagtggacaaacaccacgtaaacggcagcagccacaataaagcggtagatagcaaacgggataaaggagatacgtttaatcagtgacaggaaggttttcatggcaatcagcgccacaataaacgccgccaggaaaccgaccgcaaacatcggaatatccgagctgctcaggaaatgccagctcttgtataaatccagtgctgtcgcgcccatcatcatcggtacggccagaataaaggaaaactctgatgcagtgtaacggttgatccccatcagcataccgccggaaatggtggcacccgaacgggagaatcccggccacagtgccaggcactggaaacagccgatggcaaacgcctgacggtagctgatatcatcaagaccagtggcctgcaccttcttcggcttaaagacttccgccacaatcagcaggataccgcccgcaaccagcgcgtacatcacattcaccgggttaaacagggacttaatctgatcccgcagcagtaaaccgagaaccaccgccggtaacatagcaataataatgtggagtaaattcagctttccctgagtctgtccttcatggggaacccggccgaaatgaatgccgataagggcaaacatccgccgccagaacaggaaaaccaccgccaggatggaaccgagctggataaccacttcaaacgtttttgctttatcgccggtaaagccgataagctcagcaacaataatcatatgaccggttgatgacaccggcaggaattcggttaatccttcaacaaccccgagaatcaatgcatgcagtaaacttgtgatatcgcccatataacgccctgtatggcagataaaataaggcacccccggacgcgggaatgccggatacggagaacagcatatgacgcaagtgtgacaatttcatgacaccctcagcgcttttatgacagttccgctgacggcattatgacaacatcaggccgcacttcgttcaataatgacacccacttcttccgcctgtgccaccgcacccggtttggccacgcggatacggacccggggggtgccgaactcagtcagtaataatgacgccacttcttccgccacacgttccaccagtgcgaactgtcttgtctgcacataatccagaatcgcagtgctgacgctggcgtaatcgagacaatgttccacatcgtcactctcagatgcgcgtttgttatcccagtgcatttcgatatcgagcactaatttttgcgtaatattcttttcccagtcgtaagcaccaatcgttgtaaaaacaacaagtttcttaataaaaacaacatccatccgcaattaccccgtttttttatgctcatcggatatcacttcccatgaaatatgcgtattatccatggaggccaataactgtaatttaccgtctgtcaggagagaagcatgagtggaatcgcgcttggtatgatcatcttcgcttatctgctgggatcaatttccagtgcgatcctgatctgccgtcttgcgggactgccggatccgcggcatcacggctccggaaacccgggggcgaccaacgtgctgcgcatcggcggcaaactggcggctgccggtgtccttatctgcgacgttctcaagggtatgctgccggtctggctcgcctacctcctgcaaataccgtatttttacctcggcattatcgccattgctgcctgtttaggccatatttatccggtatttttccactttaaaggcggaaaaggcgtggcaacggcatttggttcgattgccgccatcggctgggatctgaccggactggttgccggaacctggctgctgactgtgctgctgagtggttactcatcattaggtgcgattgtcagcgcgctggtggcaccgttttatgtctggtggttcaaaccggagtttaccttcccggtcgccatgctctcctgtctggtgctgatccgccatcatgacaatattcagcggttgtggcgcgggcaggaaagccgcatctggcagaagctgaagaaaaagcgggccaaaacggataaagagataatccaggaagcgaaagagcaggaaaaagaggattaaaaaaggcgctgaagcgccttttttgtgtccggaaattatttgtccagcgggggtaactcagccagcggccagcgcggacggacagtcacccctaattcactgcgcataccgcctttgaagcggatcatcccggccagcgcaatcatcgcaccattatccgtgcacagttcagggcgggcgtagaatgcttctccgccaagtttttgcagtgtctgcgccatgcgttcacgcaacgtgcggtttgcactcacgccgcctgccatcaccagccgtttaaagccggtctgctccagcgcgcgtttgcatttgatcaccagcgtatcgaccaccgcgtcttcaaaagcacgggcgatatccgcctttgtctggtctgaatcatcattctggtgaatggtattggcagcaaaagttttcagtccggaaaagctgaaatccagccccggccggtcggtcatcggacgcgggaaagtaaaacgtcccggcgtgccctgtgctgccatgcgtgacagtgcaggcccgccaggataatccagacccagtaatttggctgttttatcaaaggcttcaccggctgcatcatcgatagattcacccagcagcgtgtattcaccgataccggtcacactgattaactgcgtatgaccgccggataccagcagcgcgacaaacggaaactccggctgatgttcttccagcatcggtgccagcagatggccttccatatggtgaaccggcaccgccgggacattccaggaaaacgccagcgcacggccgactgtcgccccgaccatcagcgccccgaccagccccggtcctgcggtataggccaccgcatcaatatcctgtgccgtcagaccggcttctttcagcgcagcctgaatcagcggcactgttttccggatatggtcacgggatgccagttccggcaccacgccgccgtaatctgcgtggactttgatctggctgtataactgattagccagcaaaccggcttcatcatcataaattgcgattccggtttcatcgcaggacgtttcaatgcctaacactcgcatgggacttaactcgctggaacaaaaactgacgggactggcggcggacagcaggaagcaaatccgtctccgcaaagagaacagtgtatcaccataatggcgtgctgacaggtattaaggtgaaatacggggcttttctgccgtatttttattcagcaaaaaccgcttattcacaggatgaacacagttatccacatactttccccctgcataacggatttctgttgctgacaaatcgccgcgtatcagctataatctgcaccctctgtaaaacccctgtcgggtgtgcggatccggtcttggcggtaacacctgaccatatccggggtatttctctgtctgattatccacagcactttacaacgtgggtcacattgaagtaaaattccgcaccattttaaagacaactggcataacgccagtacagacctatttattgaggtgagaggcacatgccggtaattaaagtacgtgaaaacgagccatttgacgttgcactgcgtcgtttcaaacgttcctgcgaaaaagcaggcgtattagctgaagtacgtcgtcgtgagttttatgaaaaaccaacgactgtacgtaaacgcgctaaagcatctgctgttaagcgtcacgctaagaaactggctcgcgaaaacgcacgtcgcactcgtctgtactaatcgctgcggccgcgccgcaacttagtcagaccgcagtagttgcagttaatggccgtgtttccggaaggaagcgcggcttattatcgttatcagacaggcgaaaaaggggttatggccgggcgcattccacgcacatttatcaacgacttattagcgagaaccgatatcatcgatcttatcgatgtcagggtgccgctgaaaaaacacggtaaaaatcaccaggcgtgttgtcctttccacaacgaaaaaactccctcttttacagtcagcagcgataaacagttttaccactgcttcggctgtggtgcccacggcaatgctattgattttttaattaattatgaccggctcgagtttgtcgaggcgatcgaagaattagcagcaatgcacgggctggatgttccttatgaaaccggaagcggcagcagccagatagaaaaacatcagcgtcagaacctgtatcagctgatggaaaaactggacagcttttaccgccatgcattacaggctgataacgccggtcatgcccgtgagtacctgaaccgccggggtctgagtcaggaaattatcagccggtttgcaatcggctatgcccccgccggatgggacaacgttctcaaacgctttgcccgcagtgaggatgatcgtcagcagttgctggatgccggcatgttagtggtcaatgataacggccgctgctatgaccgtttccgggaacgtgtgatgtttcctatccgtgaccggcgcggccgggtaattgccttcggcggacgtgttcttgatgacgcactgccgaaatacctgaattcaccggaaaccgatatttttcataagggccgtcagttattcgggctgtatgaagcgcagcagaataaccgcgaactgtcccgcatccttgtggtggaaggctatatggatgtggttgccctggcacagttcggtattgattatgcggtggcctcactcgggacatcgacaacggcagagcacatacagttgctctatcggacatctgataccataatttgttgttatgacggagaccgtgccggacgcgaagccgcctggcgggcactcgaaactgcccttccccatcttaatgacgggcggcagcttcgttttatgtttttaccggacggcgacgatccggattcactggtgcgccgcgaaggccgtgaagccttcgagcagcggcagaatgaggcacacagtctgtctcagtttctgttcgataccctgctgcgccaggtggatatgagcaccccggaggggcgcagcaagctgaatgccctggcgatgccgctgataagccgcgtgccgggtgaagcgcaacaggcgtttttattacaggatctgggtaatttactcggattaccggatattacgcagctcaaacaggcagtccgccagagtgaaaacagccccggttatcaggcaccgaaactgaaaccgaccaccatgcggatcctgattgccctgctggtgcagaatccgcagtttgcacaattagtgccgccgctggaatccattgataccagccgtattgccggtttttcattattcagggagctgattgatacctgtttatcacagcccgggctgaccaccggtcagttactggaacactaccgtgataataaattagcgccacagcttgaaaaactggccggatggaacgatatagagatagatgagatagcagaaaaaaccttcaaagatgccttaaatcatctggtggtgtctgccctcaatgacagatttaacttcctgatcgccaaagagcggacagaaggtctgacccctgaagagcgcaatgaagtgagtcttctcgtgcgggtccggcaataagtattattattaaactatgatgaatataacggcttaaatgccgcagacagcaggaacagccctgcatgccatgtcaccaaggttcatggccgaagaaaagaaatccttgattgttattgttgctggctaagttgttttgccgaccaacacaaacctaaatactcagaagtgtggataccgtcttatggagcaaaacccgcagtcacagctgaaacttcttgtcacccgtggtaaggagcaaggctatctgacctatgctgaagtcaatgaccatctgcctgaagatatcgtcgattctgatcagatcgaagatattatccagatgatcaatgacatgggcattcaggtaatggaagaagcacctgatgctgatgatctgatgctggcagagaattcaacagacaccgatgatgatgcagccgaagctgcagcacaagtcctctcaagtgtagaatcggaaattggccggaccactgaccctgtacgtatgtatatgcgtgaaatggggacggtagaactgttgacccgcgaaggcgaaattgacattgccaagcgcatcgaagatggcatcaatcaggttcagtgttccgttgctgaatatcctgaggcaatcacgtatttactcgatcagtacgaccgcgttgaagcaggcgaagtccgtctttctgacctgattaccggctttgttgacccgaacgcggaagaagatctggcaccaaccgcaaccaacatcggttctgagctgccggccgaagaattaaacaaagatgacgacgacgaagacgaagacgaagaagaagacagtgacagcgatgacgataacagcatcgatcctgaactggctcgtcagaaattcgaagcgctgcgtgtgcagcatgaaaaagcgcgtcagcagattaaaattcacggccgcgaccacccgaacaccaatgcggaaatccagcagctctctgaagttttcaaagagttccgcttagttccgaagcagtttgaccatctggtcaacaacatgcgtgaaatgatggatcgtgtccgtcagcaggaacgctacatcatgaaactctgcgttgagcagagcaaaatgccgaagaaaaacttcatcaccctgttcaccggcaatgaaaccagtgattcctggtttactgctgctgtcgcgatgaacaaaccgtggtctgaaaaactgcaggatgtcgcggaagaagttgaacgcagtctgcaacgtctgcgtcagattgaagaagaaaccggcctgaccattgaacaggtcaaagatattaaccgccgcatgtctatcggtgaagcgaaagcccgccgtgcgaaaaaagagatggttgaggcgaacttacgtctggttatctctatcgcgaaaaaatacaccaaccgtggcctgcagttcctggatctgattcaggaaggtaacatcggtctgatgaaagcggttgataaatttgaataccgtcgtggttataagttctcgacctatgccacctggtggatccgtcaggcgattacccgctctatcgcggaccaggcgcgtactatccgtatcccggtgcatatgattgagactatcaacaaactcaaccgtatctcccgtcagatgcttcaggagatgggccgtgagccgtcaccggaagaactggcagagcggatgctgatgccggaagataagatccgcaaagtgctgaaaatcgccaaagagccaatctcaatggaaacaccgattggtgatgatgaagattcgcacttaggggatttcatcgaggataccaccctcgagctgccgctggattcagccacctcagagagcctgcgttccgcgactcacgaagtgctggccggcctgacccctcgtgaagcgaaagttctgcgtatgcgtttcggtattgatatgaatactgaccacacgctggaagaagtgggtaaacagtttgacgttacccgcgaacgtatccgtcagattgaagcgaaggcactgcgcaaactgcgccacccgagccgttctgaagtgttacgcagcttcctggacgaataatccgcttcaggatcagagcattatcaggcgccgtttaacggcgcctttttttatgcttattcattgccggacaagaagtaattcagttacacaattgatgttcagaaatcatttttgacaggcaatattccgctcataaaacagtcagatagacaagaaacgctagaccccgcagacaactggcagtataatctcacccacttcggccccttagctcagttggttagagcacgcgactcataatcgcttggtcactggttcaagtccagtaggggccaccaaatttttgctgatttatcagtgtattaagccactctttacagggtggcttttttacatccgggggtcagtgtcccctttttgtcccctgaaaaatattgacctatatcttccctgctaatatcaggcagataccgtaacccttcgtatttatctgttatccggttttgatatcagtaaaaaccctatctttcctgattgcggttttccccgttattattacaacaattttactgaacagtgattaccctgcggtatttctgtaagaatacgctattacaaaatatccgctgaataacggtatctcaggatgaatctgatgaacaaaatcttaccttttatagccacagttcttatcttgttctcttttaattcggcagcagatacgctcgtggaattaatctgtaaagcagagaaaggcgatcccggtgcacaataccggctggggaaactttattttaacggtattaccgttaaacaaaatcacaccacagctatagcgtggtataaaaaatcggctgaacagggaaatactgatgcacaatataatttaggtttcatatacctgtttggtgccggaactgaaaaagattattctgcagctgcgcagtggtaccggaaagccgctgaacaaggaagccctgtggctgaactcatgacaggatttatgtaccaaaatggttatggggttgaacagagttattccctcgcatctcaatggtaccagaaagcagctgcacaaaatgaagtcgatgcacaatacgctctcggcatttattaccagcacggacttggtgttgaagaaaatcagtccatagccaaatcgtattaccgacaagcctgtgataacggtcatcaatccggatgtaactactataagattttagaagaaaaaggtgttccggatatttaatgaggcagataaccccaggttatctgatggtcattcacaaaaatacccggattccagtccggaatacagtatcagctgatatatccggcaaattttttgatcatgtcaaagaatagtccggcgtagaagaaagaaggcagcagaaacatggctgctgaaaagaaatcaggggatatttttttaatcagccggaccggacatgctatcaccatatacataataacaccgggcttgcggatccccggacagttatacggtatgaattttttaagtagtaatataatgatgacaataacaaccggaaaaataaagtattccagatgcgggtcgccgccgcttctggccagattaccaagatctgccatagaatgcgttcccgtgactatcatcagtaagattaatactgaagaaacaatccagtccatcattaaataaaatgtaaatattttttcatacttactgagtgtaaataccacaacgttatgtataaatacgtaataaataataatggcagcggtaaccacagctgaagaaacaccaacaaatttacccaggaagagcaacatagcactccagtatgcgcatatataatactcctcgcgggtaaagctgaacgttttttcactgataatctttctgactgccggattaattttgtcgtccagttccggatacgcccgtgttatccgttcatactgttgtgtcaattcatcaataaaccccggtacaaaatgcagccacaacgaaatacgtttctgctggccggtaatatatttcatcgacatccttgtattaaattttccgtgcgttctttctgttatacattgtttccaggcacgggcgacctctgtattacgaagctgatcatttaatgcctgctgaatactgtaaggaataatattggctgaatcatactcattaagccgccagcctaaaaatgaagagagatattccaccggtgattccgttaatccctcacattgtgccagtgtccgcgcaagatcagtatgaaattgctgaatgacatgcaggctgccctgctctgtcacctgcatccacagtccggaaacggcttgtttccagccggtatccgcatcagaaatatgccgggccagttcactgagttgcatttgtgtatacggcagttcagccgccggtatttcagcgggctgagtatccatattgtccggctcaaatccgctttccgccggaatatcttctgaatacaaaacaccactgccggacaaaaaaccggtatcgtctactgtgttatattcgtcatcttctgcagtgttttcatcatcaaaacaaacagaatacaccgcatactgttttgcactttcaaaggcttcgcgtaaattctgatactcttcaggatgagtatccggccggtatattttaagtttacgggcatacgcgcggcgaatttctttttcatcattcgtcggtgcgatccctaatatttcccagatatccatcactcagtacgccctttatactgttccagaaattgtacaacgttctgccggactgtactgatacgacggaaatcctggctgttcagcgcctgttcaaattcggtggttatataatccgccattgcccgctcatcacccagtaaaaattcatacaaccggctgcactgcaataacagttcccggttttccggcatatctttcggatgctgttttaatcctgcaatttttgccagactcgcggcaatttgctcatcactcatctgtcccgggactttttcaatcaccagacggaatactttcggattgccctgataagtacactcaacctctaataacccgtcaatggtgtaggtgaaacggatattaatttcaacctcaccggccggacgcggcggaatagcgacttccatttcgccgaggaaaatattttcccgcacccgccgggcttctccctgatagactttcagtaaaatgattttctgattatccgcaacggtgcccaccgtctgtaatttactgacgggtaaaaagttattccgctcaataaccggcagaaaataaccatcctcataattgagcccgttgcgttttgtggtttcaatacccagtgaaaacggcataacatccgttaataccacatcatccagtgctttatctgccattaccatcccggcctgaatccctgcgcccagcgcaaccacttcatccgggttcaaatcatggcggggaaaacggccgaacaaccgggcaaccgcctggcgtaccagcggcatacgggtcgcaccaccgaccagcaagacatcgtcaagatcatcaggggagaaacgggcatcattcagtgactgcaaaaccggcttttgcaggcgggtgagcagcggctgacaacaggcggcaaactccagctctgtcatcgtccagtgcagatccatgtcattccaccgcaagaaagcactgccctgattgctctgactaaactgaattttcagttgttccgcctgttccagcagcaacggccggatctgatactgatgttcactgagttccgggtacttccccagcatccactgacagacagcttccgtaaagtcatcaccgcccagacgcacatcaccgctgctggcgcaaaccccgataaccccttcaaacatatcaatcacagagacatcaaatgtcccgccgccgaggtcaaatgccaggtatttacactctctgttcccggtcagtccgaaggcaatcgaggcggcagtcggttcattcagcaaccggcgcacggttaaaccggcaattgtcccggcagttttgaccgcccggcgctgcacatcattaaaatacgccgggacggtgatcaccgcatccgtaacgggatgacccagccaagcttccgcatcgtttttcaactgacgtaataataaggctgacaactcttccgcacggaatgaattttgtcccagcaccagcgtttcatcggttcccatatagcgtttgaaaccggctctggttaactgcgggtggctttgcaggcgatctttcgccgcctgtccggtaataacatgtccgtcatcatcaaacccgacaaccgacggtgttaatacctttccgtgtttattcgggatcagcactgcccgtccgtcctgccataaactgacggcactgttactggtacccaaatcaatcccgatgattaagtcagctgtcattttgtcttccgttatttttattacgactttcagatacgatttactgttttcagaataaaactttcagcggatattggcagcttttatttataaaataccctgaacccgcgtaaatgtgcgccggttcaaaataacgccccgcctttaccgcctttatacctgttctgaaatacggtttatttttattatctcccgtttgttattcagataacgatttttccgcataaaaaggcagattacaccggatattatccgataataaccagctgttttcatttatttttctgttggccggataacattgaattacttcttcattccgttacactaagtcaaatttttattttctgtcttcctgtttatttaagattaatccgtataaggactgatatgacaaagcaacgtaaactggggcttgctctgcttattgctattgcactgtccggcggggcctggctgacgtattctgtaacgtccggcagcacccctgcagataaaggctatgagctgtatttatccggggatactgacggggcattccgttatttttccgcagaggcggaacataatccgcaggcagcctatgcattgtctgtaatgtatctcaacggctacgatgtgccggccaatgcgctactgggttatcagtggctggaacgggccgcgaatgccggcaataaaagtgccttatacaacctcggttattaccgctatcacggtataacacaagataccgcacaggatcagtacggtattacctccctgaaagccgcggcacaggccggtgtccgcgaggcccaggaattactgggcactatttatcttctcgataaatacggcaatattccgtcagatgcagagcaggcgcggaaatatatgactgcggccgcagatcagggatcgttctttgcaaaattcgcgctgggttatatcgcgtatgaatatgataaagattataaaaaagcggtcggtattctgacaccgttgctcagcgagcaatttaccttgcctgctatgctgctttccggaatatatgaaaaaggcggtcacggaatagaagccgatccgggacaggcaaaaaaataccgctatatggcattttcacaaatcagctcactcaatgaagatgatttgatgccgaaagcattatcccttttcggctcagaaacggcagatgaaataaccgcccggctggcaaaactggaaaaaatggcagagaacggcaatcagcatgcccgttatgccctctatgatacttatatgcagggaacgggtgttatcgcaaataaagaaaaagccctcagctatttacagccgctgattaatcaaaaagatccgaaagccctttatacctggtatcttgataccaaaacaaaccctgaatatctgacagccgcagctgatgccggatatcccgatgccctttatctgctttatcaaatccaccgtaatatccgttttgacgatgccttcggttatgaccgggagcgggcggcgaaatacctgaaacaggctgccaataccggacatcacgatgcattaatcgatattattgaggatattaccagcagctatcagtttccggataacgacaccaacgcacaggtatctgcctatttagccaaattactggaaaaatatccggatgacccggaggcgctgatgctggcttccgcacgttacggtgatcaggaagggaatatttatgatcctgttcgtgcctttgaactgaataaaaaatcggctgaattatctcccctgccggattcacaggatcaactggcctataaatatgccagaggtatcggtgttgagcaggatatgaaaaaagcggtcgggatctataaatcgctgctgaaagatccctattttcaggataaggcttaccggcgtttaacggatctctatttttcctttgataccggcggtgagattgatgaaaaagagattatcgcgttcctgaaaaaagatatcgaagaaaatgataactaccgccaggcgtatttttatgccgattatctgttgcaggaagatccggtaaaaaaccgtaaacaggctatggaactgtatctgaaagccggcgaatatacccccagtgctgatgttcacctggcaaaatcgcttatttctctcaataccggcaataatgaacaggctttaaagctggcgctggaaataatgaaaagcggatatgcccgctccctgctgacggaaaaagaatggcatgatgtcacgcagattgtattctccgaaggtaaaaacaatctcctagccaggcaattctgggtcctgcttgccctgcgggataataacgctgaagcgcagaaactgattgaaccgctgctgggtcaggatccggttgtcacgtattactatgcgaagctgaaactggaagatgcggaagataaaccggacatgaccgatgagatcctgcgtccggatattgaactgatgatgaaagcggcagcgctgggcaacacggacgccggtgaatacattgtgaatcgtctgaagagcgcgacccgctccggcacacaaagtaacctgaatcaggcgtttctgcaggtaaccggactgacagaacgcgatattgtgccccggctgacacagtgtgccgatgccggaggatgggcctgtatgtatgaattgggcgagatctattatgaaggtaaatacggtgtaaaagctgacctgaatacctccgtcgcctggtacgaaaaaattcctgatcgcgattaccgtttcacagaatcacgcctgagcaaagtcaaaaagagccgtgacaccctggcagacctgaatgcccgtgtacagaaaggggatgctgaagccgcctatgaattatcttatgcctggaggaacggcaaccacggcctgactcaggatccggaaaaatcacggtattacctgaaaatggcagcggaaggcggtaatgaagatgccatcaccacactgattgatgactacaaaagcgcagacacactcagcccggaggataaaaaactgctgctgtcgctgtacgacaaactcccgggaacaggcaataacagctatctgcgtgatctgggtacacagtacctgcagggcagcaaccttgtcagcgcagatcgtcagaaagcccgttattatttcagcaaagccggtgattacggtgctcacgagctgaaagcaatggatcagtttgaaataaacgtaaaactggcggatgaaagcccgaatgctgcttatgaaaccggttatgcttattttctcgggcgcggcacacaaaaagatctgcagcaagccctgccatacctgcaaaaggcagcagatgccggtcataactatgccacaatcctgctggcagatacctatgaaaagggagagtacaataaagagacacagcgccggattatcacaccggactgggataaagccattgtcctgatacgtgcctacaaagggccgcgtgatgtatcagaaaatatcgcattctatgagagcacgataaaaccggcactggccggagacagcagcgccatgaacgccgccggggaacactataagaacagcggctattatgataccgcccgctactggtttgaaaaaagtgcggaaagcggctatctgcctgcattctgcgccctggccggggcgactgaaagcaatgacggtaaaatagcggtattacgccgtggcgcggagaaaggtgacagttgctccgataccatgctggctatcatgcagctcagagagaatcgcataacaccggattcaccggagtgggccggtattatcacccgggtggaaaccggtctgagaaacagtgatgaagaggtgtcaaaagccgcgtttgaagcactgactcagctgtatcgcggcactctcagcgatgacaacggcagctctctgtataaggcagacaacaaaaaatatctcacactgctggaatcggaggcagataaacgggccgatgcactaatcgacctgttctattattaccggcagaataatgacatggataaagcactgtcttatctgcaaaaaggccatgacaacggcgatattgctgccacagaaacactctacgaatactatatatcgccggaatattgccgccgtgacgatgccgatcccgctaaagcggagcagtatctgacggagtggctgaaaaaatcggactatccggaaaataccgataaccatatgctgatgccgccggaagaccggaccaaagcgatgggtgatgcgtggcttgaaggcttctgtcaccgggcaccggatcctgacaaagctatcgcgtggtatacccgctcactgacgtataacaacacacatgccctgaaaggtatgtatgacgcgcagataacgaagaagaatgccccggaagcctattactacggttcacttgccggggtcagctcccgggagggggacgaccttatcgccacactgacggatgcagaacgcgaaaccgtgctgcagcgtattaagaaaaagcaggtgtatgagcaatacggccgttatgaacaggaaattgaagcgaagcggcaaaaagcagaaagcggcgacggtccggcggcattctcgctgggggtaaactatgcccgtggcgaacgcgttccggaagatacggaaaaaatgatctattactatgagctggccggtaaaaacgggtacgcccgtgcttacaacgtgctgggtaatctctaccgcaaaccgaatgagcgcgggatcccggtcaacggtaaaaaagccctcgcgtattttgatgcgggggcaaaactgggtgacagcaataccgcacacctcgccggggatatgctctatttcggtcaggccgggctggaaaaagattatccgcaggctgcccgctattatgaaatgacctctcttgaacagggcaatcatcatgaaatggcgaaatacaaagtcgcgtggatgtactatcacaaaatggccggtaccggcagtgatgatgatctgcgcaaagcacgggataacctgatattgtcagcaaaatacggcaataaagatgccgcagaagctttaaaagagtgggatttttcccgtatcagcgataaaaaataaataagcggttttattatcagcgccctcccggaatgtgatttgttccgggagggggtttacaactcacctgtccctcacccccagaatatccacctgaatcatccgtgaatctgcacgaccgtggtcatccacggcgcggatacggtaacgtccggcagcttccggtttccactccagcgggcggcggctggtgctgttaccgaggtatgcatcaccggcaaaccagtaaatcacactgctgtcattatcggcggtggcggtaaaaaacagggaggatggctggtttgctgtccgccgcagtgtgtaagtggtgttgcgcagcggagaggtaatttgtggcggagtaccgccgatcaggctgttaccgcctttgcagtgtgcgacagacggcggggttttcttcgacagaccggccagggcaaacacccgcgccaggtcagacggccagtattcatagatatcaatattcacctgtgcaggatcataaggcggacagaccacgtcgccggtgattttatccgtcgccaccgggcggtagatggtatcaaccgcaataggcgatttccccgggataaaccaggttttgccccgccgctgacaccactgcgtcggcaggttgccgctggccagacaaacctccacctgacggagattttccggcagcggaaagtccggctcccgcagcgccggatactccgccataatgttgtcaataatattgaaaaacagcggtgcggcggcttctgcaccaatcagcgcactgtttccggtgccgtcaaagttcccgagccagaccaccagcacatacggcccggtgataccgctgctccaggcatcacggaatccccaggaggtaccggttttccagtacaccggcagtgtcatcggtttttgtgcgagggtgttaccggggcggcggtgctgccccagcatatccagggtgataaatgcggcttcctcactcagcagacggaccggcgcagcgggttgttcggattcggtcatccgcagcgggcgcagaacaccccggtttgcgaggatcgcatagagttttgccagctcctgcgccgtcacttcgccgccgcccaggaccagcgacagtccgtagtgcttttcccccgccatcccggagagcccggccagacggagaaactgatagagattcggtttgctgagttttgccgcgatatccaccgccggaatattacggctgtagttcagtgcctgtgttgccggcagcggccccataaagcgcaggtcaaagttctccggcgcgtagctgccgaaggtggacggcacatctttaagaatggtcagcggatgcagcacgccctgctccagcccgagggcgtaaataaagggtttgagcgccgagccgggggagcgtttggcattggtgccgttcacctgaccgtggatctccgtgttgtaataatccgccgaccccaccagcgcccgcacgcccatatcacgggtatcaacaagaagcaccgccgcgttgtgcaatcccgcctgctgacggcgggcgataaaagcagccacctgtttttcggcaatgcgctgaagattaacatccagcgtggtgaccaccgtctgcggtttttcagcactgaaccggttctgccgggctatctgctcaatcagatgcggggcgatgtaaggcatctgttccggctgacgcagcatcagcggcaggtcaaacagtgccgccatgttttcatcgtccggatgctcttcccgccagtgctgccagagccggttgcgtgcctgcatcagcggctggctgatatccgcgcctccgggtgtgacacgataccccggcgactgcggcagtaccgccagcgtcagggcttcaggcagcgttaaatccgccggttttttattgaaatagaccagtgaggccgccccggcgctctcaatattccggccatagggggcatagttaagataggcttccagaatgtcgtgtttggaatagctcagttccagctgcacagcccgcaggatctgttcggttttcccccgcagggtacgggtgttgagatgccagcgcatccgtgccagctgcatggtgatggttgagccgccctggagccgctccccgctgatataactgacaaaaaaaccgcgcgtgaggctgtacggattaaacccgggatggagataaaaccagcgatcctcataacgcagtgtcccctgtgtcagcaggggcgacatctcttccagcggtgtccacagccggtagcggtcatcgtttgccagtgtcaggcgcagcagtgtgccgttgcggtcataataggcaaccgacagaggcacaccttctgacagcggcggatgcggccagaggcgaaatccggtgagaaacagcgccagcaggataatcactgccgccagattctgtattacacgccggatgccgctcattctgaccgataccgcccgagcattcagggtttatctgcaacaggcggcagaaccgtaaataccccggctgccgcagactgcgcctgaatctcccggtcatacatggcttcgccgaacgccggcggaatgataaagcgccctgtattcaccggttttatctgatagataaattcctgactatccgccgcagcactgccgtagataagtactctgtcctcacgggcatcactgaagtccggtacccagcggcggccggtgctgaacgggagctgtgacagctgcaggctgtccgccgcttccggatcctgacgcaccacctcaaacccgcccggcagcagatccgccaccacaatattattcagtccctgtttggcattggcgcggatatgcagacggacatagactttttcgccctgcgccgcactggttatcacctcacctttttcattcagataatcacggctgatttccagccctttcgctaccgcagcctgcggcggtgtgcggtcaaaaccggattctgtcaccacataccaggccgggttatccgacggattatcaaagcggatttcactgacaccgtcaccgaattttccggtcgcagaggcatttttcatcaccgaaatcacttcaggtgcttctgtgcctttcagaacgctgatagtgagttcaccggcttgtgccccgctctgctgcatatgacggctgtagtattccattgccagaatgctcatagccgctgaataggtggtgtaacgctcctctttaaagcgcagcaccatgttttccagcagctgtggcgggatagcagacactttttccgggaagtgacggacgatcagatagagccgtgtactgtcctgcaccagcggatcgaggtagctccgtgtccaccatgctttgctgtaagccgagttcagggctttccaggtcggcgccagcatcatatctgcctgtttatccatcttcagcattttgtaggatgccgcgagatacagcgcgcccgggtcatcctgccaggagtccggataactgctctgcatctgtgtctgtacttcagccagcagtccggtggtcacctcgccctgacgggtcagcaggtagacagcaaaggcgcgcatccgcagatcatcctgcgtattgagcatcgggttcgccgccactttcttcaggtaaatattggcggagccgagcagcgattcctgcaccggatagcccgcgtcctgtgcttccagcaggaactgcaccacatacagtgtgacaaacggatcggtttccggcatcgcctgccattcgccgataccgccctgtccgttctgccgcgtcagcagtgtggtcatggtctgttgcagctgtttgcggacctccgtctgtgactgcagtgtgctgatttccggattacgctgactgaacagcagcggaatggcacggctggtgatctgctccgaacagttatacggatagttatccagatactgcgacagcgcctcgctcatcaccatcggcgagtatgacacccgcgcatcccgtttggcatagttatcaaacatctgccgcagcgccgtcacccgttgctgtttaccgtccatccgtccgagagacgagcgggtacggtaagccgaggccgggcggaccgacagattctgcgtgcggaccgccgatttatccccggaagtgacacggaaagtgatatccgccgtgcccggcagtgcattggctttcaggcggaacgacaatactgtttccttcttctcaccgagggtgatctgctcatggctgctgccggtgatttccagtgccggatcggtgctgacggtgacatccagcggcaccgcttctccgttcaggccggtcaggttattggcgatgccgagagaaacatcaaactcatctcccggggagaccatggccggaatattcggtgtcagcacaaaatcatcccgtaccgtggtgctgctctgtgtgtggccgatgcggtcaggtgaaaccgatactgccatcacgcggatcttaccgttgaaataatccggcacctgataattaaagaccgcgtcgccatcaacggcggtgatccccgaccagtacgccaccggttcatcccgcttgcgtttgaacggattaaggtgcagatcgatgccctctccggcatccccgcccggtgctgcggtcagcgccatcattttgctgaattccggcaggatcaggtcgaggatctgagtgcttttcacttccagcgcccgtttgcggaagaagtagtcgagcggatctttcaggcggtaacgcgccacctgcaatatgccctcatcaatggcaaagaccaccacattctgcggcgaggtggttttcacatgaaccgccaggttttcacccggtttcatcacgtccggcgatgtcagcgaaatacccgcgttaaacgcctcatggctgacgcggaacggctgcacaccgaagctcagcgggctcataaagatttcatcggagttaatatcacggacaaactgcacgttaacatagccgttgccggtcagttctgccggtacacggattttctgcaccgagttggtggtgtccgcacggaaccacacccactgatacactttgtcgcgctcaatggtgataataccgctgccggtgtacggcgcgctgacagcaatttcaatctcttcgcccggtttgtattcctctttattcagcgtcagttgcagttccgcattgcgatccagcgagcgggtgatattcgcattaccggcgacggtgtaatcggttctgttcagcacattaccgtccgcatcttccgcctgtaagataaagtgaccgggtttcgaggtgttcagtgtgatatcagtaccggcgctgctgatggtcagcggttgctcatcaatccgggtttctttcagtctggactgatatttgaagaccccggacggctggcgcatcagcacggaaatgtatttctgctccagaagcaccagtttcaggttgctcttttcaatacgggtcagtgacggatccaccgcaatcagattcagcatccgcactgcatccttactgatgtaatccgtgtcgccgtccgctttgatgcccaccagcgaatcatgcggagagaccagtacccgcgctgctgccgtgactgaacggccgctgcccggttcaaacgcttcggtaaacagctgtaactgataggtcgcttccgcgtagttttccagccctaatgccagcggggcggcaccgttttcatcggtggtgcgctcttccaactgcgtttcaaagttatccgtactgcggctgttttcatagaaacggtaatccggatactgcgtgaatgacggataaaccggccgcatggtcatttttgtcgcaatacggcggttctgcgccggggtgccgaacaggttctgcacatcaaccgccgcctgtaattcctccggtttcacccagccctgctgacgatccggcgtcagtttcagtgccactttcatgctgtccggctcaaactctttcaccactacggtggtggtaccgagcaggcgcaggtcattttcatccttaccttccagatagagatagatattccagtcgccggtcggggagttttccgatgtggtgtagctcagttcgctgaaaccggtggcatccagaataatttgctgtgaatgcatcagagtgtcacgcgggtcgcggatctccgcccgcagcgggatgccggtcagcggggttttccagtcataggtgcgggtgataagcccggcatgaaaggtttcccccggccggtaaataccgcgatccgaaaagagatagctgctgagggtgcgcggatcttccggggtttcgtcgccgtaaatatcaaagcgcgagaagtccggctggcggtcataccaggcgttgaccggcaggaaggagacatccccctctttttccgccaggaacattaccgccatctgctcattacggaaatcatgcagcggcgggaatgcggcgtggccatcactgccggttgtacggctcagcagtgtggtgccgtttttggccaccacagagactttcgcaccactgaccggctcgccggtatacacggactgtacgaacacatcccgcgagccgtcgagggaggatttcgcgatgatccccatatcagtgaccaccacaaagcgtgaatcgagaaccgcatcctcttcgtaatcctcatccccttcatcatagctttccgcttccggggcttccgccggtttagccggatcccacgcccgcaggctcagcaggaatatgccgcgttttgcggacgggtcagctgagaggtatttgctcaggtcgatacctttgtactgaatatcgccgggattggcggcagacagcgccgtctggtaagtaaagtgttctgtaaagtattcatcactcagacggttaaaatccgttgaggtaaagtttttatccttaaaggagacgatatgctgtaactggcccgggatcacccgtttcacatccagctgcaggcccgggaagttacgtgccgcgacggtgatctgtttttcacctttcatcgacagcaaagccccgtcagacataaaacgcagtgttttcgggtaatctgggatgcgtaccggcagatagcgtgatgttttcaggtaataaccgcccgccgaactcataccgccggtgatttccaccagcagccagcggttggccggggcgttataactgaagctgaatgcggcctgattctcctgctcgctgtcatccggggtcagcgtgaccggctctgataatgcgatgactttttcgctgatatcatctgatttccagtcgtcgtaaataccctcagaattataatccgggtgtttttccggcagcagacgggcacgaaccgcttttgtgatctgtttttcattcaccgggtcagagaatgacacaatcagggcacggcgatcttttccgtcatctgattccaccagctgactgtcgatgcccgtcacatccagactgtagcggttcggtacaatcacgcggaaggtttcatctttttccgtggtattggccggaacggccgctccgacaccggctctgactgtcagcagcacttcgctgtctgtatcattgagtgccagttggccggagtggatccaggctttgagttttttatcatcataagtgacggtatacggcaccggcttgccgtcacgggtcatggacagacgtgattccagatttttcacatctgccggggcattgaaggtcaggccgataatggcgtgttttttcatcggatcctgcggatcctgatagaactcagcccggccgccgcgataataaaactcaggagtggtaaaagttttttgtttctctgttaacgccacctgcggagccagcagtgttttggcatccatatcgacggtgtaggttttccccatcgggaaggtttttttcgccgtgaataccagcttgcggtcattacgccactgccattcaccttccattgcgggggtcagggtaataccggccgtgaccggtttaccgataagggttaccggtgcggcagagcgggagaatgtcaccaccacaatctgcgctgaattatcatcacggttatagttcactgccgaagggcgctgtacagatgcggaaatatcctgcaccaccagcggcgcaacatctaccggcttcggtttgttctgataccagtgccaggtgtaataactgcccgccgccaccgcagcagtcagcaataataaggcagatatggttttcggatagcggtttacgccccgctccagccgggcaagctgattaccggcaaaggtcacccagcccggtaccgcccagcggatccgtccggtgaacggacgcagcagaaaacccagcagagtaaaaagataaacaagaccgcgtgccgccagacgcagcagaataaaaggtaagcggaggataaaacgcagaacgtccatgacaacattttcctctgagtgttgagactgacatcagtttgccgcagcacacagtgaaatccggttcagccggaagctgtcagtgcccgatactctcatcctccataaaacaacccataaagcaaattattgtataaggaataatcttaaattacggccccggcgtgtccgcaggggccgtttcagggaaaaattattccagcgcactcaaaatagcctgtgcggctttgactctttcggtattcgggtagtttttattcgccagaatcacaatcgccacctgtttttccggaataaaggccacataggcgccgaaaccagttgttgcccccgttttatgcacccaggaagcacggttatacggctgaacctggttgtctgttaccgggtgcggctgcagtgcgacctcgttggtcacgccgttaatgatcatatctttctgctgcggccagtcatacatctcccagcccagcccctggttaatcgcggcggttttatagtagcgggtctgtgcaagatacattgccatttccagatccgcattaccggcccgtgacggctccatattcatttccgcccagcgcagcatatcttttgaggcggatttcacgccgtaagactccgcatcaagctgtcccggcgacacgcggaccggttttttgtttttatagccgtacgcatactggctttgcgcgctttccggcacggtaataaaggtgtgagataatcccagcggtgccaggatccgcgcggtcagcaactgctcatacggcatccccgctgcgttggcggtcagagcaccaaacaggccgatactgctgtttgcatacagacgcatatcgcccggtttccgggacggctgccactgctgatagaagtgcagcagttccgcacggtttttcaccgcatccggcacctgtaacggcagcccgcctgcggtgtaggtggccagctccagcagtgtgatccccttccactgcggcagagccagctccggctggtatttttctgccgggtcattcaacatcatctcttttttcgccacagaaaccgcacccagcacacctgtgaaagttttacttacagatcccagctcaaatagtgtattttcagtgaccggctgttttgcctgaacatcggcaaaaccataattgaaataatagggcttgccctttacagagacggcaaccgccatcccgggaatatcctgctgtgccatcagcggtttaatggtgctgtccaccaccgctgcgacattatcagcggcagaaaaccccggggcggaaaacgccagcagagcggaaatcagtgttgcagataacgattttttcatcagaattaaccttccgtgtgtgagtgacggcggcaagtatcgtcagattcaccggacagaacaaacggttaattataacaagagcctaaagaaaaacttacaggtggattatggtcagacgttatctcccccttaacccgctgcgcgcctttgaggccgctgcccgtcatctcagttttacccgcgcggcgattgaactgaatgtcacccccgccgccgtcagccagcaggtcagggcactggaagaacaactcggctgtgtgctgtttacccgtgtctcgcgcgggctggtgctgacccatgaaggtgagggattactgccggtgctcaatgaggcgtttgaccggattgcggatactctggagtgtttttctcacgggcagttccgtgagcgggtgaaagtcggtgcggtgggaacatttgccgcaggctggctgctgccgcgtctggccggattctatgacagtcatccgcatattgatctgcatatctccacccataacaatcatgtggacccggcggcggaagggcatgattatacgatccgtttcggtaacggcgcatggcatgaatcggatgcggaactgattttcagtgcgccgcacgccccgctgtgctcaccggccattgcagagcagttacagcagccggatgatgttcaccgcttcacgctgctgcgctcattccgccgggatgaatggagccgctggctggattgtgcgggtggcacaccgccttccccgtcacagccggtcatggtgtttgacacctcgctggccatggccgaagcggcacaactgggtgccggggtagcgatcgcaccggtatgtatgttcagccgcctgttacagtcaggcgcactggtacagccgtttgccgcagaaatcaccctcggcggctactggctgacgcggttacagtcccgtacggaaaccccggccatgcagcaattcgcccgctggctgctgaatacggcggcggcgtaaaactcactcaccttccaggctttttacccgcaaatcatcaccttcactgatgcgcagccgttcactgccgcagtgcggacagcatccggcatgctgcatgatttcggcctcgcggctgcaatcccagcaccatgcctgtgccgggataacatcaatatgcagtgtgcagccctgcgccacggtatcacggcaggcgatatcaaaacagaaatgcagtgcactttcctcaacatccgccagtgcaccgacttccagccagacatccgtaacccgcgcaatgccgtgctgttcagcctgttcgcggataatatccgccgcactcatgcacagggataactcatgcatgccggggcaccggttttccggtgaacagcgccctgcgccctgccatcgccggagcatccgggtccgtgaccggcagtgaaagcagcatgcgtgcactgtcatccgccagccgcatcccttcctgcggtaacattgtgtgcggaagcggcgacagcagcgagcacgccagatactgagatactctctccagctcaccgaccgtgaatgtcatgatgccgtacggcagccgcaagccgattttttcactgactttgcgcggcggccagagctgctccggccccggaaaaatcacggcactgaacatccacggcgtgatcacacaacccgtccactgcccttcaaacagcgtcagttccgtgacataaaccggcattgacgggtgcaggaaggtgagatcgtgcatagtatccgccgctactttttcaaacgcgttgcggatctgctctgccgggctgtgcataaaaccctgaatatcctcagacatctgccgtctccttcttcaccgcctcaacacctgattcacgcagtaccgccagcacctgctgcagtgccggttcaacggcagcctgcagttgcggggtcaggccgatatccggctccagcgaagccggaaccacgcccaccagcgtcagtttggcgggaaattccccggtaaaacgcagcgcggacaagacatcggataaccccagctgatgcggggagattttattggtgaacagcgccggaacttcctcatcccgcagaatgcggatggtgcccggggcgcttttcgccgtcacaatggcatcggtgataatcagatgatcccgcccggccatgctgtcgagcagttccatccccgccgtgccgccgtccatcacttccacataatccggcaggatatagcgttccgccagcgcttccgcgatatgcacgccgatggcttcgtcggtcagcagaatattgccgacacctaataccagaatccgcatcacagcaccttcactgataccgtttcacggccatcaacatcaacaatatggaccgcacatgccatacacgggtcgaatgagtggatagtgcgcaccacttccagcggtttttccgggtcagcaattttcagcccgaccagcgactgctcatacggccccgccacattatcgtgattgcgcggtccgcagttccaggtggacggcaccaccgcctgatagttctcaattacaccgtctttgatcaccacccagtgcgataacataccgcgcggtgcttccaggaaacccacgccttttatcacaccggtggccgggaattccggttttacataggtgatgtgatccccggtaccgatattggcgatcagcgcggcatactgattctgcaatactgcctgtaattcacaacagtgcaccgtacggccgataatccgcccgagtgtggaatgcagctgttttacctctaatgtgttgccggtcagggtctgataaaccgcaataatttcattcagtttttcggctgttccggggtgttttgccgccagtttgcagaacatattggccagcgggccgacttccacggttttgccgtacagcgtcggcgatttcacccacgagtatttaccgtccggatcccagccggtgtatttcggctcggttgtgccttcccacggtttctgcggcgcttcatcctgataccaggagtgcggcgaactttcctgaatcccttccagcaggaaagcatccgtctgggaatcgatcgggcgaaaggtcgctaaatcagcgttttcaatgtagccgcccgggaacaggaaactgccgtttttgccgtcggtcgggaattccggggtgctcaggtagttcaccgcgccctgcccggtttcaaaccactgcgggtaaaacgcggcaatgaccgcagtatcaattttataaacctgctcaacgaaatcattcagcttgtcgataaatgatttgatatacatcaggcgttccaggttcagcacaccgataccgtcgaggttaatcgggtttgccacgccgccgaccgccaggttctgaatgtgcggcgttttgccgcccagcagcgccacaatgcggttggcatcgcgctggcattccagtgcctgtaaatagtgtgcgacggcaatcaggttcacttccggcggcaactgcatcgccggatgtccccagtagccgttggcaaaaatccccagctgcccgctttccaccagtgctttgattttatcctgcactctgacgaattcctgcgtgctgttgagcggccagtcagaaacgccgttcagcatcgcagaggcttttgccggatccgctttcagcgcggaggtgatatccacccagtccagcgcggagagctgataaaagtggacgatatggtcatgggtggtgtgcgccgccagaatgatattgcggatatactgcgcatttaccggcacatccaggttcagggcattttccacggcacgtactgatgccagcgcgtgtgtggtggtacaaacgccgcagatacgctggaggatcatccacgcatcacgcggatctttccctttgacgattttttccattccgcgccacatggtgcctgacgcccaggctttggtgaccacaccatcgccgatttcacagtcaatgcgtaaatgtccttcgatacgggtaaccggatcaatcgtaattctctgactcatgacttgcttgcctcatgataagggtgagctgcggttttattgactgcagggagtatcggtaacaggcggatcaggaaaaggtaagcgcagatctcaacagccacgaaaccaatggaaattaacagttcttccgtcgccgggaagtagtgatagccattgccgggatcaaacgccagcaatgaataggcgagacgccatgccgcacagccgagcatcatgctcagtgcgccaatgtagagcaaccgggagtcacggcggaacgccgggatactgaagaccgccagtgcaatcgccatcagcacaatctcgcaccagaacagtgcagagtaataatcccccgcgaaagccagtccgagcttgccgcggtagatcagctccccgaagcgcagcaccagaaacagtgccatcagcacactgacggtcagtgccagcttgccgaacaggcgtttttcatcggggccgttgcctttcaggccgctctgtaccagggagccttcaaataccacaatggagaatcccataataaaggcggtgagcagagagaacagcggcagcatttcataactctgccacagcggatgcactttatagcccgccgcaatcatcagggagcccatcgaagattggtgcatagccggtaacagtgcgccgagcgctatcacaaagaacatgattttgttcaaccgcttaagggagactttccagcccatacgctcacagaatgccggtgccagttccagtgccatcacgccgatataaatcgtcatacagaccgcggtttccagcaggacggagttgacgttgaaaatacccggaataaagaagttcggcatattccagtaacggccgaggtcaatggtgatagacaatccgcccagtgaatatcccagcaggctcgccagcagcgccggacgcaccagcgggtgatattcccctttgttgaacacatacaccgcccacgccagcgcccagccgccgcaggcaaaaccggtgccgatcagcaggtcaaacgcaatccagatcccccacggatagccgccgttcagatcagagactgaccccagcccgaagaccagacgtttgacgataagcagaacacagaggataacaagcggcccgaaaatgatgatcggcttactgaataatttgccgccgaggggtttgggatcatgactcatgatcatcacctccgtcgtgagtgtcatttttgctgttgcggcgcaccagcacagtgagcccggccagtaccgccagcggcaggatcatccctttgtacagggtgtgctggatgttttcagaacgggctccggtggaaagttcagccagttccggcagctgcagatttttatacggcacgccggtcagtaccatcacctgagttccgccgccctctttttcgccgtacagatgcgggtaataggaaggtacgggatgtttgtagttatcgccggttttcagtgtctggcgcggataggcgtattcctctccggctgtcagcccgagacggttttttgcctcgctcatcagatcttcgcgggtgccgaagattatcgccccggtcggacacacttccacgcagccgggcaaaccgcctttatcgagcagttcaacgcccttctggttacagagttcgcacttgctgatcgccccgaacgggttatcgtaatcgtatttcggtatatcatacgggcagccgaccatgcggtagcggcagccggtacagatgtctttgtcataatgcacaatgccggtaaccggatgctttttcagcgcaccgaccgggcagactgagacacagttcggatccacacagtgcatacattgcttcttgatgtaggcataaccgtccttttcctggtctttgtgttcgccggtaccgctcgtccacacctggataatgttgttggtgtacggcgacagcttgtcattgttggaccacgtctgcgccccttccgggttacggccggggaaattgatatcctgacatttggtcacacacgcctgacagccgacacacagagtggagtcatacagcatgccgagcgcaccggggatcggcgggcggttctccgccgccgcgtggctcacggatgtattacctaacagtaatgccccgccggaagccactttaataaagtcacgcctgttcacagttactctccccgcggatcgccggaccggtttttcttctgctggcggcccagctcacggacagccatcacactgacaccggccaccagcccgaccacgccgccgagcagcccgatagcgccgcccgataccgaaccgccctctttcagctccacatccggtttttcagaacgcggtgtctggttctgtaccccggcgagctggtggatccctttgtggaagcccacgccggcctcgttacagccatagcagggatgcccgatagccaccggccacacaccgccgacatcacagaactgcaatgtggagcagttgccgtacgtttccggccctttgcagccgaggtgatagaggcaccagccttcacggtgaccgtggtcgccgaatgctttggcaaaacgtccggcgtcaaagtgagcgcggcgctcgcagtgttcgtggatcagacgaccgtaagcaaacagcggccggtttttatcatccagccccggggctttgccgtaagtgatgatatgagcaaccgttgccaggaagttatgcgggttaggcgggcagcccggaatattaatcacggttttaccgggcagaaccgcttccagtgatgccgcgccggtcgggttatcaccggcggcagccacgccgccccaggcggcacaggagccgatggcaataatcgcggcagcgccctccgccgcccggcggatatggtcggcaatcggctcgccggcaatcatgcagtaaatgccgtcatccttcagcggtacagagccgtccaccaccagcacatatttgcctttgtatttctcaatcgcattgtgcttgttggcttccgcctgatgaccgaatgccgccgagagtacctcgtggtactccagcgaaatcatatcaaggatgagattttcgatggtcgggtgcgtcgcccggagcagggactcagtgcaaccggtacactcctgtgcagatatccagatgacggggggacaatccttacggctgacggacgccgcgatttcggcagatgcatttgcactgagacccatggtggccgctaaggccgcacagagtttcagaaagcttcgccggtcaataccctcagaagtgatatcagaagtaataaaggtattatcttcgatcattctctatattccgttgtgttaatttaatattaatataatccggttattattaaattactgagacacggaacataatcaataaacaaaaaaataaaatctgaaatattattttacagataatgagaattttttctatttttaacatttaatctatttatcggctttattaatttatatcaatttaatatatagcgcaccggctacccgcaatgagaatgccggaacttttcactaccgacaggaaaacgggcagcatttaccgtctaaatttcaccggttacgcagataccccgccgggcgttttcagaattaactgaatccggcggaataatgagattcacatagccgcagccatttaaaataaaaatgaaatacattctcatccggtgtcatttaatcggttaagctcaaataaatgctatttaaaataaaagcacaccgctatttatcactaaaaagtcaattcccataatattaaaaattatttattttgatttaaatcaatttatattaaatattttattttccttccgggataaatcaaatccaattaatcagccattatcaccacaaaaaagagtaaaaatagtgaataacaccagaaaatgcataataagacgattatccttgtaaaacggtcagctatttatacgtaggaggacaatttatattctgtttattattggttctaatagtgatgatcacctgaaaaaatcatttcatgttcatccttcctgctcttttttgtgtaaaaaagcagcatcgcagacattcttaaatttcccgaaatcccctgcattgactcatcttatctaaaattctaggatcacagtattctctttccgccccccacagaaaaatatatttcttttatttattaaataaataacacgaattttgacgtgttgttaaacaccactacgggcaaaaaaatgaaactcaataaactttcctttctgatactttccgcaatggggatgacgtacgcctctgccggttatgctgtaacgcctgagccgattcccgcatttgacttcagcgatgaatcaaaacgtattgatgatattaaaaacggcggcagctataccaatgctgatgctgatgcactgacaaatgtcagtgcgggaaccgggttcactgttgaaggttataaatacctgaccggcattgacatcgattactctgcagccaaaaaaccggatgtcagatttaagaatgacacccacctgatcggtacgaccatcggtcattccacgacccacctgggcgattcattcagagcaaccccttttgataacagcagcgttatcggtattacactgaaaggcattgacgcaaaacacgtcgctaacctgcaaatgtataacggcactacatcctataacacgactgtggatgccttcggtgtgatggagttgcgtaccgcatctgacaccaaacagcgggtatcggcttataatacccatgtaaataaagacggtaagctgactgtcggctataacgcttatgctgaaaatagcctgatagatggcggtgaactgtatatccctgtcagtaacccggatgcagaaacccaaaatacccttattcagaatggcggtacctatacacaggatagcggaacagccagcaataactatattaccggtgcaggaagctatcacgcagtttccggactggcgctgaataactatatctatgatggcggttatcagtcggtttatgttaatgaccgtaccggcgccaaaaataccacaatctatgcgggcggcacacagcgggtacgctcagggacggttgaggataccgtggtatatggtcagcagctggtgacaaaccatgacggtgactggaaaaacggccagtgggttgagaacagcaatcctgatgcaaaatggggtaatgatccgacagccattaatacacaggtcatggcaggcggtatccagaatgtcgggctgaacggtaaagcctccgataccactatttataaaggcggccttcagcttgtcggcaaatatgcggaagcggccaccaccctggttgacggcgggatccagcatgtcctggcttacggcggtacagaaagaaccaccatccgcaacggcgggcagaccatcctcgattacggtgcttactccttttataacctggatgtggaagatggttctctggtgatggaaggcggcgatcagcatccgtggctcagcaacttcggcaaaggctcgtatgcgcagaatgtaaacctggccggtgataatgcgtatctctatatccgccataacggcgatacaagtgaatctgttgtcactatcgataaactggtcaacaacggtgtcaccgtcttcggtgaaccgggcagcagtaataccggacgtaacagtcagctcaacatcaaagaactcaccggtaacggcctgtttgtgatgaataccagcctcgcggacggcagcggggatttcctcagtatctcggataatacagacggtaagtttggtgtccgtgttatggattccggtaaagcgctggtcagtaataccaccgacccggatcgctatcatctgatccacgccgccggcagtcagagcgatacttttaccatgaccaacaagagtgtcgatctcggggcgtataaatattatctgacacaggataaagattcagcggatgaatggtatctgtcccccaccaaagaaactgcgccggtagatccggttgacccggttgatcctgttgaccctgtagatccggaactgcctgatctctcagagccaagtaaaaccgcaatgatgattgccaacgccctgccgcaaatctggcggagcgaactgagcacattgcgcgcccgtctcggcgagctgcgcaataatccgcaggtgaacctcggtgtctggtcaaaagtgaccggcggacgccacaatatcagtaataatgaagtcgcctaccgtcatgatatcagcgggattgttgccggtggtgacaaaatgacagagctggagaacggctatctctggagcggcgttgtcgccggatattctcactcctccctgaaaatggataaaaacgacggtaccattaacagttacagcctcggcgtttacaccacctggcagcataaatccggtatttatgtggacggcgtggtgaaagccaaccatttccgcagtgactatgacgccagctttaatgaaggaaaaacctccgccaatagtaacaccagcggtatcggcttctctgttgaaaccggtaagtacttcgaaaaagagaattactttatcgaaccgtatgccatggtagccgccttccgcggccagggcgcggattaccgctacagtaatgagatgagcatcaaagccgatgctgcccgctcattcagcggcgagctgggtgccaccttcgggaaaaattttgtgctggaaaacggcacacaaatcaaaccgtatatccgcgtggccgtgaaccatgaattcctgaaaaacggcgatgtggaactgaataaacaagggaaacggaccaatgatatgtccggcaccaccgggaaatacggcattggtgtggatgcaaaactgaatgataactgggccatctacggcgaattcaactacgccaacggcagtaaacaggaaacgccgtacagcggcttcctgggtgtgaattaccggttctgattgtctgtaaagcaaaatggcctgcgcatgcaggccatttttttatctgttattaactgatcagaccgtgtaccagaatcacaccgatacagatcggtcccacataacgccagaccagcaataaactctgacgtttcagtccggtgatattttccggaatcagcgcattcgctttacgcgaccagccgaaaatcaggcagacagcaataccgaacagcggcatcagaatattggatgtcaggtaatcgaggatatcaaaaatcgttttcccgccgagcgtcacatcacttaacggcccgaaagataatgacaccgggatccccatcagcataatcgatgccgtcaccaccaggcccgctctgcggcgagtccactgaaaacgcatctgaacatacgccacaatgtgttccagcagtgagatagcggatgtcagcgccgccatcagcaacaggacaaagaacgtcactgccagcacagatccgcccggcagatgggcaaagtacaccggcatggtcataaaagtcagacccggaccggcattcgcttccagaccggccgccgctaatgcagggaaaatcatcaggccggccagcacacacaccatgcacgagaggatcaccacccacatactggagttggcaatgcttttgttatcagacaaatacgcgctgtatgtaatgtggatccccagaccgatagagagggagaagaaagccagccccagcgcatccagcacgcctttgccggtcagtttgctgaaatccggatacaggaataatttcaatccggcggatgaaccgggtaagctaatcccgacgataatcagcacgatcataataataaacagtaacggcatcatcactttcacggatttttccagcccgcgctgtaccccggccagtaccacaaagcaggtcatccccgcaaacaccagatgagcaatcaccggccaccacgggttactgataaagcgggtgaaaatgccggtcagctggctgctgtcagtaatgttcagctcaccggcggcggccattacggtgtaaccgatagtccagccgccgaccacgctgtagaagctgtaaatacaccaggagctgaatacaccaatcaccccgatccacgcccagtggcgtcccatcatttttttaaaggcgttgacggcttcactgcgggtgctgctgccgaggatattttcagccagtaataccgcgagaccgataacaaagctgaataagaggaaaacaaccaggaaggcaccaccgccgttattggcggcaacatacgagaatttccagatggcaccgatgccgatggcagacccggcagcggctaagatatgaccaaaacgggatgtccattgctgactcatacggcctcctgctgtgtcatctgagagacagaagcggcggcagaacaacagaccgatcgtgaaactgcgctgataataatccttgcggtaaaacctgacatcataggaactctcccgaaaaaaacagttccaccagcaggtttacacgcacaaaaaagccaccttactggtggctcatgaagaaaaacagataaacgaagccacctaactgagtagtaggtttaggcttagctgacgacggttcatcatgcggttcatcggtttactcttctctgaaaatcattaatttttgcttcacaggcagtgccgttatatgacactgccgtgacgctctttttctcttataccacaaacagaaaagaaaaaaacacccttttttattctgcactcatggttttaagcatttttgcaaacgcatcgatatgatgacgctgcgttaccgggttcataaagaccgccttttcccccggaatatacgcgaaccggttatgctccgcataggccgaacaggcgatagaatccacccagttggtaaacagtcctgctttaccgcgtttcaggaacagctcacgatgccagcgactgttgcgcaccatcatgtcataggccgttttatctccggcacaggtcagttcgtgcgcaaacattgcctgcggatcattcaccagtttcggtgaatagaggcggaaaccgacactcggcccctggttttccggcaccatcacacaggcattgcccatggataacagctggttgcgcatgtagttcgcattttgcagacagtgcgcaatgatggtctgataaccctcaacccccaggtaatgcaatccggcatacgcgccgaacacaccgacaccgctgcggctgcactcaatggtggattgcaggtgagtctgtccttccagcgcatgctcaaaataggtgaagttttccgggtcattttccagtgctttgaaatcatcaccgtcacgcaccatcaccaggctggaggtatacggcacataaccccatttgtggaagtcgatagtgatggaatcggcatatttcagctgtttaaatttctcaacattgtgacgcagaccagccagggtggcatcgttaatcgccagcgggttggtgttaaaatcataatcaataaagaaaataatcggccagccgaccgccgcatccacgtgaatatgcggtttttctgtaatttcgaactcttcacacaggcggttacgcagatcataaacctgtttgatttcatcgacaccaaaggtatcggttgttcccgcggtcagcaggatcaccgggatcttacagtggacggtatagcaggcacggatttgctgctccagatccgccaggtcaatggtgttatctgacgccacccggatacggattgttttattggtgatatccacacctaacagggacaggttagtcatattggagtagtgaccgccctgtgagttgatgatccggaaatcctgatcaacggacatcccgagatgttttgactgtttcagcgatttacggatcccgaacagatagccgtacaggttgcacattgtcccgccctgggtgaacagaccggatgctttgtccgcatcatagccaatcagattggccactttacggataacggttttttccatgttatccgccacaccggagtattcgcagtacaccatgttcgggttacccagtaagcccagcatagagccgtaaactgccgggtctgacggcatggcgataacgttttccacggccagcgggttttcccagtttttgcacagcgcggacgcaaataccagtaaatcatcctgcccttctcccgggcggatcacgctctggcggacatgtgactcaccggccagctgagcaaacagatccttaccctgcggatagcggttgatctgctgcacatccgcgtcggtggtctggcggaactgagtaattgcctgaatttgcgggtgattaaaaatcggccatttgccgggatcccggctgaagaaatcactgatgacgttttggtatttaacttcgaaatctttatttaacgcattcgcggaggcgagcgtgataagttctgactgattcacaatgagctccaaaatagtaaattacgctgaggtaatgtcattactttgcgccaaattcattgcattttaaatgatcagcaaattacaaatcactccataaactacataaataaagtaattatatcaattacatattgtcattttcatcattttatgacttatgatatttttttataaatgccaccacgatcacaattttttactctgcaaaataaacataatttagtttttaaatttacaaataaagcaaaaatgcagttttatattctataaaaacaggcaaatcacaacccattaacaaaggccaaaaagcgaggcattaatattgtttagttttcattactgttttttcgctgttgttattccccttctgctgaaaaaccacagttattttgccggtttttccgttttttgcagtggttattccctccggcaagataaaataccggcggataataaaaatcccctcagcattactaatgaatcccggcagcccgttttccggtggcggcagcaaatacacgaataacagtatgattttaaatcataattcaattttcatcgtatttaccggtgataatacaaccaattgttgtatttttgtaacgagcggatttccccggaatccttaaattccgttaagactgcggcccggcgataagctttttttaatttttatctttattctgccgttaaaatgggtgaattgtttcactgtgtaataatttcattcattaaaggcactactatgtccggcctcctgctgttcaaacaactactcaccaaagaatgctgtcccggtatgcactgggactccgcccgtaaccgcttaaaattcgcggcccgcagcctgtttatgccgctgtccaccatgaaatacctgtccggcctgacaaacactgcctgctgtgatgctattctgaaaaagcagccgctgctgccgaccaaattacagcgcccgtatctgagcattaattttcaccgcaaaaataaatcggcggctatctgcgaccattaccggatcaccaaagccgttctgccaccggctgtattcagccgtatctacagcaatgagcagttttatctctgcccggttgaaggaaaagagagcgtctgtcacctctggctggatgtgcaggatgcatttaacaaagagggcgagctgacgctggagatgcgggatgatgccggtgagatcctggcccgcagtgcattcaccctgctgaacctgaatgaaaaacggacactgtttatcggcgcgctccagggcggcgtcagtgagcaggctcaccatgctatccgggcggcgaccaaaaactgtcacggtgtattccccaaacgcattctgacggaagttatctgccttatcgcctcactgtttcagtgtcagcagattattgccaccagtaatgagacccatatttaccgcagccgccgttaccgtcataaaaaactgacgcaatgggtggccgattataattcgttctgggaatctgtcggcggcaccgtcaatccgcagcacgaatatgtaataccgctgaccctgccgcgtaaacccattgatgaaatagccagtaaaaaacgtgccgaataccgccgccgttatcagttactggataatgtggcgcaggccgtctgtgaacgcctgcaactaacgctgccggaaaataaaacagatgttcaacataacgttatttaagaaaaatccttcatttacagcaggtttgaccggtaattgacatttcattacagaacttattgattttccgtaaaatataatctgcaaaaggctgaatttaatcttaatattgtttcagggctgcgggaaaaattcactgtctccgctacccctaatttgctaaagtggccggatttaccagcgtatatatcaggggttccggtcatatccgcagaaatgccccataacatgaaataagcttacttcagatccgggaataattgatggaaacaatgcagcaactttttttcgccctctggcatcaggactatgaaaccctgtcaaacccgtccctgctgtgggcgatttacattatgctgtttgccattctcttcctggaaaacggcctgcttcccgctgcatttttacccggtgacagcctgctgattcttgtcggggtactgatcgccaaagatactctcgatttcccgacaaccctgattgccctcaccgccggtgccagtctcggctgctgggtgggctatttacaggggcgctggctcagtaataccaaaattgtgaaaggctggctgtctcatctgccgccgcattaccatcagcgggcacacagtttattccaccgtcacggccttgcggcgctgttagtcggccgttttctggcgtttgtccgtaccctgctgccgatgctggcggggatcgccggtctgaattcacgccgttttcagttcttcaactggctgagtggcttcctgtgggtcggtattttaacgtctctcggttactgcctcggtatcagcccgattttccgcaaatatgagcatcatctgatgaatattctgatgctgatcccggtggtgctgctggtctttggtttactcgccagcctgtgggtggtgtggaaacgcaagcggacaaaaacatctgacgacactcacgcacaataaattaccagactatttttccggccggtgcaattacagcatccggccgggaaacattatctctctgtccgccgtttcagcgtcatttcctctgaattaccccgccatcacccgcaatgtgcagaacaacaccggaaaataaactataatttacctttaattgcagataaaaagcggttactttgaatctgttacgctataaccaccacgaggagttcctatgtcacatcatacaaatgaagagttacgcgctgaactgaaatcattggctgacaccctggaatctgtgctgaatacggcagaaagcaaatccaaagaagaagtggattcactgaagaaaaaagcacaggccgcgctggaaaattcccgtacccgcctcgcggaagggaaagagcaggttgtgcagcagacaaaagagatcgcaggcaaagccgataattatgtccgcgaaaatccgtggaccggagtcggtatcggtgccgctgtcggtgtgttgttaggttttttactggcccgccgctgagttatgaccgatcaggagcgtccgcaggggcccggcaaagggctccttgatacactgacacgtatcgccgccatcgtcatcagcatggcagaaacccggctcaggcttgttgccactgagctggaggaagagaaatccaatctgatccagctgattctgctggccggtgctgctctgctgctgacggcgttcggactgatgagcctgatgattctggtcatgtgggcggttgatcctgtgtaccgcctgaccgcgatgattatcatgacatccgttctgctcggcggggcactgattttcgccctgtgggccgtccgcaaagcccgccgttcatccctgctgggcgcaacccgcgaacagctggcgatcgaccggcaactgctggaaagaaaaaagcaggagcaggatcatgaataagcatctgcgcgctgaacgcgcccgcaaaaagcaggcgctgattgacactatcgctgcccagcgcagcgatttgtcgcaggccacggatcagtggctcctgaagggtatggcagcatagacaggcagtagtattttttttttctgttatcttcagtcactttaaatgtttgtttttcctgccagtgactctggacttgttgctctatgtcttcgggacgatattgttcttgcatggcaccggtattcctgtggtgatgaactgccggacacggactgacgaccagaccgggcggacagcatgaaaatattgggtttcgttaatttctgacccgttagcatagccgatatgcccctgagggaacaacagttaagggcgtaaagggatgaaaaaagcaggggaatgacaaagagaagaagaaaggccggtctgtgaccggccggtcagaacatcagtgcagaattttggcaagaaaatctttggcacgatcggatttcgggttggcaaagaagtcgtcttttttgctgtcctcgacgatttttccctcatccatgaaaatcacgcggtccgccactttacgggcaaagcccatttcgtgggtgaccaccatcattgtcatgccttcgtgtgccagttcaaccataacgtccagtacttcgttgatcatttccggatcgagggcggatgtcggttcatcaaacagcatggcgacaggatccatacacagggcgcgggcaatagccacacgctgctgctgcccgccggacagctgggacgggaatttatccgcatgagcagacagtccgacacgctccagcagtttcagccctttttcttttgctgccgctttatcgcgccccagcacttttacctgtgccagggtcaggttttccacaatggagaggtgcgggaacagctcaaagtgctggaaaaccatgccgactttggagcgcagtttcgccaggttggtgcgtttgtcattcacctgaatatcattgacgaaaatctcaccctgctgcaccggctcaaggccgttaacggtttttatcagcgtggatttaccggagccggacgggccgcacaccacaaccacttccccttttttgacttcagtcgagcagtcggttaagacacggaactgaccgtaccatttggagatatttttcagggagatcatgacacagtccttctcttgagataattaaccagcattgacgcaccaaagctgataacaaaataaaccgcacccgcaaacagcaccatttcgatttgtgttccgtcacgttcgccgatattgctggcggtgcggaagaaatcggtcaggctgagcacatacaccagcgaggtatcctggaacaggacgattccctgggtcagcagcagcgggatcatcgcgcggaatgcctgcggcagaaccaccagacgcatggtctgcattttggtcataccgagggcgagtgaggcggatgtttgtccccgtgacacactctgaatcccggcgcggataatttcagcataatacgcagcttcaaacagggaaaacgctaccatagctgagatcagacggatatctgtttttggtgatatgccaagaacattttggactaagttaggcacaatcagatagaaccacaacagcaccattaccagcggaacggagcggaaggcgttcacatagagagcagccagccagcttacaatctttatggatgacaggcgcatcatagccagtatcgtgccccacaggatgccgataacaatcgctgtcactgtgattttcgccgtaataaccagcccctgtaacaggaacggcatacccggcatcaccgaactccagtcaaattcgtacatcagtggcctcctgtcccgggcagacgcacccgtttttccagtaaatgcatggccagcataataataacgttgatgccgacataggcgagggtgatcgcagtaaaggactcataggctctggcggagtaatccagtaacttcccggcctgcgcggccatatcgaccagcccgatagtggaggcaatcgcggagtttttcaccagattgagcatttccgatgtcatcggcggaataatcacgcggtaggcattcggcagcagcacataacggtaagtctgcggcagtgtcagtcccatcgccagcccggcggctttctggccgcgcggcagtgactgaatggcggcacgtacctgttcggtcatacgggcggcggtaaacagccccagacagagggtggaggaaataaagaactggatattcgggtcgagatccattttaaaccagtcgcgcagggacgacggcaggaactccgggatcaccagataccaggtgaagaactggacgatcagcggcacattacggaaaatttccacataaatggtgccgagcgaggaaagaaacttattcggcaccgtacggagaataccgaacagggatcccaccagaaaggcgataatccaggcacagattgacagcagcacagtgaccttcaggccggacaggatccagccgaggtaagtggtgttgccgaagggggcgggctgaaaaaagatgccccagtcccagttagctgacatagcgcggctcccggtaaaagaacgaactccctgtataagacggataaccagtggttaccggacagacagtgtgtttgcatgcaacggactgtggtttatcgtccgcgcccgcgtcagttgtgaacgcgggcgcggcgggcttagttatatcctcagtccggacggcgcagccggtcaggctgtcagccgccgtggcggttattcaaaggccttgtcattcggcgctttgaacagccctttcatttcttcggataattcaaagttcaggttgaggttcttaggcggaatcggctgtttgaaccagcgggtataggatttttcagcttcaccggaggtttgcgcatcagaaacggttttatcgatcagcgctttgaactgcggatcatctttgcgcagcatacagccgtaggcttcttcggattgcggcgtgccgacaatcacccagttatccggttttttcgctttggcgcgctcaccggccagcagggcatcatccatcataaaggcgaccgcacggccggactccagggtgcggaaggcatccccgtgatctttggcgctgataatgcgcatcttcatctgcttctcatcattgagtttgttgagcagcatttcagacgtggtaccggatgtgaccaccacgtttttcccggcgagatcggcaaagtctttgatgccggaatctttaccggtcagcagacgggtaccgaccacaaaaatggtgttggagaaggcggcctgttgctggcgggccaggttgttggtggtggagccgcactcgaaatcgaatgtgccgttttgtaacagcgggatacggttctgagaggtcaccgggatcagtttgacctgtaaatccggtttattcagggtctttttcactgcatcaacaatatggttggagtaatcctgggaatagccgaccaccttttgctggttatcataataagagaaaggaacagaggattcgcggtgaccgacaacaatcacgccgctgtcattgatttttttcagtgtaccggtcagctcttcagcagaaaccgccgcactggcaagcgcggctccggtgaccagtacagacaaaactaacttgcgcataaacaactccttttcgggaaacggtataaggacgtgtgttgctcttgtgtttgtattgttaaaaatagaacataattgttaattaatggaggttaatttgttttaaatcgggagatccctctcactctgtcagataaagatgtgcaagttacacccggaacgcgtgttcacattaaattatggtattttgaattggtttggttttatatgctggttatggtgtgtttattaacctgttaatggtgctttttactgcttagtgcggtgcttttatggccgggaagtgctattgtgtcataatccgctgttgtaacaattctgctgtgcggcggtaacatcatattgcggttaaatgtgtaaagttatggttatccggttgtctgaaatcgcaggctgtgtaagataggcggtaactatcggggagcgggctatgctgaagcaacgcaggcagggttatctgctgctgtttttcacattattctttatcctgttgtgtctgacacaacggatgtctggtgcgccgcgcatcagtctgagcccgtctgcggatttcactaccccggtgctgctcagtgatacggaaaccggcagcgccaatcccggtggtacctgtgatatcagcgccaagtcgctgagtaccgtgccgcagttcccggcagaacctctcttttttgcccttcttttcttcgtcatgacctcggtgatagttcctgtccgttaccgttcgcgctcgtggcgtcagcatatcccgccgatgcggctgcgcaggcatctccatttctgtgtgatgagggattagcaaccggcaatctgtgtattgtcgggttttttgcttaattcggagatgaaaaaaattatgcgttctgtattaacagcgtttgtgctgtttttgttcacgctgaccactgtgcatgcggctgataccggctggaccgaaatgccgcataatgatcacgcccgtgtcagagtcacatcagatcagtggaaagacggaaaactgcgtctgctgctggcggttgaattacaacccggctggaaaacctactggcagtcaccgggcgaggggggcgttgcccctgaactgacatggcaggagacctccgctgacacacagtggttctggcccgcacctcagcgttttgacgtcgccgggctctccactcagggctacggcggcagtgtggtgttcccgctggaagtcacggcggctcaggcgctgccggcgctcagcggaacactgaccttatccacatgcagtaatgtctgtatcctgaccgattatccggtgtcactggatacctcagaacccgcgccggaagattttgaccgtcagtatgtgatggcgatgcagcaggtgccgcagaccggcggtgatatcaccatcggcggcagccgggtaaacggcggaacgctgacgatggcactgcaccgcccgggcggctggcaggatccgcagctgttttttaatgcggataaagaaaccatttttgcggcaccgtcatttacgatttccggggataatctcactgcgtccgttaaagtaacggatgactggggggaaatgccgtcagatctgaacggaaaaccgctgtcggtcgttgtgacagacggcccggcagcgcaggcgctcaccacggtgatcggcagcgggccggatattgcggccgaatccggcagtgatacctcctttattatgttgctgctgtttgcattgctgggcgggctgatcctcaacgttatgccgtgtgttctgccggtgctggcgatgaaactcggcgctgtgctgtatgtggaaaaccgtgagcggcggatgatccgcacccagttcctggtctcctcctccggtattatggtctccttctggatcctcgcggcgctggtgtcggtattacgcctgacacaaagtgcggtcggctggggtattcagttccagaacccgtggttcctcggctttatggtggtggtaaccttgctgttcagtgccaatctgttcggtgttttctccatccgcctgagcagtaatgcaaccacaaaactggcgacagcgggcggcaaaggaatgcgcggccactttatggaaggtatgtttgccacgctgctggcaaccccctgtactgcgccgttcctcggcaccgccgttgcgtttgcgctggtggctccgtattcacagctgtggatgatctttaccgcgctggggctgggaatgagtctgccgtggctgctgatcgctgcgtttccgggaattgcccgggcgctgccgaaaccgggccgctggatgaacggtctgcgtctggtgctgggcgccatgatgtttattacggcactgtggctgattagtctgctgatcccgcataccgggccggaaacggctgcggtgatggtgggggtggtgctgctggtacttgcgctgctggctttccgccgtaccggtattaagcggggatctgcggcgctggtggcactgctggtggcaggaggtgtctgggccggtatcaatatgacggatgaccggcagcagagcctggtccgtgatcaggtggactggcagccgctgacggaagaggcggtgaacaccgcgctttctcaggggaaacgggtttttgtggatgtgaccgccgaatggtgcgtgacctgcaaagcaaacaaatacaatgtattattacgcgatgatgttcaggacgcactccgtgaaccggatgttgtcgcactgcgcggggactggaccaaaccgtcaccggatattaatgcgtttttacagaagcgcgggcatctggcagtaccgtttaatcagatttacggccccgctttacctgatggtgaaatcttgtcaccattgctggataaagaaacactcttacatctgttaaatcagtcacaaggaattgaaccatgaaaaaaacactcgcggctttaatgattgctccgcttatctttacagccacagctcatgcggccgcttttaccgctgaccaggaagcgcaggtgcgtgaattggttcgtgacacgctgatcaaaaatccggaaattctggaagaagcgattatggcgcttcagcagaaacagaccgaaaaacagaccgcacagatgaaagatgctgttaaagccaatgctgacgcgctgtttaatgataaatatacgccgcgtatcggttcaaaatcaccgaaactgaccatcgtgtctttcaccgattacaactgcccgtactgcaaacgttttgatccgcagctggaagcgatggtgaaaaaataccctgacgtggcagttgtcttcaaactgctgccgttcaaaggggaaagttccctgaatgccagccgtgccgcactttctgtatgggaaagcaagccggaagcatttgcaccgctgcataaccgactgatgcagaagaaaaccgcactgactcaggatgacatcaacagcgcactgaaaaccgccaaagccggtgatgtgaaagtcactgataacagtatgaataccatgcgtatgaatatgatgctggcagagcagttaggtgttcagggaacccctgcaacgctgattggtgacgtgatgctgccgggtgccgtggatgaagcacaactggatgccatcattaaggaacagctggctaaggttaaataatgcggttactgcgcagatggggaaaggaatttctcctgctgctggtgattttatttattgcgtcacaggcgatggactactggcgcaaaccgcaggcaccggatctaaacacggtgccttcgctgacactgacagacggcacaccggtgtccattgcgcagatgagtgcggaaaaaccgttactggtctacttctgggcatcctggtgcgggatctgcaaactgacctcgccgtcagtcagcgaactgtctgagtctggctacaatgtggtgacggttgctatccgctccggtgaggatgaccggctgggggaagggagggcagcaaaaggttactattttccggtgattaatgatccggatggccgtatctctcagctctggggtgtgaatgtcacgccgacttttgtgatttatcacaaaggggagatagtcagttataccagcggctggaccagtcagttaggtatgatggcgcggctgtggctgggggaataatcagtctgaaatgaaaaatcccgcggtgagtaatcacggcgggatttttttatctgcggaattttttcttatcagcgaaaatgcaaaccgcgttcagtggtttttctgcgttttatcagtgccagaccgaggaagacaacggtggctccccagaccggccaggtccccatacggtaatacggtgtgaaaccggacgcagaggtcacagtggcactcagggtagcctgtgtgaactgtggtaattgcgcggtgacagagccgtccggtgcaataatagcggtaataccgttgttggtggcgcgcagcagcggacgtcccagctccagcgcacgcatccgtgccatctggaaatgctgccacgggccgatggagcggccgaaccaggcatcattggaggcagtcagcagcacaccggttttgtcggtcatattgcggcgcacctgctccccgaggatcacttcatagcaaatctcggcggtcagtgtcattttcccggcggtcagcggcggctggatataacccccgcggctgaaagcggacatcggcaggttaaagaacggcgccagcggacgcagtaaatcttccagcggcacaaactccccgaacggcactaagtgatgtttgtaatagcggtttttatcccggctgtcgtattcactcttattacccagcacaatcagggtgttgtaaacatcatattctttgccgtccgctttcggaactgcatccaccacaccggtgatcagctgtgcgccgctgagtgtcagcaggccgttgagctgatccaggaacgcagactgactggcggcaaaatccggaatagcggattccggccagataatcagggtatcagggcggaagtacgggcggctctctttgaggtagatacccagcgttttatccagcataccctgttcccatttcagggactgggcgatattcccctgtaccagcgcgacctgggtcgggtcgttgttcatctgataccactggtagttgcgggcgagccacggtgcgaacagcagcaccagcgccgggatcagcggacggatacggcgctgtgagagtgaaagggcaatcagcccgcttatcaccatcagcaggaaagtgatggcattcacacccaggactggtgccagtgcacgcatcgggccgtcaatctgggtatagccgaattccagccacgggaagccggtcagtacccagccgcgtaaaaattcagtgagctgccagagtgccggggcggcaatcaccagacgccagacagtggcgtgcgggaagcacttggccagcaggccggcaaacagcatcggatagagcgccagataggcagccagcaggacaacaaggaacaggttggcaatttccggcataccgccgaaatccgcgatactgacatacacccagtttacgccgctgccgaataaacccagcccccaggcgaaaccgatagcacaagcctgtttgccagtccggttgagagtcagcagcagcagggcggccagagcgggcagcgagaaataccagagatcaaaaggcgaaaaggccagcgttccgccggccccgaaaatcagtgccagcagcagacgcggccactggcgtaaaccatgaggtgattttatcatgtcagattatcttcatctaaagacgggattggagcatcgtccggaatcttaacatgtaactggataattttacgactgtcagccatcgcaactttgaactggtagttgtcaatctcaatggtttcaccacgggtcggcagatggccgaaggcctgcatcaccagcccgccgacggtatcgacctcttcatcactgaagcgggtgccgaatgcgtcgttaaaatcttctatctgggtgagggcgcggacagaataggagtgcagactgagctgacggatatccacgtcatcctcatcatcgtactcatcctcaatttcgccgacaattaactccagaatgtcctcgatagtgacaagtccggagaccccgccgaattcatcgatcacaatcgccatatgatagcgctgggagcggaactccttaagcagacggtcaacacgcttactttccggcacaacaaccgcctggcgcagcactttatcaatactgaactcttcggaatcactgcgcataaacggcagcaaatcttttgccatcagcagaccttcaatgtgatctttgtcttcgctgatcaccggaaagcgggagtgggcagagtcaataatgacatccaggcactcgtcgagtgtctgattgcgcttgagagtcacaatttgtgaacgcgggatcatgatatcgcggacacgctgatcagaaatatccatcaccccttcgagcatgtcgcgggtgtcaggatcgatcagtgcattttgttcggaatcacggatgacctcaacgaggtcttcacggcttttgggctcgccgtggaacagttgctggcgcagcagagaaaagaaaccctttttctggttcggtgtatcactacccgatggatggtcgtcgctcatggcggtttttttacattccccgatttaatgaaagatgccgtattatgtagcataaaaacggcatcgctgactacgctttttctgtgatatacggatcagaatagcctaatttttttaagatttccgtttccaggccttccatctcttctgcttcatcgtcttcgatgtggtcataacccagcagatgcaggcagccgtggatgaccatatgtgcccagtgttcttcttcggttttttcctgttcggcggcttcgcgctccaccacctgacggcagataatcaaatccccgagcagcggcagttcaatttccggcggtacttcgaacgggaaggagagcacgttggtcggtttatccatgccgcggtaagtcaggttcagctcgtggctttccgcttcatccaccaggcggatggtaacttcgctctcttcctgaaacataggcagcacgccgtcaatccagcgctgaaactgagcttcagagggcagattgtctgtattttcacaggcgatttgtaaatcaagaaccggattactcatgagattgttcctgctgtgcctgcgcgcgttcggcatcacgctgctgtttcagcatctgtttgcgtttctgttctgcggcttcccacgcttcataggcaataaccacttttgccacgataggatgacgcaccacgtcttcactgtggaagaagttaaagctcagttccggtacatccgccagcacttcaatggcgtgacgcagaccggatttattgccgttcggcaggtcaatctgggtgatatccccggtgataaccgctttggagttaaagccgatacgggtcaggaacattttcatctgttcgatggtggtgttctggctctcatcgagaataataaaggcgtcgttcagggtccggccgcgcatataggccagcggtgcgacttcaatcacgttacgctcaatcagcttttccactttttcaaagccgagcatttcaaacagcgcgtcgtacagcgggcgcagatacggatcgactttctgactgaggtcgccgggcaggaaaccgagtttctcaccagcctcaacggcagggcgggtcagcaggatgcggcggatttcctgacgctccagggcatccacagctgcagcgaccgccagataggttttcccggtcccggcagggccgataccgaaggtgatatcgtggtcgagaatgtgggcgatatactgtgcctggttcggcgtacgtggtttaaccacaccgcgtttggttttgatattgacggatttgccgtagtccggcacatgttcgtcactctgttccagtacacggctctctgccacggccaggtgaacctgctccgggtcgatatcgcggatcacaccgcgtaccggggcggtttccacatagagctggcgcaggatagccgcagcggctttgacgcagtgcggtttgccggtcagccggaagcggttgtcgcggcggctgatttcggtgccgaggcggcgctcaagcagtttgatgttatcatcgaagggaccgcagaggctttgcagacgctgattttcggcgggttcgaggaaaatttcctgtgttgctacctgtgaaggtgatatataggtctctgtcactgaatctctctgtgtattctcacgcgcaggtcattctgcgcgtgatcgttagttagtgtacggatggctgatagatgccgacacccagttcgtcttctttacgggtgcgggcaatcacggattccggggtttcgtgaacgcgcaggttcatctgatcttctgtccggatcacgcggccgcgcagtgagttggtgtagacatcggtaatttcaacatccacaaatttgccgatcatgtccggggtgccctcaaagttcaccacacggttgttttcggtgcgtccggataattccataacgtctttgcgggacgggccttccaccaggattcgctgcgtggtaccgagcatctggcggctgtagctcatcgcctgctggttaatccgctgctgtaacaggtagagacgctgttttttctcttcttcggtcacatcatcaggcagatcagccgccggggtacccggacgcggggagtagatgaaactgaagctcatatcgaaattcacttccgcaatcagctgcatggttttttcgaagtcgtcattggtttctcccgggaagccgacgataaagtcagagctgatcaggatgtccggacgggctttgcgcagtttgcggatgatggatttgtattccagcgcggtatgggcgcgtttcatctgggtcagaatacggtctgagccgctctgtaccggcagatgcaggaagctgaccagctccggggtatcttcatacacggcgataatatcatccgtgaattcaatcggatggctggtggtaaagcggatgcggtcgataccgtcaatcgcggccaccaggcggatcagttcggcaaaactgcagatgctgccgtcaaacgccgggccgcggtaagcattcacgttctgacccagcaggttcacttcacgcacaccctgagcggctaactgtgcgatttcaaacagcacatcatcacacggacggctgacttcctcaccacgggtgtaaggcaccacgcagaaggtgcagtatttattacagccttccatgatagaaacaaaggcggacgggccttcggcgcgcggttccggcaggcggtcaaatttttcgatttccgggaagctgatgtccacaatcgggctgcggtcgcctctgagtttgttgatcatctccggcaggcggtgcagtgtctgcgggccgaagacaatgtccacggccggggcgcggcggcggataaaatccccttcctgggaggccacacagcccccgacaccgataataatgtccggattcacatccttgaggtttttccagcggccgagctggtggaacactttttcctgcgctttttcacggatagaacaggtattaagcaggagaatatcggcttcatcggcattgtctgttaaagtatagccgtgggtgctttccagcaggtcagccattttggatgaatcgtactcattcatctgacagccccaggtttttatgtacagttttttactcgtcgacattttctcaatccgctgttttcagtgaaacaatacccgcaacactgaaaagcattgtgtgtattcaatcaggttttgatgtaaccaatggtcgatattgtagtcatttgacacaccagtgaccagacccggcagcacggatcttcacctttcccggtgaatttacggcaattgaacaaaaaatcaacgtattagaataggtatgtcatggataacccgttaacacattctgaagtcaccgttatcggcggggggatgattggggccgccacagccctgggactggcnaatgattggtgccgccacagccctgggactggctcaggccggttttcgtgtcactgtggctgagttacaggcaccggcaccgttcgatgctcagagccgccctgacgtgcggatttccgccatcagccgcgcgtctgctgagttactggagagcctcggggtatgggagcgtgtccgtgccatgcgttgtgtgccgtaccgcaccctggaaacctatgaggaaccggggtcagaagtgacctttaccgcagagagcctcgggttacctgagctggggtatatggtggaaaacccggtgctgcagcgggcattgtgggagatgatcaccgctcatgagctgatcacctgtctgtgcccggcgcggctgcagagtatgacaaagcaatccggtgaatggttactgacatttgataacggcgacgtaatcagttcccgtctggttatcggcgcggacggcgcaaaatcacaggtcagaacgctggccggtatcggcagccgcggctggcagtatcgtcagtcctgtatgctgatcaccgttgataccggacgtgagcagcaggatatcacctggcagcagtttttcccgtccggtccgcgtgcgtttctgccgctgtttgactcttatgcctcgctggtctggtatgactcaccggcgcggatccgccagctcagtaaactaccgctgccgcaactgcaggcggaaatccgcgcatcattccctgagcgcctcggggacgtcacgccgctggcctgcggctctttcccgctggtgcgacatcatgccgcccgttatgtacaggacggtctggcgctgatcggcgatgcggcgcataccatcaatccgctggccgggcagggagtaaacctcggttaccgtgatgcggataccctgctgaataccctgattgcggcgcgggagtgctgtgaggactggggcagcgaatctgttctcagacgttatgagcgccgccgccgtccggataacctgctgatgcaggccgggatggatgcgttttatctcactttcagtaataccctaccgggattacagccgttgcgtaacctggcactgacggtggcacaacgtgcaacaccgctgaaaaaactggcgctgaaatatgcgctgggggtataacccgttggttttccggccggtcaggtaacagcggacagcgggtaaaagaaacgaaaagcgtaaagcgccatggatggcgcgaatcgagcggacagggatgtgtttacagcgtcttttcgtttttacccgctggcagcagaagcacgaaataacagaataatggttttatccggattcagaaaagcaaaaagcccgtcagagacgggctttcagaatttggctggggtaccaggattcgaannnnnnnnnnnnnnnnnnnnnnnnnnnnnnnnnnnaaagatagtggctgcaaaagatggtggctacgacgggnnnnnnnnnnnnnnnnnnnnnnnnnnnnnnnnnnnnnnnnnnnnnnnnnnnnactgctttaacaaagccgcttttcagaatatggctggggtacctggattcgaaccagggcatgccaggatcaaaacctggtgccttaccgcttggcgataccccacctgaaaaacgaggcttatcatacttcatttttccactcagtggaagatggctggggtaccaggattcgaacctgggaataccaggatcaaaacctggtgccttaccgcttggcgataccccatccggaaatataataaacaacaacgaatgtcacgagaaatggtgcgggaggcgagacttgaactcgcacaccttgcggcgccagaacctaaatctggtgcgtctaccaatttcgccactcccgcaaaaaagatggtggctacgacgggattcgaacctgtgaccccaacattatgagtgttgtgctctaaccaactgagctacgtagccatcttttttttgcgtgaccttcatcggcgttgcggggcgcattatgcggattacagccaaaagcgtcaactgctttttgcagatattttgatgaaatccgtttgtttgcctgcataataatcactttgaagataaacagtacaaaaaacaggataaaatcacggagttgacgcatttatccggtggcggattattccgccatatccggtttattttccagaacatgcagcagcagttcaccgtacagcatcgcccgttttatcagggcaaatgccccgatagcggagttcggcggcagctgtgaaatcaccaccggcagatcctcacggaaatttttcagggactgcgtatttatgcagctttgcagggcagggagcagtacattttcagcggcggttatctcaccggcaatcaccactttttgcgggttaaacaggtttattgtgatggcaatggcttttccgagggaattaccgacctgttttatcacttctgccgcaagagcatccccccggttagcggcacggcagatggcgcggatggagcagttatccggtgtcagttcactctcaaacccctgagccagctggtgttttacccgggtttcaatggcggcatccgacgcgaccgtttccagacagccgaagtttccgcagtggcagcgttcaccgagcggatctatctgaatatggcctatttcgccgagattaccacgccggttcagcaggatctgattgttgataatgatccccgccccggctccccggtgaatacgcaccagcagagaatccgcgcaatcgcgggtggcaccgaaatagtgttcggccagtgcaaggctgcggatatcatgcccggcatagcacggcagtttaaaatggtgatgaagattttcagtcagcggccagtcactgacagcaatgtgcggcatatagcgcacaataccgcgatccggatcgaccagtccgggcagaatcaccgcaatggcgatgagctcgcggatacggcgctggtgcgtttgtctgaagttgtcgatcagcgcaatgagtttagcttccgcatctgcctgagaggtggcttccaggggacaggtctcttcttcgagagcccgtccgctgagatcaaacagtgcgatagtggcatcatggcggccgagacgcacgccgatagtctgaaaggcgcggtgctcggaaataatggagatagcgcggcgtccgccggtggatgcctgctgatccacctcttttatcaggccgcgctcaagaagctgacgggtaattttggtcacgctggcgggtgccagctgactttgttcggcaatctgaatgcgtgaaatcgggccggaacggtctatcaggcggtaaaccaccgccccgttcagctgtttgactaaatcaatattacctatctgcggaattccgttacccatcggcgtcttttactcatgatgtatggaccacattcccgttaacgattgtcatacagacagaaaaatcagcggtgaaggcggtcaggttggcaatactgccggatttaatacttcccagtctgtcctgaacaccaattgcccgtgccggatagagtgtggccatgcgcagggtttcatccagcggaataccgacatgctgaacacagtttgccactgcgcggatcatggtgagtgaggaaccactcagtgtgccgttttcgtccacacataaaccatcacgataatatatcgttttgccggcaaagataaaatgatccagtccgctggttttcggatcaagccccgccggtgcggtggcatcggtgaccaggatcagcttgtcacgcttgagagctttactgttgcggatgttcggccaggaaacatgcaggccgtcagcaataatccctgcgtatatttcagaggtatcataaatcgcgccaatcagtcccggctggcggccggagatgtacggcatggcattaaacaggtgtgtggagagggtaatgccgttttcaaacccggcacgggactcttcatagctcgcattggagtgcccggaggagaccacaattccggcatccgtcagtttgcggataacagagggttccaccatttccggtgccagggtgagtttggttatcacatctgcgttgtcacacaggaaatcaatcatcgcggcatccggcttgcggatatagtccggattgtgcgtgcctttcttcaccgggttgatgtaaggcccttccagatgcagccccagcgcctgatttttatggtttttcagataatcacgcatggtgctgacactcagtttcatcagcgaatcggggcttgtgatcagtgtcggcaggaagctggtgcagccggtgcgctcattggctttctgcataatatccagggtgcggacagtgatatcgtcctcattgtcattaaactgtacgccgccgcagccgttgacctgcaaatcaataaatcccggggagagaatggcaccgcccagatcacgggtgtcaattccgtccggtaactcactgaccggacacacactgtggattaattcgccgtcaataatgaccgcgtggttttccagacgatcgtgaccggtataaataatggcattggttaatgcgtacataacgcctcctgggggagagaatacttatttaaagataagacaacacaacaaaaaccgcccggataaagggcggtcagcatcggttattcagcatcaaattgttcgataatgtcagattcaaggtgacagaaatacttcagggttttcactttcagctcaagtgtggccggttcatcacataccacaatggctttcgggtggatctgcacacaggtaatcgtccacatatgattcaccgagccttcaaccgcctgctgtaccgccattgccttgttatggccggtggcgaggatcagcagttctttggcatccatcagtgtgccgacacccacagtgagcgcatatttcggtactttattgatgtcattatcaaagaaacgggagttggcgatacgggtttccggtgtcagcgttttgacacgggtgcgcgaggtcagggatgagcccggttcgttaaaggcaatgtgaccgtcattaccgacgccgcccataaacagctgcacgccgccgtaagctttcatcttcgcttcatagcgttcacattccgcatcggtatccggggcattaccattgagcaggttgatgttttctgccgggatatcaatgtgattaaagaaattctcatgcataaatgagtgatagctctgcggatgggattccggcaggccgatatactcatccatattaaaagtcaccacatgacggaaactgacttttccggcctgatgcagggcgatcagcgccttgtaggtggccagcggggtgccgccggtcggcagtcccagaacaaacggtcgttctgccgtcgggcggaacgcattgattttgtcagcgatgtactgtgcggaccactgaccgacatcctgcgctttcgcaagagggattaaacgcatatcgattctacctcgttaagttataccgggttatcggcccggtatctgctgtgctgtctcaggaagatccttcctgtctcatctatagcatgaatacccggaatttattagtcacgggagagaatacagccgccggaaaagatattttttatcttaaaataagttttgtgtgactgccagcattttaaccagccggtgacgaatattggtgacaataatcacaaatcacagctatttaatttgcgaagcgaaataaactttttagactgatacgtatagttggcagtaaaataagtgttacgcaatccggtgagtaatcagaccggttgttacaaattcagatgtacacaaaaaggcagccggtcatggctgtgataataatgctgtaaaacaaaaaagccgttcgtcagggcggcaagggggagtgagtgggtatactgaactatctgcagcggattggccgggcactgatggtgcctgtcgccacattgccggctgcggcaattctgatgggggtcggttactggatcgacccgacgggctggggtgcggacaacgtggttgctgcgttcctgattaaatccggtgcggctatcattgacaacatgtcaatgctgtttgctatcggtatcgcttacgggatgtcaaaagacaaagacggtgcggcagcactgaccggttttgtcagctttatggtggtgaccaccctgtgttccaccgcgacagtcggtatgattcaggggatccctccggaagcggttccggcggcgttcggtaagatcaacaaccagtttatcggtattctggtcggtgttatttccgccgaactgtataaccgttacagcggtgttgagctgccgatggcattgtcattcttcagcggccgccgtctggtgcctatcctggcatcattcgtgatgatcctggtggctgcggtgctgatgtatgtctggccggtcatttatgatgcactggtttccttcggtaagagcattaaagacctgggcgcgtggggcgcggggatttacggcttctttaaccgtctattaattcctgtcggtctgcaccacgcactgaactccgtgttctggtttaacgtggcggatatcaacgatattcctaacttcctggccggtcagcaatccattgatgccggtacggcgattccgggtatcaccggccgttatcaggctggtttcttcccgatcatgatgtttggtatcccgggtgccgcgctggcaatttatcactgcgccaaaccggaaaacaaagcaaaagtggccggtattatgatcgccggtgcatttgccgcgttcttcaccggtatcaccgagccgattgaattctcctttatgttcgtggcaccggtgctgtatgtcatccatgccttcctgaccggtatctccctgtttatcgctgcaaccatgcagtggatttccggtttcggcttcagtgcggggctggtggatatggcgttgtcttcacgcaacccgctggcaaccaactggtatatgctgatcctgcagggcctggtcttcttcgcgctgtactatgtggtgttccgctttgttatcaccaaattcaacctgttaaccccgggccgtgaagcggcgatggcaaccaacgataccgttgatggttacagtgagaatgtcagcactgataacaaaaaagatgagaaaaaatccatcagcagcgaagcacgtcagtatatcgcggctatcggcggttcagataacctgaccggtattgatgcctgtatcacccgcctgcgtctgactgttaaagactccgcgcaggtgaatgatgcttatgcgaaacaaatcggtgcttccggcgttatccgtctgaataaagagagtgtgcaggtgattgtcggcacccgtgccgagctgatcgccaacgcaatgcgtgacgtgctgaaagaaggcccggttgcggcagctcaggctgcggcggcggctccggaagcagtgaaagccaaagcacagggcgacggtaacgtggtactgacgctggtggcaccattcgacggtgaagtggttgatttatccgctgtaccggatgaagcatttgccggccgtgttgtcggtgacggtattgccatcaaaccggaaagcgacaccgtatatgccccggcggcaggtactgtggtgaaaattttcgataccaaccatgcattctgcctggaaaccgataatggtgcggaaattattgttcacatgggtattgataccgtgaatctgaacggtaacggctttacccgcctgattgaagaaggcgcacaggttgctgccggtgatgcggtgctgaaactggatctggcgtatctgaacgagcatgccaaatccatgataagcccggtaatcatcagtaatatcgatgattatgatcgcgtggagattgttgccaaaggtctggttaaggcaaacgaatctgagctgtatcatgtcattaaataagtgattgcggttatgataataacgggaggcagctgcttcccgtttttttatctgttttttgcgcgaaggcatctgcccggctgatatttctgtgctcaggtggttgtatatgagcgcatcatatcggatgataagaggttattaacgcgcatattgcattgaggaattatgacaatgaacgaggctgatgcccgcccgacaaactttattcgtcagattattgacgaagacctggcttccggaaaacataccacggttcacacgcgcttcccgcctgagccgaacggttacctgcatattggtcatgcgaaatcaatctgcctgaatttcggcattgcacaagactatcaggggcaatgcaatctgcgttttgatgacaccaacccggttaaagaagacgtggaatacgttaattccattgaaaacgatgtcaaatggctcggttttcagtggagcggcaatgtatgctactcctccgactatttcgacacgctgtacaactacgccgttgagctgatcaacaaaggcctggcgtatgtctgcgaattaagtccggaagagatccgtgaataccgcggcaccttaaaagagccgggccggaacagcccgtaccgcgaccgtactccggaagagaacctcgcgctgtttgaaaaaatgcgtgacggcggctttgaggaaggtaaagcgtgtctgcgtgccaaaatcgatatggcatcctcctttatggtgatgcgtgatccggtcatttaccgtattaagtttgcgactcaccatcagtccggtgacaaatggtgcatctacccgatgtacgatttcacccactgtatttctgatgcgctggaagggatcacccattcactctgtacgctggaattccaggacaaccgccgcctgtatgactgggtgctggataacatcactattgactgccatccgcgtcagtatgagttctcccgcctgaatcttgaatacactgtgatgtccaagcggaagctgaatcagctggtaacagagaaatttgttgaaggctgggatgacccgcgcatgctgaccatttccggtctgcgccgtcgtggttataccgctgcctctatccgcgagttctgccgccgtatcggcgtcaccaaacaggataacaacgtcgaaatggcggctctggaatcctgtatccgtgatgacctgaacgaaagcgcaccacgcgccatggcggttatcgacccggtgaaagtcgtgattgaaaacatgccggaaggcgatgtgatggtcaccatgccgaatcatccgaacaaaccggagatgggcagccgcgaagtgccgttcagccgtgaaatctggattgaccgtgcggacttccgtgaagaagcgaacaagcagtacaagcgtctggtgctgaataaagaagtgcgcctgcgtaatgcgtttgtgattaaagctgagcgtgcggaaaaagacagcgaaggcaatatcaccactatctactgcacctatgatccggaaaccctgaataaagatccggctgacggacgtaaagtgaagggcgttatccactgggtcagcgtgaaacacgcagtaccggcggaaatccgtctgtatgaccgtctgttcagtgtaccgaacccgggcgcagaggatgatttcctgtcgacgcttaacccggattctctggtgatccgtcagggttttgtggagccgtctctggttgccgctgacagcagcaaaccgtatcagtttgagcgtgaagggtacttctgtgctgatgccaaattatcctcagcggataaattagtctttaaccggactgtcggcctgcgtgatacctgggcaaaaattgaaagtaaataacagataacacagtgttactgttataaaaaagccgttcacaggaacggcttttttgtgtgcatttgtcctgaaaaacggcaacaaaaaaggcgcaatacgcgcctttcatacaaaatggtcaacggtgagaattattttttctcgtcgtggataccttcatcagaacggcagtcaccatccgcacagtggccgtacaggtacaggctgtggttggtgagtttaataccgtggcgttccgcgatatttttctgacgtgattcaatggattcatcactgaactcaatcactttaccgcaatccaggcagatcaggtgatcgtggtggtgttgctgggtcagttcgaaaacggatttgccgccctcaaagttatgacgggtgacaataccggcgtcatcaaactggttcagaacgcggtagacagttgcgagtccaatctcttcaccgatatcgatcagttttttgtagagatcttccgcactgacgtgatggcactccggatcctgcaacacttccagaatcttcaggcggggaagtgtgactttcagtcctgcatttttcaatgctttattgttatcggtcatgcggatttagtcctatattgtcgctggtgagcgcacactcaggaaaacgctcaacggctgaacacaatgtccggctatcaaaaggtgtcaggtgcgattcgcctgaccgatgccggaccggataaataatatcattacataaataagcagaattatcattcgcaatttaagggaaaaccttaaattgccagaatctcgtcgagactcatttcttcacggatctgctcaacccattttgccacgcgttcgttagtcagctccggctggcgatcttcatcaatagccaggccgataaagtgactgtcgtccgccaggccttttgactcttcaaagtggtagccttctgtcggccagtggcccacaatggtcgcgccgcgcggttcaatgatgtcacggatggtgcccatggcgtcacagaaatactctgcgtaatcctcctggtcaccacaaccgaagatagccacaattttaccgttaaaatcaatttcttccagtgtcgggaagaaatcatcccagtcacactgtgcttcgccgtaataccaggtcgggatacccagcagtaagaaatcaaacccttcgatgtcctctttgctgcacttggcaacatcccggacttcagcaacgtcatcgccgagtaatttctgaatcattttagcgatattttctgtgttaccggtgtcactaccaaaaaatatacctgcgattgccataaataagcctctcaaccgaaaatctctgtgcctgcaaaaggacgccgcagcgacaacaagcagaaattataactatttcatcttaataaatactattctgacgaaaacagtatttgaagtctgtcaaatttgtgtggtgtgtcgtctcacaatttggtgcataaatctgaacgctgaaggtaatcaagcagaatttgctcgataagctcgccccggttcacgttttcttcgtatgccagctggttcagggcatcgacaatatccgcattcagtttgagctcaacgcggcgtaatccgttaactttgtcacgccgcagctgattgcgtttgttaatccgcaactgctcatcacgggagagcgggtttgttttcggtcgtccgggccggcgttcgtcagcgaacaaatccagcgtggtacgatccgtttgttctttggccataattttactacgaaaaggcggattacaatgataaacgcgcaatgatacaccgccatcccgcttaccgccaccgcttcgcggcctgttaccgcggattttgtgcggattgattaacatcccgccgtctgcccgcctgtgcggcagctctgcaggatgggtgacaggccacatcaatggattcggtgttgcaattatcgttatgaatatattagaaaaaaaagagtattcagatcaggataacggagtgtttttgcgggcaggcattacgtagtatgtattttcagcaagggaataacagaggacgcgcacatggatcgtatctcagaatctgcggaattatcgcggatattgcacaaaaagtatcaatacggccacaaagtaaagcagatgctgacggtgtttatccgtccgcttcagtatttgtgtctgattctatccggctgctgcctgctggatatctgttttgatctgccggggcaggatgtcagacagcaggtgcgttctgttgtggcctggtggcaggagagtgatactgacagcctgatactgagtttccgtcagtgaaaaaacgccgccgtgatggcggcactgttgtcaggctttatccaggaagcggctgatggcgcgcagaaccgcgtctggtttttcagcgtgtacccagtggccgcatccggcaatcacatgcgcggttgcctgcgggaactgcgccataatagcgtcgcggtattccggtttcacatacgatgaattaccgcccgggataagcagcagcggaacctgttgcggtggcaaagtttcccagccgatgatggattcatactgtgctttgataaccggcagattgaatttccattctccctgcttaaaggatttcagcaggaacggaataacaccatcctcacggattcgccgcgccataattgcggtggcctcagtgcgtgtggtgacgccggcggcagtaacatcttccagtgccgcgataatctcatcatgacggcgtacgccataagcgacgggagccatatcaataacgatcagcttttcagtgacatccggtgccagtgctgccagcgccatggcgatttttccgcccatggaatggccaatcacaatcactctttcgaaatgcagggagcggataagatcaagcacatcctgcgccatctcccggtaagtcatggtttgtgcgcgcggtgaatcaccgtggttacggacatcaatctgtaccacagtgtgcgttttccgcagttcacggccaagcaccccgaggttatgcagatctccgaacaaaccgtggatcagaacaatgggtgtggtgtgatgtgatatttcaggtgtgaatatttcatgatgaagtaatgcaggtaatttcatattaacaaccgatccgcagagcaaaacaggcggatatgatgacacggcagccgccggaaaccaacatgttaagtaaatgtttctgtgattgattgtgtgcccggaaacgataacttactgatttattttttaaatgccggacggggcaaactgcgggggtttttagtttaagttattgaaattttacttgttttgttttgcatttttctatcttataataacgtgtttcgcgttaacgaataaaagaaccgggtagaaatgaaaacaatcgatgtagatgaagaactttacagttatattgccagccacacacagcacattggtgaaagcgcatcggaaattttacgccgtatgctcaatttagggccgcaggcaccgggtgccacctgcgcacctgctgtaactgacagcgcggataacaaaatgccgccggttaccccgcgtccggtcaaaaccatgtctcaggatccggtccgcgtcatgcgcgaactgctgctgtccgacagctatgcagagaaaaagaaaacgatcgatcgttttatgctggtgttatccgcactgtataatattgatccgcaagggttcagcaaaagcaccgatgaactccacggccgcacccgcgtctatttcgccggtgatgagcacacgctgctggccagcggtaaaaccagcaagccgcgccacattccgggcacgccgttctgggttatcaccaacaccaatactcagcgcaaacagagcatggtagaacagattatgcagggaatgggcttcccggcaaatactgtcgagaaagtctgcaataccctgtaaggggtatttatctgccggtgacggcgtaatcaggggagaatgacacagtggctcatacgcacccgcgggctggtcagcctgcgcaacaatccgatttaatcaatgtggcgcagctaacctctcagtattatacccttgcacctgatgcggcggatccggcacagcaggtcaaattcgggacttccggccaccgcggcagtgcggcgcgtggcagtttcaacgaagcacatattctggcggtcactcaggcaatcgccgaaatccgtcagcagcagggcattaccgggccgtgctatgtgggtaaagatactcacgccctctctgaagcggcatttcagacggtgttatccgtactggcagcaaatggtgtccgcgttattattcaggaaaataatggtttcaccccgacaccggcggtgtctcatgccatcctgacttacaaccgcgaccatgctgataaagcagacggcattgtgatcaccccgtcgcacaacccgccggaagatggcggcatcaaatataacccgccgaccggcggcccggcagacactgaccttacctctgttatcgaaaagcgtgccaatgtactgctggccggtaatatggcgcaggtgaaacagataccggtgtgtgatgccctgcgcagcccgctggtcagcgcggtgaacctgattgagccttacgtcagttcgctcagtgacgtgatcaacatggatgctatccgtaacgcgaaactcaaaatcggcgtggatccgctgggcggtgccgggattgagtactggaaacgcatccgtgatttttatgatctggatattgagctggtcaatgagcaggtggatcagacattccgctttatgccgctggatcacgacggggttatccgtatggattgctcctcaaaatgggcgatggcggggctgctcagcatgcgtgaccgcttctcgctggccttcgccaatgacccggattacgatcgccacgggattgtgacgccgaaagggctgatgaatccgaaccattatctggcggtggcgattaactatttatttcagcaccgtccggactggccggcctctgtcggtgtcggcaaaaccctggtatccagcgcgatgattgatcgcgtggttgcggatttacagcgtgatctggtggaagtcccggtcgggttcaagtggtttgtggacgggctgtataacggcacactgggcttcggcggcgaagagagtgccggcgcttctttcctgcgctttgacggtacaccgtggtcaaccgataaagacggtattatcctctgcctgctggccgccgaattgactgccgtgaccggcaaaaacccgcagcagcattatgatgagctggcggaaaaattcggttcgccatgctacagccggatccaggcagcggccagtcatgcggagaaatcccggctgtcaaaactgtctccggaaatggttaccgcagataccctggccggtgatccgatcaccgcccgcctgacagccgccccgggtaacggtgcgtcgatcggcggcctgaaaatcatgagtgagcaggggtggtttgccgcgcgtccttccggtacggaagatgcctataaaatctactgtgaaagtttccggggtccggaacatctggcacagatagaaaaagaagcaattgaaatagtcaaccaggtgattgcggactgacgcattccccggaaaagcagcgcggagcggatcttcccctccgcgttttttttgcctgtctcagcccaaagcaaccatcagtgcaccaacggtgatcagcgcaacgccaccggccgcaatcatagaaattttttcaccgaacaggatcacggcaaaaatcacagcaaaaaccacactcagtttatcaatcggggcaacctgtgaaacctgaccgttttttattgccataaaatagaacagccaggaaagtgctccggcaatcccgctcagagcgataaaaaacagggctttacggttttcgattatctcactgataagattaagttttccctgaaccaccaccacaccgaccagaaacagcgccataatcactgcacggatcgcggttgcggtattggcatccagatgctgcagccccattttcccgaagacagcaaccattgcggcgctgatagcagacagcagggcatagatcagccaggtactcataataaataattcccattatcaattagtgatgtgaatatcataaggtattttcattagcgtggtagcttaattttgaataataaaattgttaataaaatgataaaaaataacaattatgtaatttaattacttaaaaggggcattttgtgcgtatcatacaggcatcaagtggtcagatgagtggtaaagtttcaccagttgggttaatatgaaagcgaaatacattcggtgattattgctgttctgcgataatccgttattaaggagggtctcaatgtcaacatttcaggcatatccgttgcataaggttctcttgcgccgtaccggtgcagtatctttaggtatcctggcgttcccgtttatgctgttctaccgggatcgcgcccgcttctggagctatctgtaccgcgtgtggtccaagacaagtgataaaccggtctggctggcacgttcagaaaatgcggtaagcagtacccagcagcactgataccggcatccggaaagcaaaagagacgcccggcgatattatcgcggggcgtttttttatgtctgcaaattgctattggcgggcagggaagggatggtaaatctatccgcacggacaggaaaaatgtatgaatcatattgaattagaacagattattaatgaaaagctggcagtacaggattttcaggattatgccccgaacggtctgcaggttgaaggacgtgaacaggttcagcgcgtggtgaccggcgtgaccgcctgtcaggcattgctggatgaagcggtgagactgaatgcggacgcggtgctggtgcatcacggctatttctggaaaaacgagccggtcagtatccggggcatgaagcagcgccggatcaaaacactgctgtgtaacgatatgaatttatacggttatcatctgccgctggatgcccatccggaactgggaaataacgcgaaactggcgcaactgatgggagtcacagtcaccgggcaggttgatccgctgcttccgtgcggtgagttcgcgcaaccggtcagcggcgaggaactggcgcagcgtttacagcaggggctggatagggagattctgcattgcggggataacgcgcctgcacagattaaaaaactgggctggtgtaccggtggtggtcagagttttattcaggcagccgcagatgcggggcttgacggctttgtgaccggcgaggtatcagagcagacaatccatattgcccgtgaatgcgggatgcacttctttgccgccggtcaccatgccactgagcgcggcgggatccgtgctctgggtgaatggctgcagaaaacgcacggactggatgtgatttttgtggatattccgaaccctgcataacgggtaacaggaaaagccggtcttctgaccggctttttattatacggtttgcgtgctttgcacagccttgcgcggtgcacagagcagtgttcccgcagcacagacacacagtgacataccgaggttctggctcagcccggccagtgccagtccgccgccaatcagcaggtaatacatcagaccgagcagcgcaccggcagtgccgaggcggtcacggtaatcctgtaacacaccggccagaatattcggaatggcgagcccgtaacaaatcacgataccggtcaccggcagcacaaataaaatcgatcctgacaacagccaggccgcagcagcgctgaccataccggttacggcagcaaggcggatcagtgaatgactgtgccatccgcgtttaagcaggacacggttgattacagagcctgcggccacaccaagtgcgagcagtaacccgctgtaaccgaattcctgttgtgtaaagcccagcccgctgaaataaaacggtgctaactggtagtagctgaacaggctgatattcagaaaggcaatcagcagcacattgcgcagaataaagcggtcacacagcatacgaccggctgtttccggcagcgaaactgacgtgatatgtgccggacgtgtttccggtaaccggaacgccgtccataccagcagaacaaccgccagtaccgcaagtccggtaaagactccctgatatccggcgaaaccggtcagtaccgcgccgctgaacatccccagtgccgggctgacagccagtgctatccccatgacagagaacacttttgccagctcatccccgcggtaacagtcacgtatgatggtttgtgtgccgactgagccgaccgccgccccgaaggcagacagcatccgcaggatcagtaatacgctgaaatcctgtgtgataactgcaccgcaggaggcggcagcgtaaagtatcagaccactcagcatggtgcgtctgcgcccggcgatatcacataaacgtccccaggtgaccacgccgagtgcgaaggcgaaaaagtacagggacagagtctgtcctgcctgtgccgcactgacgccgaatccctgtgcgatatccgtcagcgccgggctgtagatggtttccgctatctgcgggaacatcatcagggcaacggcaagtgttaatgcgggtttttgtattgtcattttgtcccccttttttgtaactgaaatgaacggggggcagattagcaaaaggcgggatgccttattataataataaggacattctgtttatcaaaagggacaacatggcgtggctgaagcaaagtgatgcatttgatgcggaccgctattccgcaccactgattggcattgccgcagaaatggcggcacagcatgattccggttttcaccgccatcagcgcggacaattgctgtttactgaacggggagcgattcagatcaccctgacggacactctctctgttctgccgccgacgcgggtggcgtggatcccgccgcagatgctgcaccgcgcgcagatgtttgaggctgtcggttaccgctcactgtatccggatgcacaactcagcgcctgtctgccgtcaacctgtgaaattttcggcgtatcgccgctgctgcgtgagatcctgtttctctttgccggactgccgtttgacagtgactggacacagccccgtctacagcatctgctgccggtatttctggatgagctggcgctggccgggcgggaagatatgcagttaccgctgccgtcggaccggcggctgaaaaccctggatacccggatactgccgccgccgcttaatgagctggcatcccgctgcggtgcaggggaaaagacgatcaccagggttttccggcgggaaaccggtatgagctaccagcagtggcggcagcaggggcgattaataaaatctgttgaacttttggcgaaaaaataccgcagcagtgatattgcacaggcgctcggatttgccagtgacagtgcgtttgtctctttcttccgtaagatgaccggaaaaccccccggtgaatatatgggtaaatgaatagccgggagttaaaaatgcataaaaaaaccctccggagagggttttataaggattaatacggtattgtcacgatgaacagcgtttggtgactttggtttcaaacggacgctcagtgtaaccggtataaagctgacgcggacgagcgattttgaggccgtcgtcgtgcatttcgctccagtgggcgatccagccgatggtgcggccgatagcaaagatcaccgtgaacatatttgacggaatacccagcgctttcaggatgataccggagtagaaatccacgttcggatagagtttcttctcgataaagtacgggtcgttcagtgcgatacgttccagctccatcgcgacttcgagcaggctgtcattcaggcccagttcgttcagtacttcgtgacaagtttcacgcattactttggcacgcgggtcatgatttttgtacacgcggtggccgaagcccatcagacggaaagagtcatttttatctttcgcgcgctcaataaaggccgggatgtgatcgacggtctggatctcttccagcatacgcaggcaggcttcgttcgcgccgccgtgtgcaggtccccacagggaggcaataccggctgcgatacaggcgaacgggttggcaccggaggaaccggcagtccggacagtggaagtggaggcgttttgttcgtggtctgcgtgcaggatcaggattctgtccatggcacgttccagcaccggattgaccacatactcttcacacggggtggcaaacatcatacgcaggaagttaccggcgtaggaaaggttgttcttcggatagacaaacggctgcccgacagaatatttgtaacacattgccgcgacggtcggcattttggagagcagacggtaggccgcaatttcgcggtggcgcggattgttcacatccagcgagtcatggtagaacgcagccagtgcgccggtcacgccgcagagcacagccatcgggtgagagtcacggcggaacccgttgaataagcgggtgatctgctcgtggatcatggtgtggcgttttacggtttctttaaattcgtcatactctttctgatcaggcgcttcgccgtacagcaggatgtagcacacttccagataatcagatttcatcgccagctcttcaatcgggaagccgcgatgtaacaggataccttcatcaccgtcgatatacgtgatttttgattcacaggacgcagtggaggtgaagccgggatcaaaggtgtagtagccttttccgccgagcgtccggacatcaactacgggctggccgagagtcgggctcaggatatccagctcagtaaccctgacgccgtttagtgtcagctccgcctttgtattagacatgtaggtctccttagcgcatttattatttgtttttcaatcttattgtgataacccctgatgcgttacctgaatggataccgtacctggtgttacgttatccggtacggcgcatgatgggttatcagattgttaatgaaactttgtgttgcgataaaagttatgttgtacagcaagatattgtgcattttttgcaagttacacttttgcataagtttgcacttacgggaagtctttcttgccggtaattgtcgttttaatttttgtatttaaccacataatgtaattcaaatgttgtcagaatgtcacaagtcataataatgggcgtttttattgtgtgaaccgtgatcttattcactgttctggctaaatctgaccaaacattttgtatgggaattgtaatcatattgtgaagtccatatactgcctcaaggtctccggaattccctgaagcaggagcacccagcgtaactgaatcattacttttgtaaaacaatacggatgttgattttacttaaggattgttcttatttccccagcgctgtctgatttccgcccgggtccggaggaaggaaaaataataaagagctgtgtgggcaaaattgtgaaaaaacaacgacctgtcaatttagacttgcagacgatccactttccgatccctgcaatcgcttcaattttacaccgtgtctcaggcgtcattaccttcattgctgtagcgattctgctgtggttattagggttgtcgctgtcctcgccggaagggtttgcgcaggctgctgatatcatgagcggtttcttcgcgaagtttatcctctggggcatcctcactgcattggcttaccacatctgtggtggcattcgtcacatgttaatggatttcggatttgttgatgaaacactggctgccggtatttcatccgcgaagatttccatggttctgactgtgattttagccgtgttggcgggggttctggtatggtgaaaaattcaaaaatcagtgcgaccacgctcggccgtaacggtattcaggattggttaattctgcgtgccagcgccattgtgattacactttatgtactctacctcgtcggttttgtggcttttacctctgacatcacttatgacgtctggtacagcttctttaccgcttcattcactcaggtgttcaccaccctgacactgatcgccattctcgcccatgcctgggtcgggttatggcaggtactgacggattacgtcaagtgcctgagcctgcgcctgctgctgcaatttattatcattattgtgctggcagcctatgtcatttacggttcaatcattgtgtggggtgtctaaatgagcttacctgtcagagagtttgacgcagttgttatcggtgcaggcggcgcaggtatgcgcgcggcacttcagatttctcagtccggcctgtcctgtgccctgttatccaaagtgttcccgacccgctctcatacagtgtccgcccagggcggtattactgtggcgctggggaatacccatccggataactgggaatggcacatgtacgacaccgtaaaagggtcggattacatcggtgaccaggatgctatcgaatacatgtgtaaaaccggcccggaagcggtgctggaactggagcacatggggttaccgttctcccgtctggacgacggcagtatttatcagcgtccgttcggcggacaatccaaagatttcgggggcgagcaggctgcacgtactgccgctgcggctgaccgtaccggtcacgcactgctgcatacgctgtatcagcagaacctgaaaaatcacaccacgattttttccgaatggtatgccctggatctggtgaaaaaccaggacggcgccattatggggaccaccgctatctgtatcgaaaccggtgaagtggtctatttcaaagccaaagccacgattctggcaaccggtggtgcagggcgtatctatcagtccaccactaacgcccatatcaacaccggtgatggtgtcggtatggcggtgcgtgccggtattccgctgcaggatatggaaatgtggcagttccatccgaccgggattgccggtgccggggtactggttactgaaggctgccgtggtgagggcggttatctgctcaataaagacggcgaacgctttatggagcgctacgcaccgaacgccaaagatcttgccgggcgtgacgtggttgcccgttccattatgatcgaaatccgcgaaggccgtggttgtgacggcccgtggggaccacatgccaaactgaaactcgaccatctgggtaaagaagtgctggaatcccgtctgccgggtattctggaactgtcacggacattcgcccacgttgaccctgtcaaagagccgattccggttattccgacctgccactatatgatgggcggcatcccgaccaaagtcaccggtcaggttgtgaccatgaatgagcagggcgaggatgtgctggttccgggtctgtttgcggtcggtgaaattgcctgtgtttctgttcacggtgcaaaccgcctcggcggtaactcactgcttgacctggtggtcttcggccgttccgccggtctgcatctgaaagaatccattctggagcagggcgcaatgcgtgatgccggtgaatcggatatcgatgcggcactggcgcgtctgaaccgctggaataacacccgcagcggtgaggatccggtcgctatccgcaaggccctgcaatcctgtatgcagcacaacttctcggtattccgcgaaggggatgcgatggccaaaggactggaagagctgaaagccattaaagagcgcctgcagtatgcgcgtctggacgatacctcatcagaattcaacacccagcgcatcgagtgtctggagctggataacctgatggaaacggcgtattccactgcaatggccgccaacttccgtactgaaagccgtggtgcgcacagccgctttgactatccggatcgtgatgatgcgaactggctgtgtcattccctgtacctgccgcaatctgaaaccatgacacgccgtgcggtgaacatgcagcctaagctgcgtgacccattcccgccgaagattcgtacttactgatgtgtggtgatgaggcatttgcggagagaatactatgaaagttgaattttcagtttatcgctataacccggatgtggataacgcaccacacatgcagaactatcagctggatgtggaagaaggccgggacatgatggtgctggatgcactgattctgctgaaagagcaggatccgagcctgtcattccgccgctcctgtcgtgaaggggtgtgtggttctgatggtatcaatatgaacggcaaaaacggtctggcctgtatcacaccgttgtcggcgctgatgaaaggcggcaaaaaagtggtgatccgtccgctgccgggcttaccggtggtacgggatctggtggtggatatggggcagttctacgcgcagtatgaaaagatccgcccgtatctgatcaacgacaacaaaaacccgccggcgcgtgagcatttacagtcaccggcgcagcgtgaaaagctcgatggtctgtacgaatgtatcctgtgtgcctgctgctcgacatcctgcccgtccttctggtggaacccggacaaatttatcggcccggccggtttattagccgcgtaccgcttcctgacggacagccgcgataccgagacagaatcccgtcttgacgacatcagtgatgctttcagcgtattccgctgtcacggcatcatgaactgcgtcagtgtatgtccgaaaggactgaatccgacaaaagcaattggtcatattaaatcaatgttactgaaacgcagtgcataattgactttattctgcttaagcgattgataataataagatgcctgcccggcaggcatcttttaccaacccgtaacaataggcataatctatcgcagtaagtgttagaagcggcaataaatgtagttaattgtgattaagatgtgagttttttggttcaaatgtaagtatggttatagacagtacagggatcttcagcaacggttattccgttgctaaaggttcctcagggatacacagaacataagatgcacaagcaccacccgggaatcctttacgcaccgcaatgtatcgcggtattagttatcacggcgaaaactaaacccggcctcattcaggttgcagggcagcggcagacggggaatccgcagaacagagccactctgttttccggacggacacgcagccggtacaccgcagccgggaagacaacggggatgaagctctaagcttaagggatcataatgcagaacggcgcactgaaggactggctggattccagctttctggctggagaaaaccaggcctacatagaagatatctatgaagactatctgaacgatccgtcctccgtcgatggaagttggcgggagattttcgactcactgccgaaagcggacatcacagaacaacctcattcacagacgcgcgactacttccgtcgtctggccaaagattcgacccgctaccacacctccgtcagcgatccggcgatggattccaagcaggtcaaagtcctgcagcttatcaacgcattccgtttccgcggtcatcagaatgccaaccttgacccgctcggcctgtggaaacaggaaccggttccggatctggacccggcgttccacaatctgaccaaagccgattttgatgaaacctttaacgtcggttcttttgccatcggcagcgaaaccatgcggctgagcgagctgtttgacgcattaaaacgcatttactgcggctccatcggcgccgagtatatgcatatcaccaataccgaagagaaacgctggctccagcaacgtctggaatccgttgacgtcagtaagctgttcagtgctgatgaaaaacggcgtttcctggcggatctgaccgcagccgaagggctggagcgctatctcggggcgaaattcccgggtgcaaaacgcttctcactggaagggggcgattccctcattccgatgctgaaagatctgatccgtcatgccggtaagcaggacacccgcgaagtggtgctgggtatggcacaccgcggtcgtctgaacgttctggttaacctgttcggtaaaaaaccggcggatctgtttgatgagtttgccggtaaacacaaagatcatctgggtaccggtgacgtgaaataccatcagggtttctcgtctgatttcgtgacagaaggggctcaggtgcatctggcactcgcctttaacccgtctcaccttgagattgtcagcccggtggtcatcggctctgtccgcgcccgccgcgaccgtctgccggaaagtctgagcaaaatggttctgccgatcaccattcacggtgactcagcggtaaccggccaggggattgtccaggaaaccctgaacatgtcacaggcacggggctatgaagtgggcgggactgtccgcattgttatcaataaccagattggtttcaccacctccaacccgaaagatacccggtcaacggaatactgtactgacatcatgaagatggtacaggctcctattttccacgtgaatgctgatgatccggaagcggtggcctttgtgacccgcctggctctggatttccgtaacacctttaaccgcgatgtgatgatcgacctggtctgctaccgccgtcacggccataacgaggcggatgagccgagtgcaacccagccgatgatgtaccagaaaatcaaacagcacccgacaccgcgtaaaatctacggcgacaaactgattgccgaaggtgtggtcgccgccggtgatgtgactgaaatggtcaatatgtaccgtgatgcgatggatcgcggtgactgtgtggtggaagagtggcgtgaaatcggtaaagccgcgctcacctgggaaccgtacctgaatcacaactggaatgacagctacgccaataaagtggaactgaaacgcctcggtgatctggcgcgccgtatcagtaccgtgccggaagaagtgcatatgcacccgcgtgtcgaaaaaatctataccgaccgtgcggaaatggcggaaggtaacaaactgctcgactggggggcggcggagaatctggcctacgcaacactggtggatgaaggtgttccggtgcgtctgtccggtgaggatgcgggacgtggtacgttcttccatcgtcacgcggttatccataaccagagcaacggctcctgctatgtgccgctgatgaatgtccataacgcccaggggcgcttcaatgtatgggattctgtcctgtctgaggaagcggtactggcctttgaatacggctatgcaactacggatccgcgtggtctgactatctgggaagcgcagttcggtgactttgccaacgtggcacaggtggtgattgaccagttcatcagctccggcgaacagaagtggggccggatgtgcggactggtgatgttactgccgcacggctacgaaggccaggggccggagcactccagtgcccgtctggaacgttacctccagctttgcgcggaacagaacatgcaggtctgtgttccgtcaaccccggcacaggtttaccatatgttgcgccgtcaggcactgcgcggtatgcgccgtccgctgattgtcatgtcaccgaaatcactgctgcgtcacccgctggcggtctcttctctggaagaactggccgaaggccgctttgaagcagttatcggcgaagctgatgatctgaatccggcagatgtgaagcgcgttgtgctgtgttccggtaaggtttactacgatttactggagcagcgccgtaagaataatcagacggatgtggcgattatccgtattgaacagctctatccgttcccgcatgaagatatccatgcgattctcgcaccattcagccatgtgaaagattttgtctggtgccaggaagagccgctcaaccagggcgcgtggtactgctgccagcataatttccgtgatgcggttccggcaggtgcggcactgcgttatgcgggccgtccggcatccgcctctccggccgtgggttatacgtctgttcaccagcagcaacaacaagagctggttaatgatgcactgaacgttgaataaattaaggaaaagcaatgagtagcatagaaattctggttcctgatctccccgagtctgttgccgatgccaccgtggcaacctggcacaaaaaaccgggtgacagcgtcgaacgtgatgaagtgctggtggaaattgaaacagacaaagtcgtgctggaagttcctgccagtgattccggtgttctggaagcggtgctggaagaagaaggggcaaccgtcctctccagacaactgctcggacgcatccgtctgggcgacagcaccggtctgcctgcagaaataaaagaaaaagtacagtccacaccggcacagcgtcagaacgccggtctggatgaagaaaccaatgatgcggtaagccctgctgtgcgccgcctgctcgcagagcacggcctgaaagcggcagatattaccggcagtggtgtcggtggtcgtctgacccgtgaagatgttgagaaatatctgtctcagcagccgaaagtgccggcaaaagctgccgctgagccggtttctcaggccggtttaccgcaccgcagtgaaaaacgcgtgccgatgacccgtctgcgcaagcgtgtggcagagcgtctgctggaagcgaaaaacaacaccgcaatgctgaccacctttaacgaggtgagcatgaagccggtgatggatatgcgcaaacagtacggcgaatcttttgaaaaacgccacggtgtgcgcctcggtttcatgtctttctatgtgaaagcggtggttgaggcactgaaacgttatccggaagtgaacgcctctatcgacgggactgatgtggtgtatcacaactatttcgatatcagtattgcggtctccacgccgcgcggtctggtgaccccggtcctgcgtgatgcggatgcgctgagcatggctgaaatcgaaaaacgcattaaagagctggctgtcaaaggtcaggaaggcaaactgacagtggaagacctgaccggcggtaactttaccattaccaatggcggggtattcggttcgctgatgtccacacctatcattaacccgccgcagagtgcgattctggggatgcatgctatcaaagatcgtccgatggcggtaaatggtcaggtagtgatcctgccgatgatgtacctggcgctctcttatgaccaccgtctgattgatggccgtgaatctgtcgggttcctcgtgaccattaaagagatgttagaagatccggcacgtttactgctcgacgtgtaatcaaccctcatccgggcggcatcgcgctaaaaccgcccggctgaactcgcgacagtgaatctgtgtccctgcgccgggaaaccggcgctatccaggcaacaacaataagagagtccgctctcatcagacaaattatggatagaacatcatgaatttacacgagtatcaggcaaaacaactcttcacccggtatggtttacctgcaccggcaggctatgcctgctccacaccccgtgaagcggaagaagcagcatccaaaatcggcagcggcccgtgggtcgtgaaatgtcaggttcatgccgggggccgcgggaaagcgggcggtgtgaaactggttaagagcaaagacgaaattcgcgcgtttgccgaacagtggttaggcaagcgtctggtaacctatcagacagatgcactgggtcagcctgtgcatcaggtgctggtggaaggcgcaacagatatcgccaaagagctttatctgggtgccgtggtggatcgcggctcacgccgcgtggtctttatggcctccactgaaggtggtgtcgaaattgagaaagtggcacatgaaacaccggaactgatccacaaagccgtgattgacccgctgaccggcccgatgccgtatcaggggcgcgagctggcgtttaaactgggcttaacaggtaaattagtcagccagttcaccaaaatctttatggggctggcaaccatgttcctggagcgtgatctggccatggcggaaatcaacccgctggttatcaccactcaggatgagctcatctgcctcgacggcaaattaggcattgacggtaacgccctgtaccgccagccggaactgcgtgaaatgcatgatccgtcacaggaagatgcccgcgaagcacaggccgcgcagtgggaactgaactatgtggcactggacggtaatatcggctgtatggtgaacggtgccggtctggcaatgggcaccatggatatcgtcaaactgcacggcggtgaaccggcaaacttcctcgatgtcggcggcggcgcaaccaaagagcgcgtgacagaagcctttaaaatcattctgtctgacgaaaacgtcaaagcggtcttcgttaatatcttcggcgggattgtccgttgtgacctgattgcggacgggattatcggcgcagttgaggaagtcggtgtcagtgtgccggtggttgtgcgcctggaagggaacaacgcggaactgggtgcggaaaaactggcgaaaagcggtctgaatattattgcggcaaccagcctgacggatgctgcgaaacgtgttgttgcagcagtgggagcgaaataatgtctattttaatcgataagaacaccaaagttatctgtcagggattcacaggtagccaggggactttccactctgaacaggcgattgcgtacggcaccaaaatggtcggcggtgtgacgccgggcaaaggcggtacaacacatttaggtttaccggtctttaacactgtgcgtgacgcagtggaagccaccggtgcgaccgcttctgttatttatgttccggcaccgttctgcaaagactcgattctggaagcgattgatgcaggcatcaaactgattatcaccatcacagaaggcattccgaccctggatatgctgaccgtcaaggtgaaactggatgaagccggtgtgcggatgatcggcccgaactgtccgggtgttatcaccccgggtgagtgcaaaatcgggatcatgccgggacatatccatctgccgggcaaagtggggatcgtttcccgttcaggtacgctgacttatgaagcagtgaaacagacgactgatgccggtctgggacaatccacctgtgtgggtatcggcggtgacccgattccgggttctaactttattgatatcctgcggatgttccagaacgatccgcagacagaagcgattgttatgatcggtgaaatcggcggcagtgcggaagaagaagcggctgcctttatcaaagaccatgtcactaaacctgtcgtggcgtatatcgcgggtgtgactgcgccgaaaggcaaacgtatgggtcatgcgggggcgattatcgcaggcgggaaggggacagcagatgagaaatttgccgcccttgaagccgccggtgtgaagacggtccgcagtctggccgatatcggtgatgcagtaaaagcgattctgaataaataattcctgccattattatacagccgggaccggttccatgccgcttccggctgttttttgatctgaacacaattccgtcatttctgcctgattacgcgcttttactcactgcttcctgttattgctgttgttttaagcaattttcttaattgttctgaaacgcctgctgtatcgtttacacagcaaaaagtctcaggtataaaagggcgttttttatcatcttgatttatacttaatttttgtgccgaaaatgattattgtcgtgcgttaatacaaacagacaataacagttttagtgataatttatttataattgaattatccggctcatgaaattaaccagaattgctgatgaaaataaaaggttaataaaaagcgcatatattattggtatttttctgtcaggttgtatttgtgtgtacattgccttaacaataaagtaactcaattaccatatatgcgattttaattaacactgagaggaaaaattgacataaatcaatctattgcactggcattatttcggtgatttgtttaaattgtggcagatcaaaatagccgaaaatgactacgctgtgcattatttgatatatcctcagaattccaatctgaatcacgcaaaagcggtttattgtgtgcaaatataagcgtactattattagggtgtctatttaggtgtttttttgttactaatttgttattgcatttagaggcatttattgctggtagttatgttgctttctttcttcaggaaagcttgggttgccgcatgtcggtgtcttcctgctaggagcaaggagtcaagatgtttgatattgtcgaactgtcgcgattacagtttgccttaacagcgatgtaccacttcttatttgtaccgctaacattagggatgtccttcatgttagcgatcatggaaacggtatacgtcctgtccggtaaacaaatctataaagatatgacgaagttctggggcaagttatttggtattaacttcgctctgggtgttgctaccggtctgaccatggagttccagttcgggacaaactggtcatactactctcactatgtcggtgatatcttcggtgcgcctctggcaatcgaaggtctgatggcattcttccttgaatccaccttcgtgggtctgttcttcttcggctgggatcgtctcagcaagaaacagcacctgatggtgacctggttcgttgcactcggttccaacttctctgcactgtggatcctggtggcaaacggctggatgcagaacccgattgctgctgacttcaactttgaaaccatgcgtatggagatgctgagcttctccgaactggttctcaacccggttgcacaggttaaatttgtgcacacagtggctgccggctactgtaccggtgcgatcttcgtactgtctatcagtgcgtggtatctgatgaagggccgtgatcttgcatttgcaaaacgctcttttgcgattgcagcaagctttggtatcgccgctgtgttatccgttatcgtgctgggtgatgaatccggttatgaaatgggtgacgtgcagaaaaccaaactcgccgcgattgaaggtgaatggcatacccagcctgcgcctgcatcatttaacgtgattgcgttccctaatcaggaaaaaatggaaaacagttttgcgattgagattccgtacctgatgggtcttatcaccacccgttcaattgatactccggttctcggcctgcgtgacctgatggtgcagcacgaagcccgtatccgtaacggtatggtggcgtatgatctgttacagcagctgcgtggcggtaataccgacccggcagtccgtgatgcctttaatcagagcaaaaaagaccttggttacggcttactgctgaaacgctataccgataacgtcggtcaggcaacggaagagcagattcaggcagcaaccaaagactccattccgcgtgtcgcaccgctgttctgggcattccgcctgatggtggctgccggtggtctgatgctgatcgttctgggtctggcattcctgagtgtactgcgcaatcgtatcggcaagtccaaatggctgctgcgtgctgcattcctcagcctgccgttaccgtgggttggtgttgaagcaggctggttcnnnnccaccctgccgttaccgtggattggtgttgaagcaggctggttcgttgctgaatatggccgtcagccatgggcagtcggtgaagtgttaccgacagcatatgcaacgtcacatctggcagccggagacattctgttctctatggcgctgatttgcggcctgtataccttattcctgattgctgaaatgttcctgatgttcaaatttgcacgtcttggtccaagcagcttaaaaaccggccgttatcatttcgaaacgtccccggcacaagacgctaagtaaacaggagcccacttatgtttgattatgaaatattacggtttgtatggtggatcctgattggcgtactgctgattggcttcactgtaactgatggctttgatatgggcgtgggtgttctgctgcgagttatcggcagaaatgatactgaacgccgtatcatgattaacgcgattgcaccgcactgggacggtaaccaggtatggcttatcaccgcgggtggtgcactgtttgcagcatggccgatggtctatgcggcagcattctccggtttctatatcgcaatgattctggtcctggcggcattattcttccgtccggtcggttttgactatcgttcaaaactggaatcaccaaaatggcgcggtatgtgggactggggtatctttatcggcagtttcgtaccgtcattagtgattggtgtggcattcggtaacctgttacagggtgtaccggttgaagttaactcccagctgcaggtgtcttatgcagggagcttcttcggtctgctgaacccgtacggtctgttagccggtttaatcagcctgatgatgatcgtggcgcacggtgcaacttacctgcagatgcgtaccaccggtgatctgcatgtgcgtgtgcgtaaagccaccactatcactgctctgctgacatttgttctgttcgcagcggccggtgcatggctgatgtggggcggtatcgatggtttccgtgttgtctctgacatcgaccatttcggtgcgtctaacccggttaataaagaagtggtacaggaagcaggcgcatggatggcaaacttcaatgcctatccaatcctgtggatcctgcctgctattggtctggcatcacctctgctggtcgtgatgttcactgcaatggataaaggcgcgtgggcattcctgttcacctcgctgactattgccggtgtgatcctgacctgtggtacagcaatgttcccgttcattatgccttcaagcattgacccgaacgttagtctgaccatgtgggatgcaacttccagcctgtttactctccaggtaatgacggttgttgcgattatctttgtaccacttgttctcctgtacaccatctggtgttacgtgaagatggcagggcgtattgataagtccttcatcgaagagaacaaacatacattgtactaaggagcagacgaatatgtggtattttgcatggatcctcggaacgctcctggcctgtagtattgctgttattgcagcactggctattgagcaccacgaagataaagccgcttcaggcgagtaagacggatgctggataagtcttaccaactactggataagggtcccttacgggcccttgtcctgataatggcgttggggctggcattgagtgtgatctgggatccgtcgcgttttgcggcaaacaccagttcattacagatctggcagggactgctgatgatctgggctgtatgcagcggcgcaattttcggtctggcattccggccgaagcgcgcaatctggaagattctgttccatccgcttccggcggtggtgattctgggttacggcctttatcattttttcagctgatacaaacgtttatgactaaaaagccgttcatctgaacggcttttttcttttctgtttccgctccggttcacggatagcgcagtaatgcggcattatctgcaaaaaagcgggcaaaataatctataaacacccggaccttctgcggcagatgtgcagcgggcggaaataccatattgatgctctgatccggcaccggctgacgggtgaataccggaaccagtttctcctctgtcagctgctcccggatataccagaccggcagcagactgtaaccctgatgtgccagtgtcatggtgcggatcgcctgaatcgaattagagataaacaccctgttgtccggtgcgggcagatgctgacgccagttgatacgggccgtcaggttgctgttggcgataaagggcagagtggcgggatcactgctctccgtcacgcggtgctgccggataaactccggcgttgccacataacagaccggaaaatcagcgagtttgcggaaccgcaggccgctgtcactcagcgttcccagccggaacaccacatcaagtttcagggcaatcaagtcactcagactgtgatcgacacggtaatccgctctgatcagcggatagcgctctgtgaaagcaggcagctgcggcagcagaaattgtccgccgaattctgcagcggcactgaaactcagcggcccctgtggttgcgctgtttccgttctgacggcatccatcgcgttgtcgaactgttgtaacagtggtttgaattgctgatacagcgcctggcctgattctgtcagcgtaaactgccgcgtggtccggtgcagcagtgtggtactgagctcggattccagagctttgatatgcaggctgaccaccgatttgctcagattcaggcgtgcagcggcccgggtaaaggaaccggtatccacaacataaataaaggtattgatcttctcaacggatgtcagcataagattgtttcgttttctcaaacagtattgtctattttgatgcatagacggctgcggtcaactgcttttacactgctggccggaggaaaccatgacttatcgttaccgtatcgccctgatttttttactgggcttttttattgattgcatcaatatctttatgtcggccatcacgctgcctgcgattgcagaggccatgcaggtgtcatccctgtcggtgacctgggtggcaaacagctatattctcggactgacactgattatcccgctcagcccccgtctggcggcccgtttcgggatccgcgaactgatgacggcctcgatgctgctgtttgccgcggcggcagtgctggcaggcagtgcagaatcctttgcttcactgattttctggcgctttttacagggtgtggcaggcggattactgatccccgccgggcagtcactgacttttcagtattttcaggggcgcgagcggagcaaaatctccaccattattatgatgatcgcgctgattgcacccgcactttccccgatggccggggggattattgttgacctggccggatggcggcctgtcttttatgtcaatgcgccggtggcactctttacggcactgctggcctggtgctggatccgtgaaccgaaaaccactgccggagaagcaccggatctcaaagggctgcttctggtcagcctgacgctggcatccctgctgattgccctctcattgtacggggaataccacaatatcaccggcgcacttgcgctgggcgggctgatgctgttcagtgccgggctttattatcgccattaccggcagactccgcaggcgattattgatttatcgctgctgaaaaatacacggctgtggctctcggttgcggtgtattacgcggtaccgggcgtattcaccggggcgaacatcctcgctatcttttatctgaccacggttctcggcctgagtactgcggtgaccggtgcgtttatgctgctgtacgcggcgggtgccatggtggcgatgctgatcagcggcgcagtctataaccggaccggtgccgggcgcctgtttattatcagtctgctgctgcacagcggcggtatcgcgctgtttgccctgacagacagccacaccccgctgtatttcatcggtctgatttatctgctgaccggtaccggcggcggtattgccgcaaactgtgcacaaaccaccgcactgtatgattttcacggaacacagctgaacaaagccagtgtgatctggaatattaaccgccaggtggtgttcagcattggtgctgctgtcatgatgacgctgtatcagaccctgaatgcggttgccccgggacaggcatttgcactgacatttctgggaggcgctctggccgggcttatcccgctgattttcctggtccgcccgcagttccgtacttcactaaaacccgcagaggagattatccgtgagtaatactatgtttcagcaggcgtgtgacgaaatccatcatgtccacgacctgatttttaaaacatttactgtccccggagcagaagggcaggcggcactgtctgagttgctgacccattttacccctgagttttccatgaccggtatcagcggggcagtgattgatctcgcggcggtgacagcgatgtttacccgtatacagggtcagagacagggagcaccgattgaaacggcggagtatcagtgcgtcagcctgacagaaaacaccatatccgtgcgctatcaggagacacagcactttgccggaagcatcacagtacggcgctcactggttattctccgccgggaggataacgggaagtggcggtggcattatttacacgaaacaccgctgtctgcctgaaatagcgccggtggcgttttcagccggtaaatgcggatggaaatcctgtttttataagataaaaataaggtgatttaatttatgtaattacaataagttagattacgcggtaaataaatcggtagcacaaaaatccggataattccggatttttgcgtattcatggggaaaaatgtcttttaataagtgtttaatgatagctttcagagcaaaaaataacgcccctaaggtgttgtaatacgtaacaaaatattttttcatctcaacccttccgggggcttgcgtgttggataaaggcgagtatgattagcgcgcggacaaacgggcttttcttatctttacgaactaagcattttcaatacgtttgctcttcacgtatagtttgcaaagcatgttgtctgataaaggtaagttgcgggatattcaatgttcagttggccaatacgggtttattacgaagataccgatgctggtggtgtggtataccacgggcagtatcttgcattttttgagcgcgccagaaccgaaatgttacgggaacggggctttcatcagcagcgtctgctggaagagcagctcggctttgtggtccgcaaattaactatcgattaccaccatccggcaaggttagacgatctgttagaggtacgcagtgagatcaccgacatccgtcgtgcgtctctgacatttacgcagacacttatgcataaaaacggaactcttttatgtcgcgcagaggtattggtcgcctgcgtgaatatttctttaatgaagccggtagcgcttcctgagtctattgtcgcggagtttaagcagtgactgacatgaatatctgggatttattcctgaaagcaagttacctcgtgcaatttatcatgctggtattgctgggcttttctgttgcctcgtgggccattattattcagcgcaccaaagtcctgaatgcggccacccgtgaagcagaagcgtttgaagacaaattctggtcaggaatcgaactgtcccgtctgtataaagaaagccaggcccgccgtgatgaactgagcggtactgagcagatcttctactccggctttaaagaatttgcccgcctgcatcaggcgaatgtgcactctccgcaggcggtggaaaccggtgcggcgcgtgcaatgcgcatctccatgaaccgtgagatggaaaatctggaaaaccacatcccgttccttggtactgtcggttctatcagcccgtatatcggtctgtttggtacagtatgggggatcatgcacgcctttatcgcactgggtgcggtaaaacaggcaacattacagatggtggcgccgggtattgcggaagcactgattgcaacagcaatcggtctgtttgcggcaattcctgcggttatggcatacaaccgtcttaatcagcgcgtgaataaattagaacagaattacgacaacttcagcgaagaatttctggcgattttacaccgtcaggcctttgctactgctgataagaaataaggcaggagattatcatggcacgtcatcgcggacgccggcgggagctgaaatccgaaattaacattgttcctttactggacgtgttactcgtgttgctgctgatcttcatggcaacagcgccgatcatcagtcagagtgtggaagtggatctgccggatgcctccgattcacaatccgtttccaccaatgataatccgccggtgattctggaagtctccggtgtcggccgctacaccctggtggtgaagcaggatcgtctggaactgctgccggaagagcagatcattgctgcggcaaaacagtatctggctgaagatccgaagactattttcctggtcggcggtgccaaagatgtgccttacgaagagattattaatggcctgaatattctgaaacaggccggagtgaaatctgtgggcctgatgacgaagccgatgtaaggtttgttatgcagatgttttcactcagaaggttagggaattaagcgtgggaaagctgaaagagcgtaaagataaattaaatcgttctgtcatcacctctgtggtgttgcatcttttgctgattgcgcttgtgatctggggatcgtttgtaaccaagtcagggctgaccggcggcggtgagggcggtcaggtgatcgacgccattatggttgatccgaacgccatggttgaaaattttaaccagcagcaacagcagcaggccaacgcaaaacaggctcaggcgcagcgcgagaaaaaagcgaagcagcaggaagaagaattacgtcagaaagaactgcgtgagcaggagcgcttaaaagcgattgaagaagagcgcctgaagaccgaacaaaaagtagaagatcagaaaaaacaggctgaagagcagcaaaaacaagctcaggaagccgtgaagaaagccaaagaagagcagaagctggcggaagaagccgccgccaaagctcaggctgaaaaagaaaaagtaattaaagagcaggcactggcgaagaaacaggctgacgaaaaagccgccgcacagaaagccgctgaagaagaaaaagccaaagccgaaaaagcggctcaggaaaaagctgccaaggctgaagccgctaaagcggaagctgccaaagcagaagccgcaaaagctgaaaaagctgccaaagacaaagcagctaaagaaaaggcagccaaagccgcagcgaaaaaacaggccagtgaagtcgatgacctcctcggcggactggcgtccaacgctccgggtacagaaagcggcggtgcatccgcagccggtcagggcggtggcaagaagagcggaacaaactcggatggcgatatgaacggttatatcgcacaggtccggttagcgattcaggcgaagttctataatgcggatatgtaccgcggtaaaacctgtacgctggaaattaatatcactgataaaggtacgcttatcagtgtgaatgcggtcggtggtgatgacggtttatgtcaggccgcactcgcggcggccaaacaggctcgtattcctgcgccgccgagcaaatcggtctggcagcagtttaagaataccaaactggactttaagccggaataagctgtaatacagcgtgacgaaccagatatatccgggtgttagtttttactgtggtatctggttttggttatgaacgtttgttaaaatacgggtttgatgcgggcattggcgcaacgagggagagagaatgaagcaggcagttaaatacatgctcggttttctgatgctgtgggcggcagttgctcaggctgaagttcgtatcgagattactcagggtgttgattcagcacgtcctatcggcattgtacctttccaggtcgtcggcggcggcgctgtaccggaagaagtcggcgcgatcattgctgctgacctgcgtaacagcgggaaatttaacccgatcgaccctaaccgtatgccgcagttaccgggtaccgcatctgaagtggttcctgagtcctggacggcgttaggcattgatgctgttgttgtcggccaggttcagccgggtgctgacggcaactatctggtgagctaccaactggtggatacctctggttccccgggcagcgtgcttgcacagaaccagtttaaagtcaccaaacagtggctgcgttatgcggcacacactgccagtgatgaagtgtttgagaaattaaccggtattcgtggcgcattccgcacacggatcgcttatgtggtggttaaaaacagcggtgactatcgtcacgagctgcgcgtgtctgattatgacggctacaaccagttcaccgttcaccgttcacctgagccgctgatgtcaccggcatggtcaccggatggcgagaaactggcgtatgttacctttgagagcggaagttcagccctggttattcagaatctgtccagcggacaggtgcgtcaggttgcttcattcccgcgtcacaacggtgcaccggcattttcaccggacggaaccaaactggcatttgcgttatcaaaaaccggtagtctgaatctgtatgtgatggatctcggctcaggccagatgcgtcaggtaacagatggtcgcagtaataacaccgaaccttcatggttcccggacagccagacgttagcgttcacgtctgaccaggctggtcgtccgcagatctataaggttggtattaatggcggtgcgcctgagcgcctgacgtgggatgggactcagaaccagaatggtgacgtcagtgctgacggcagtttcctggtaatggtcagttcaggcggcgggaaacagcatatcgccaaacaagatctagtagcgaacaatttccagattttaacggatacgttcctagatgaaacgccaagtatcgcacctaacggcactatggttatttatagctcctcacaaggtatgggaactatattgcagctggtttcgaccgacgggcgtttcaaagcgcgtcttccggcgactgacggacaggtaaaattccctgcctggtcgccgtatctgtgatgcattaaaaatatgtatggcaaattataaaaggatcaaagagatgcaacttaacaaagtgcttaaagggctgatgttagctttacctgttctggctgttgctgcatgtagttctaacaaaaacgaccaggcggatgcgggcactgtcgacaatggcgcaaacgccggtatgtctgcggaagaactggcacgccagcagctgcaggaacttcagaacaacaatatcgtatacttcggtttcgacaaatacgatatctctcctgaattccagcaaatgctggatgcacacgctgcattcctgcgcaacaacccttcttacaaagtaactgtagaaggtcatgctgacgaacgtggtactccagagtacaacatcgcactgggcgagcgtcgtgctaacgcagcgaaaatgtacctgcagggtaaaggcgttaacggcgaacaaatctctatcgtttcttacggtaaagagaagccggcagttctgggtcacaccgaagctgactacgctaaaaaccgtcgtgctgtaatcgtatactaagagatatacatgaaaagtaacttcagacgcctgatggtgagtctgtcgttattgataggtgtagcggccccctgggccgctattgctcaggcacccatcatcaatatcggctcaggctccactgatgaccgcctcatgcagctcgagcgtatttctaacgctcatggtcagctattaacccaacttcagcaacaagtcatggacaaccagcgcgatatcgacatgctgcgcgggcaaatccaggaaagtcagtaccagctgaatcagttgacagaacgccaacgcgaacttttctcacaggtggattccctcaccggtggcggcagcgcatcaacagataatacatccgcggcatccggtaatacggactctgcgggtactgccgcaacctccgctcctgctgctgcaagtaagggcaatgagaaagatgactataacgccgcggtaaacatggcgatgaacaccaaagattacgatggtgcaatcagcgcatttcagagttttatccaaagctatccgaagtccggttatcttcctaatgccaattactggttaggtcagatgaactacaacaaaggcaaaaaagatgacgctgcggcgtattttgcttctgtggtaaagaactggccgaaatcccagaaagcaggagagtccttctataaagtcgggctgatcatgcaggagaaaggggataaagcgaaagcgaaagcgatttatcagcaggttgtcgcaaaatatccgggctctgccggtgcgaaactggctgagaaaaaactggctggtttataaccgccggtttatttttttgctcagagtatagccccgaccggagagttttttgctcaaccggggctaagtgagtgaattataagcgtttgaataagttaatttgaaaaaatcgttgcaccggccggataaatcagtattatatcgtgccgttggcaagagagtacgggtcgttagctcagttggtannnnnnnnnnnnnnnnnnnnnnnnnnnnnnnnnnntcttttgcccgaaatctgaaacgggtcgttagctcagttggtannnnnnnnnnnnnnnnnnnnnnnnnnnnnnnnnnnnnnnnnnnnnnnnnnnnnnnnnnnnnnnnnnnnnnnnnnnnnnnnnnnnnnnnnnnnnnnnntcagagtccctcagcagtattacgatgggtcgttagctcagttggtnnnnnnnnnnnnnnnnnnnnnnnnnnnnnnnngtaaccattttccctctgatttttgttctccccggcatcacaccggagatcacccgtttgttattattcattctccggcgcaagtaaatcatcggcattcagccggtcagtgaccagtgcaataattttatctgccagcgttatatcgatatcaaatttctgtgtttcaatcacgcggagtgccacatcgcggtagagtgccagcatcgccatatgcgcccgtgcggcacggacacgatcacggttatccagtgtcgccataaaacgcccgtacaggcccggaggcagccaggtgctcagatgacgccctgcataccagacatcctgcgtaccgtcgctgcgcagcagcacatgccactccagcagggtgatcagccactgtttcatggcggtatctttcagccgggtagtccagagttcattgcgcagataataaaccggcacctgtgaggcttccagccagaagttctgccagttttccaggaacgtctgctgatccggcggagtgagcacggcagccggatcggcatattcaggcaacccggcagtgagaccggttttatccagcagaacggcataaccgcgctgatagatgctgtccagcccgtgtgcggccatctgtgtgatacgttcgcgcccggccagcacaaaatcgactttacggcctttctcatacagaacctgacaagacggccagcagaggctgtcgtcttcgcgtgaagccgctttgcggataatcagcggcacaccaaaccggttcagccagcggctgtcctgaaacaactcatcatgactgctgccgatcagttcggcattaatatccgaaaaacggtctgcctggttctggcgtgccacagagccggtgataatgaccgcatcgatacggggatctaatagggcaaaagaaattatattgtttataatttgctcaattgattccattttacatctcattcatataattgatagctgggctgatagtacgtcataatcaaaaatagcgggagagttcaggttaaaaaaacgttatcatgtttagcatattaaacaaatgctgttacgatgggatgattttactgaaaacagcagggcaggatacagttaactaaacctgtcatcagtggctggccgccggtgacaggaaatatacttaacacaggtgacggaatggaattttttgatattaataatattctcgtggtgatcccctactggaaagaagggtcttatgcgctgtcctggattgaagcagtaggcgcaaccgccgggttgttatgtatctggctggcaagcctggaaaaaacaatcaattatctgtttggcctgattaacgtcacgctgtttgcggtgattttctttcagatccagctctatgccaatctgctgctgcagattttcttcttcgccgccaatatttacggctggtatgcctggagcagacaaaatgataaagcggaagcggagctgaaaatccgctggatgccgctgcggcagacggcagtcattgcggcggtttctctggcggcgattttactgctggcgcgatttatcgacccggtctttacgtggctggcgcagagtatggtcagcatgctgaacgccgcaggggctgatctggcaatgccggtattgctgcccgatgctttcccgttctgggatgcggccatgacggtgctgtctgtggtggcgatgatcctgatgacccgcaaactggtggaaaactggctgttgtgggtggttatcaatatgatcagtattgtgatttatgctcttcagggcgtgtacgcgctgtcgctggaatatatcatcctgctgggtgtggcgctcaacggttcgcggatgtggataaaagcagcgaagcagccgtaaaactattttcagtgcaataaccgggtgattataatgagagtccggtaataaccggattctcattaatcagcaataaaaggaaacgcctgtggccggtggcagcttactcgcactactcgatgatattgcaaccgtactggatgatgtctctgtgatgaccaaaatggccgccaaaaagacatccggtgtactgggggatgacctggcgctgaatgctcaacaggtggccggtgtccgcgctgagcgggagatcccggtggtctgggcggtggcgaaaggctcctttcttaataaactgattctggtgccgctcgcactgctgatcaatgcctttgctccctgggctgtcacgccgctcctgatggtcggcggggcgtttctgtgttttgagggggcggaaaaactggcgcataagtttctgcataaagccggtgatgagcccggagaaacggcaccggcggacgatcttcagacaccggaagagttggccgcattcgagaaacgcaaagtcaaaggcgctatccgcaccgattttgtattatcggcggagattattgctatcaccctcggtattgttgccacctctccctttattaatcagctcgtggtactgtcagtgattgctgtcattatgactatcggggtatacggtctggtggcggggattgtcaaactcgatgatctgggattttacctgcagaagaaatcagccgcgctgctgaaaaaactgggtgacgggctgatccacgccacgccgtatttaatgaaaaccttatcagtcgtcgggactgcggccatgtttatggtcggcggcggcattctgacacacggcattccgtttattcataacctgattgaaaatctggctcagcagagtgcacaactcccggcactcggcagcatattgcactttatgaccccgccggttgccaatttattgttcgggctcgtcgccggtctggtgattgttgcgctgattaccgctgttaagcgtattaaaacgggattagcggcataaatacccttctcacgggcagcggctgatgaagccgctgttttccttctgattcataataatttgtcctgttgatctgaatattttcggggtgaaaaattaatttcaattccggcggcagctaattgtttacagcttgttgacaagcagttagattaaaataacgacaataatgaaacgggacaccggaagagacgggttatgaattatcagaacgatgatgtaaaaataaaagaaattcgggaattattaccgccagtggcgttattagagtcatttcccgcgactgagactgccgcagacaccgttcgccgcacccgtcatgcaatccacgaaatcctggaaggccgggatgaccgcctgctggtcgttatcgggccatgctcaattcacgacccgaaagcggcggttgaatatgcggatcgcctgctgacattacgcaaagaactgaaaggtgagctggaaatcgtcatgcgcgtctattttgaaaaaccgcgcaccacggtcggctggaaagggctgatcaacgatccgcaccttgaccactctttcgccatcaatgatggtctgcgtattgcccgcaaactgctgctggatatcaatgataaaggcttaccggcagccggtgagttcctggatatgatcactccgcagtatctggcggatctgatgagctggggtgctatcggcgcccgcaccacggaatctcaggtacaccgtgagctggcctccgggttgtcctgcccggtcgggtttaaaaacggcacagacggtaccatcaaagtcgccattgatgccattaacgccgccgggtcgccgcactgttttctgtccgtgaccaagtggggacattcggccatcgtgaacaccaccggtaacggtgactgccatattattctgcgtggcggtaaaaaaccgaactacagcgcggaagatgtcagtgcggtaaaagaagggctggcacaggccggtctggcaccgcgtatcatgatcgatttcagccacgcgaacagcagcaaacagtacaagcgtcagatggacgtgagcaccgatgtggcacagcaggtcgccggtggtgagaaagccattatgggcgtgatggtggaaagccaccttgaggaagggaaccagaacctggaaggtgatgcaccgctcgtgtacggcaagagcgtgacagatgcctgcatcggctggggagataccgaaaccctgctgcgtcagctggcagatgcggtaaaagcccgccgcggctgatagaccagaaccccggttcacagaaaataaaaaaccctgacatagtcagggttttttaccaaagaaggcggattacttcgctttaccctggttagcaacagcagcggctttggcagcaatcgcatcctggtcgcccaggtaatagcggcgcagcggcttcatgttttcatcaaactcatacaccagcggcacagcagtcgggatgttcagctcgaggatttcatcttcgctcatgttatccaggtatttcaccagtgcacgcagggagttaccgtgtgcagcgatgatcactttctcaccggaagcaacgcgtggtttgataacatcagtccagtaaggcacaacgcggtcgatagtgatcgccaggctctcagtggcaggcagttcgctttctgccnnnnnnnnnnnnnnnnnnnnnnnnnnaatggcaaaaccgcgacgccacagtttgacctgctcgtcaccgtattttgcagcggtttccgctttatccagaccctggagtgcgccgtaatgacgttcgttcagtttccagcttttctcaaccggcagccactgctggtttacctgatccaggatattccacagtgtgtgaatagcgcgtttcagtacagaggtataggcgaaatcaaaagagaagccttcttttttgagtaactgaccagcctcttgtgcttcagcacggcctttttcagataactcaacatcagtccagccggtaaagcggttctctttgttccactcactttcaccgtgacgtacaagcaccagtttagttactgccatagcgtaaactcctgttgtgtttcagatagggggtttcagaattgaaacagacccggcacattgcccattatattggtcaccggcgcctttcggcaaactttccgcacaggtatttccgccggggcctgtgcggaagagatcaattccgtcctgtttaccggatagtgtataccaaaactgaatcgattccgctataaatgtttacgcaaagtgtgatacacaggaaaaaacggttttttacgctaccttaaacggccaggtaaaaaacagcagatggcagaggttcagcgcgaagtgaaaccctgtcgccacccacagccgtccgctccacatccaggccagcccgtagataactcctgccagaccggcaaagacaaccagcagcgctcctccggcaatatgtgccaggccgaagacagcggctgcaataaacagcgcggcatacggcggcagataccgggaaagcacctgctgaatagccccccggaacagcgcttcctctgcgagggagacaaaaaacagattcgccagcataaacgccggcagccagtgcggcagatgcggttcaaaccccagtccgccaagggcggttgccagtaacagcagtgcgggtacggagaaagccagtaacagccagtgcaggcgggtggcccggcgcagcggcgcggtgacaaacagctgcggaatgatgatgatcagcacaaacggaagcagtgctttatcggcattaaaccagaaagaatagggcggactgtgcggcccggcagcctccggcggcatccagcgcaggttgtggaatcccggcagcaggtgaaaagccagacccagcacgacggtgatcaccagtagtgtcagcagtacacgctgccatgagcgtggtgcggtataaggccgtgcgacagccagcaggatagcaaaccacagggtgagcagggcatgccagtccatcacaccggtaaacagggcgctgatggtggcagccagaagtgttgccagtgacagtgtccggtgaaattgtaataacagcagcgataatgcaagtaaaagccaggtcatggaattgtgtcagagaatcagaaaaggagtgagcagggtaaaagagaagtcagtgatgcgccagtaaaaaaagcagactgataatgatttttaatcagattattcttaataacggactgaatacattcagaaaataacggctgtttccggtgcagtaaaaaagtaaaacagccgtttgataaaaagattacaacgtattgatttcgtaacgataactaccgttatcaggaataaacgccagccgccggttaatgcaggccggagtatcttcgctgtgatggctgacaaacagcagctgagtatcaccacggcttatcataatatcgataaaacgcagtaccagcagacggttgagtgtatccagcccctgtaaaggctcatcgaggatcagcattgcagggtgttttaccagagccctggcaatcagtatcagccgctgctgcccccacgacaggctgtggaacggagcatcgcggtacgctttcagcccgagcagcgccagccactcatccgccagttttacctgccggtctgacggtttctgatagagcccgacagaatcgaaataaccggaaatcagcgtgttacgcacactgatattgacgcggtaactgaggtggatgctgttactgacatacccgatatggcgtttgatatcccacaccgtttcaccgctgccccggcggcggccgaacagcgtcaggtcattgctgtaaccctgcggatggtcaccggtgatcagactgagcagtgtggatttacccgcgccgttctcgccggtgatttgccagtgctcaccgggcagcacctgccaggtcagatcattgagaataggcttatcgttatagctgacacagccgtgattgaggatcacccgcggaatatccggcgcaaggcgttctgcggacgggtcatcccgctccggcagcgtcagatgctctgtctgctcactacgggccagctgtgcctgtaacagtgcggataaggtatccgccggtgccagtacacagtctgtcagcagcccggcgcgggtgataaagtccggaatatcactgaaacggttgaggatcagaacaaccgtcagtccgccgtctgcaagctctgccagcatctcactgagcatacggcgggaatcggtatccagcccgtcataaggctcatccagcaccagcagatcaggctctgtcatcagcgcctgacacagtagagttttgcgggtttcaccggtggaaaggtatttaaaacggcgtgacaggcgatcagaaatcccgaactgtgccgccagctgcaggcagcgttcattatcgcggtgttctgcctgaataatctcagcggtggtacggccgttgtcggtgtcatcgccgtccatcaggtcggtattattgcggttccactcttcatcaatcagcgcctgtaatttctcaaacgcgaccagaaccggacggcggaaagtattgctcatctctccggaaagcagcggaagctcctgaatcagcgcacgggcaagggccgattttccgctgccgttggtgccgataaaggcgtggtgctggccgctttccagctgtaatgacggaacagaaagctgtttgtccgcgcttaaccggaagaccccttgtgtgatgtgcagatgtgccatagtgaacagccttattattagtttaattattccccagaaataagcggaaccggcggggatgtcaagatatggcaccggtgttacatcccgtatcatgaaaagaagatctgcttcacagaaacgtcatcattcagtctgctgtttttgttatactttttggtacagaaatcacggcatcacggaaattaaccgaaagagagggcagggtgagaacaggattaaaatattcggtgctggcattactgatcagcggaacggtcaacgccgcaacggtggatctgcgggtgatggaaacctcggatattcacagtaacttaattgactttgattatttcaaagacaaaccgacagagcagtttggtctggtccgcaccgccggtttaattaaagcggcaaaaggtgaagccaccaacgcagtattagtggataacggggatttaattcagggcagcccgctggccgattatatggtcagtaaagggttaaatgacggtgaagcccatccggcacataagctgatgaataccatgggttatactgtcggaaacttcggtaaccatgaatttaactttggcctggattatctgaaaaaagccattgccggtgcggattttccgtatgtgaatgccaatattattgacgagaaaaccggtaagaatctgtttacgccttatattatcgttgataccaaggttaaagatcgcgacggtaaagagcatgtaattaaaatcggttatatcggttttgtaccaccgcagatccttatctgggataaagcgaatctggaaggaaaagtccgcgtcaatgatattacggaaaccgcgaaaaaatttgtgccgcaaatgaaagcagaaggtgcggatttaattgtcgctattccgcactccggtttttctcaggagccgtataaagccatggctgagaactcggtttattatctcagtgaagtaccgggtattaatgccattatgttcggtcactcgcacggcgtattcccgggcaaagattttgcggatatcaaaggcgttaatattgaacagggaaccgttaacggtattccggctgtgatgcccggccagtggggggatcacctcggcgtggtggatctggtgctgaataatgatgacggcgcgtggaaagtggcggatgccaaagcacaggcgcgtccgatttatgacaaagtcaataaaaagccgttggtggcgcgggatgacaagctggcttctgtaattgatgagcagcacaatgcgacccggacctttgtcggcaagctgattggtaaatcaccggataatatgtacagctacctcgcgctgttgcagagcgacccgactgttcagattgtgaataatgcgcagactgattatacccgccgctttattcagggcgatccggatctggcggatttaccggtgctgtcagcggctgcgccgtttaaagtgggcggacgcaaaaatgccccggcggattttgtcgaggtggaaaaaggggatatgacgttccgcaatgcggcggatctctatctttatccgaatacgctggtggtggtgaaagcgaccggtgcggaagtgaccgaatggctggagtgctctgccgggatgttcaatcagattaacccgcagtcagaggcaccgcagagcctggtcaactgggatggtttcagaacctataatttcgataccatttccgggatcaactatcagatagacctgacacaaccggcaaaatatgatgtggagtgccagacagtcaatccgcaggccaaccgtatcaaaaatgtgacttatcagggaaaaccgattgatccgaaagccgttttcctggtcgcgaccaataactaccgtgcttacggcggaaaatttgccggtaccggtgacaaacatattgcgtttgcatcaccggatgaaaaccgcagtgtgctggcgggttatatcgcggcagaaaccaaaacgaaaggtgcggtatcagcacaggctgagcaaaactggacgtttgtgccggtgaaaacggataagaaattagatatccgctttgaaacgtcaccgggcgataaagccacacagtttattaaagaaaatgcccattacccaatgacccgggtcgggacggatgatgtgggttttgcggtttatcaggttgatttaacagcgaagtaagcagttactcacgaaagccgccgtcagcggcggcttttatcatcatttttatcagcacaatgtggcaataatcacctggtccgcattaaacagcgcggtgacgtcatcaccttctttcagttgctgcctgtcggcatcctgattatccagggtggagcataattgtgcgccgccggtcagtgtcaccatcacctcgctgttttccgcacctctggcaacggaacagatacgtccgctcagacggttgtcataatccgtgctgttttctgcggatttgctgattttcacccacggcgctttaatcagagtaagtacttctttaccgactgataagcccagccggttggcactctgttccgtcagggcaacggcaagttcggtctttttatccgccagcaggacattcacatgctgctgcacatgagaatggttgcgcgacataattgtgccgaagaactggttacgggcactggtctgcaatgagaagcgggagatggccgccagcaggctgtcgaggggcagcgaatcatccttaagaacatcaaaggctttctgctggatctgtgccagcagatcataaagctgaagtaagcgctcaccatagcgtgtcagtgtcgcgccgccgccgcctttgccgccggtggcccggtcaacaatggtttcctcggcaagctggttcatctcattgatggcatcccaggcgcttttgtaactgattccggccagttttgccccctgactgatggagccggtggctctgacctgtttgagtaaggaaatccgccgcggatcggcaaataaatgaccttctgatttcagtgttaataaaatatccaacggaaaataccccgtatattaatcagacagaatcaccggcgcagtctctccgcccggtgcggctttactttccggttagtgtagcaaactgcgtttttttttcatctgccaatatggcgggtttagtttacttaaaaattcatgaacntttaagtttacttaaaaattcatgaaccggataaaaacaggtatggtataggaattgattatcagccagagattatttcatgcagaatgtattatttcgtcttcatcaggcagtcaaggattccccggaaccggaaggggctgaaacagaagaatttgcccgtatgctggcagaacagccattctgggctgaatcacaggatcatgaaagtggcggacaaattggtctggcattcactcagggggaagatgatgaagaacctctgctgctcgtttatatgcgtgatgatggcggtcatgaagcacctgcaaaaatcgcggaagaaatggcatccggtgagcgggaatatacctggctgccgggcgcgtttttactgggactgagcaggaaaattgatttcacactgtgcatcatcggtgaggatgggcaaaccctgccactgaacagccagtttatgaaaatgatgtttctctatattcaggagctttaccgcgaagacgatgaaggtgaaacaccggtacaatccccggctgcccctgtctcaccacgcagcagtattgtggaaaaacccggcagtgccggaaaagtgataggttttctgattctggcggcggctattgtggcggttgtttactttatgcagacctgacagcacgaatcgccatgctttccggggtgtgatttatatagaatagcggccattatgacgctattatagtcatgctgaatatccttttcgcctgatataaagagattaagtgctatgtttgagttagttaaaagtttaggtttcgcactgttaatggttcctgttgttatgacaggcctggcggctctgatctggggattaggtgaaattttcaacctgatttcaaaaggcgagcgccgcgaaaagcagctctgattataccgtattcaggattacctgcgttcgcgggtaatccgtctttgcttctgttttcccgctcattatctgcgtaattcccctcattttatattgttttccgcttaactgccgatagtgggataaacctcctttcatttttcgctgtatcttgttatatacaacgggttaatcctaatctatcctggtggaaaaaatgaaaaaacagttcagtaagttattggccggtgttgttatctctgctgctgtcatgggtcaggcatgggccgctgaaaaagtgaccgtatttgctgcggcatcactgacaaatgcggttgatgaaatctcggcaaaatataagcaggagaaaaaaggcgaagtggtcgcgtcttatgcgtcttcttccaccctggcccgtcagattgaaaatggtgctccggcagatatctttatttctgctgaccagaaatggatggattatgctcaggagaaaaacctgatcatcaatgacacccgtaaaaccctgctgggtaatgagttggtgctgattgccgcgaaagacagcaaaattgataaagttgatattaataagcagaccgactgggttaaattactggatggcggccgtctggctgtcggcgatcctgatcatgtgccggttggtatctatgcacaggaagccctggaaaatctgggtgcctggaaagtcgttgatccgatgctggcccgcaccaataatgtgcgcagcggcatggcgctggtggaacgcggtgaagcgccgctgggtatcgtgtacggctctgatgcggttgccagtgataaagtgaaagtggtcggtattttcccggcagatacccataaaccggttgaatatccgattgctatcctgaaagatcgcaataatgccgatgttaaaggtttctatgattacctgcagacaccggaagcaaaagagatcttcaaacgttacggtttcagccctctgtaataagtaaggactaacagacagcgatgttgaatgagtatgaatggcaggcggtcatcctcagcctgaaagtatcaacggtcgccgtggcagccagtctgccgttcggcatactgatggcatgggtactggtgcgctgccgttttccgggcaagtcgctgctggacagtcttatccacttaccactggtgttaccgccggtggtagtgggttatctgctgctgatcagcatggggcgcaaaggcattatcggtgagtggctctataactggttcggcttcagttttaccttcagctggcgcggtgccgcgctggctgcggctgtggtggctttttcgctgatggtacgggctatccgtctggcactggaagcagtggatatgcgcctggagcaggcggcacggacactcggggcttccccgctgcgggtctttttcaccatcacactgccgctgtcgctgccggggattattgtcggtaccgtgctggcatttgcccgttcgctgggggaattcggcgcgacaatcacctttgtttccaatattccgggggaaacccggactatcccgctggccatgtactccctgcttgaaacgccgggggcggaaatggacgcagcgcggctctgtattatcgccattgttctggcactggcttcactgctggcctcggaatggctgacccgctggggacgcaaacgcctgggggttgccacatgttagtacttgattttgaacagcagctcggtgatttatccatggtgatcaataccgaactggccagtgaccgtattaccgctgtcttcgggctctccggggcagggaaaacctcctttatcaatgtgatcggcgggctgacaaagccgcagaaagggcggattgagcttaacggtcacacactcgtcaatattgaaaaacgtatctgtctgccgccggaaaaacgtaaaatcggctatgtcttccaggatgcacgcctgtttcctcattaccggataagaggcaacctgcgctacggtatggcacgggaaatggaagatcagtttgacagtattgtggaactgctgggtatcgggcatctgctgaaccgcctgccaatgaccctctccggcggggagaaacagcgggtggcgattggccgcgcgctgctgactgcgccggatattctgctgatggatgaaccgctggcgtctctggatctgccgcgtaaacgcgaactgctgccgtatctggaaaagatggcacaggatatcagtattccgatcctgtatgtcagccacagcctggatgaaatcctgcggctggcggaagatgtggtgatcctggaaaaaggccgcattctggcacaggggccgctggaagaggtatgggccggagcggcattacgcccgtggctgacacaggaaagtctctcaagtgtactgagtgtcacggtgcttgagcaccatgaccgctatgccatgacggccaccgctatcggtgaccaggtgctgtgggtaccgcgtatcgccggtgaacgggacacgccggtacgtgtgcgtgtcagtgcggatgatgtgtccattgcactggaaaaaccgaaaagcagcagtatccgcaatatattacgggcgaaaatcacggaaatgtatgatgacgacaacgggcagacggatgtacgtctggcggtcggcaatcatttcctctgggcacgtattaccggctgggcgcgggatgatttgcagctgaaacccggacaatgggtgtatgcccaggtaaaaagcgtgtcgctgagccgcgaattataatttatctgaatatacgtacttttcattaataaaaggggcattcatattattctgattgcccttctgaatcaccggcgatatatattaacgccggtgcatcactgaccctgccgaattatcacagaatattctccgcacacggaaacaagtgtaagacgtgcgttattgcattaaaaaccactgagtcagagggataaaatgaaaaaagcatttctctttttattactgggtattttctccggcggtcaggcgctggcggcaaatcaggtgatgtgctacacctatctgaaaaaagtcaaagatgttgaaatcgaaaatttaaaagtctggtgcatcggcaccactgacggttctcagggcggaatgcgtatcccggatctgctcagtatgggatataaagtggtggcaacagaaagctttccgtatcagtattctgaaggtggttatacctacgacggctcgaaattactgctgatcgtcgaaaatgcaaaattcccgaatcagaatccggcagaaaaaccaaaaaataactggaattttgataagtataaataacggatgttattcgcaggtcagcggaaaacagatcataataaaaacgcctttattaaaaggcgttttttatagttcagaatacggtattgatcagctgagaatatgacggcggattgcctgtgcaatacccggctgtgtattatccgggataatcaggtcagcgtgtgctttgacttcgtctgccgcattacccattgccactccgagaccggcggctgaaagcatgctgatgtcattatggttatcaccaaatgccatcacatctttcatcgtcattccctgagattccacccattcctgtaaacggcggcctttgctgttacctttgcgggcaatatccacctggtttatccacgaccactcgcaggacagtcccatatccgcttccacagcgtcggtaaattcacgcagtttgttcagatcatctgagcaggtggcgaatttccagatagtgtcagcgcgatcaacctcatcaagaaaattattcactttgcgcatcaccggacgctggtgctccggcagagaagctgaccagttcagtgtccgctcaatagtgctgctgtcagtgtgataaagcatggcatccgagatatacatcagatgctcgatatccgtctgtgccaggcgttcgagcaactgacgggattcactgacactcatcggatcggcggaaagcacttttttccccggataatcgtacagataggtaccgttacagcagatagccggtgtatccagctgcaatgtctgataaaacggatgaatagcaacgtgatgacggccggtgacaatcagcacctgcaccccggcacgacgggcttcgcggatggcatccagcgactcctgcaatatatgtttatccggatcgagaagtgtaccatcgagatcaaatgcgaggacgcggtaagacataacagggagccccttgtatgagtgtcagaaccggaataacggcgggcatcagggaatattattgtatcctgacggcatcctgaatgattccgggcggagataactgataatatagcatgttaattgtttcgcgataaacgctaagtgcggtattattatacagaaatgcttacattacctgttaaaaatcaaacgggtaagtgatgatattaaggagcgcgaatgaagcaggtggtttatgttgccagtacggaaagtcatcagattcatgtctggcagatgaatgaacacggtgagatgtcactgttacagacagtatcaacgcctgatcaggtgcagccgctgatcaccgcgccggatggccgtcatctttatgctgcggtcaaaccgggcaatgcggtggcgacttataaaatcgcggaagacggcaaactcacacaaaccggcctgacgccgctcccgggcactgccgcctatatcacccttgataaagcggggcgcacactgtacgccgcttcttatcatcagggaaatctggcggtactgccgatccgcgataacggtattcccgtccgtgcagtgcaggtgattgagggattaaaaaatccgcattccgccaatattgcgcaggatggacacacactgtttgtgccgtgcctcggggaagatcacatccgcgcttacacgattgaggaagacggacgcttaactgaacgtcacgccgatatgctgacggttgctgccggtgccgggccgcgccatatggcgtttcatccggcaaaacatgtggcgtattgcctgaatgaattaaatgcgaccattaatgtttaccgcgaatgggttaaagtccgtgaaattcagtcagtggatatgatggcggatgattattcaggccgccgctgggcagccgatattcatatcacgccggacgggcgtcatctctatgcctgtgaacgggcatcaagcgtgattaatcactaccgggtgtcggatgacggcggtcatctgcaactggcggggcgttatccgactgaaactcagccgcgcggttttgcggtggataacagcgggcgtttcctgatctcaaccggacagctctctcaccatgtggcggtttccctgattgatgcgattaccggcgaactgcactttatcaaccgctatccggcaggaaaagggccgatgtgggtgacagtgctgacgctgaagtaatgtgtttttttcaatacagagtttgccggtcaggtaataagcgataacgggcaggcgaaacgaaaagcatgcgcgtcatggatgacgcgcctgagcttacagggatgtattcacagcggcttttcgtttttgcccgttatcagcgcttcaccggtactgatgctatcacctgttttttattcctccgtcaccttatctatcgcctgcgtcagtttttccagttgtgccgctgtaataatgtatggcggcataatataaatcagccgtccgaacggccggatccacacaccggcgtcaacaaagcggcgctgtaattccgccatattgaccggctcttccgtttcaatcacaccaatggtaccgagtacccgcgcatcgcggattccgctgcgggatttcagcggcagcagagcgcttttcagttgtgtttcgatagccttcacacgcgcagcccagtctccggacaacagcagatcaatactcgccactgccgtggcacaggccagcggattacccataaaggtcggaccgtgcataaagcagcctgcgtcaccctgactgatggtgtctgcaatatggcgggtggtgagggtggctgagagtgtcatataaccgccggtgatggcttttccgagacacataatatccggtgatataccggcgtgttcacaggcaaacagtttaccggtgcgtccgaatccggtggcgatctcgtcacaaatcagcagaacattgtagtgatcacacagtgatcttacacctttcagatattccggatggtagaaacgcatcccgcccgcaccctggacaaccggctccaggatcacggcagcgacctcgtgatgatgctgtgccagcaggctttccacagaatgaagatcctccggccgccattcctcatcaaatccgcactgcggcgcatccgcaaacagatgatccggcagatagccctgccagagtgagtgcatggagttttgcggatcacacactgacatcgcgccgaatgtatcgccgtggtagccgtgacgcggggtgataatccggtggcgtttttcgccacgtgcctgccagtactgcagcgccattttcagcgccacttccaccgcgaccgagccggagtcggcaggaaacacacattccagcggctccggcgtgattgccaccagacggcggcacagtgcaacagcagacggatgggtgatcccgccgaacatcacatgtgacatctgtgacagctgttcagtcaccgccgcattcagtaccgggtgattatagccgtggatagccgcccaccaggaggacataccgtcaaccagttcgcggccgtctgcgagtgtcagcaccgcaccgtgtgccgataccaccggatagaccggcagcggctgagtcattgatatataagggtgccagatgtggcggcgggcaaaatccgcatcatcagccgaaaaggcgtgacctgaaatattccctgaaaaagtcattatgtaaaccatttcaatgcaaataaagttgacatgataatgctgatatttaaactggcaacacttttttatcgggagttacagttatgagtcaaggtcgtcagtggacattaaaagaagccaatgcattgtttgaaaaacctttttttgaactgttgtatgaagctcagaccatacatcgccagcattttgaccctcagcaggtacagatcagcacactgctttccatcaaaaccggggcgtgtccggaagattgtaaatactgtgcgcagagtgcgcgatacaagaccgggctggaaaaagagcggctgatggaagtacagcaggtggtggaaacggcgcgtaaggcgcgggctgccggttcgacccggttctgcatgggcgcggcgtggaagaatccccatgagcgtgatatgccgtacctggaaaccatggtgaaagaagtgcgggcactgggtatggaaacctgcatgacactcggtatgctgaacagctcacaggcggaacgccttgccaaagcgggtctggattactataaccacaacctcgatacctcgccggaattttacggctcgattgttaccacccggacttatcaggacagactcgacaccctcgacaatgtgcgggatgcggggatcaaagtatgctccggcgggatcttaggactgggtgaagcggtgcgtgaccgcgcggcaatgctggtacagctggcgaatctgccgaaagcaccggaaagtgtgccgatcaatatgctggcgaaaatcaaaggtacgccgtttgaggataatgaggaagtcgatccgtttgatttcgtccgcaccatcgccgttgcccgcattatgatgccaacgtctcatgtgcgcctctccgccggtcgtgaaatgatgaatgaacagacccaggcgctttgctttatggcgggtgcgaactccattttctacggctgcaaactgctcaccaccaccaacccggaagaaaataccgatattgccttgtttaaaaagctggggatcaaacgcgaagccatccatgttacccggggtgacaatgaagagacgaattctttactggatgccatcagccacagcgatgacgaaaaattctataacgcagccctgtgagccgtaccatgtggcagacttttctttctgagcgcctgcagcaggcgcaggaacaggatgcggtacgccgccgcgaggccaatgacggcgcggacgggcgcactctcctgattaacggcagacgtgccgtgaatttctccggtaatgactatctcggcctcagccgccatccggcggtgatcagcgcctggtgtgacggtacccggcaatacggtgtgggcagcggcggatccggtcatgtcaccggttacaccacggcacaccgggatctggaacaaatgctggcggagtggctcgggtttgatcgggcgatcctgttcgtctccggtttcagtgctaatcaggcggtgatcaccgcactgatgcagcgcggcgaccaccttatctgcgacaaactcgctcacgcctccattatggaagcggcgatgcattcacccgctgaattcagccgttttcatcataatgataccgcccatctcagtacccggctgagccggacagagaacagtatcggcaaaaccctggtggtcacggaagggatcttcagtatggacggggatgccgcaccgctggcggcgatcctgccgctcacccggcagcataacgcgcggttgatggcggatgatgcgcacggtatcggtgtgtgtggccgtgaagggcggggcagttgtgatgcggcggggatccgcccggatattcagattgtcaccttcggcaaagcggtcggggtcagcggcgcggcggtgctgtgcgatgcacagacggcggattatctgacgcaatatgcccgtcatcttatctacagcaccaccttcccggcggcacaggcgtgcgccattcaggcggcggtgcaggaaatccgccgtggtgacggattacgggacacactggcggaaaatatccgcttcttccgtgagcgggtggcgcatctgccgctgcaattactgccgtccgcctcggcgatccagccgctgatcgtgggggataaccgtgctgctctggcactgtcgcactatttacaggagtgcggcctgtgggtgaaagctatccgtccgccgaccgtgccgccgaatactgcccgtctgcgcatcacgctgaccagcgctcatcaccgcgacgatatcacacagcttacggaggcgctggatgcattctgccgtcactaccgccccggtgaataaagccgctgttgccgctgctttcggacgcgccgccggacactatgacaccgtggcgcaccttcagcagaaaaccggctgccatctgcgccaactgaccacacaggcactttccgggcggttactgtctgaactgcacgggctggatgccggctgcggtaccggttttttcagtgaacagtggaaagcggattgccgcagtgtgaccgcgtttgatctctcccctgacatgctggcacacgcccggcagcagcagcgggcgacccgttatgtacagggggatatcgaacagctgccttttgcggataatcagtttgatttttgtttcagcaatctggcggtgcagtggtgtgattcactggcggcggcgctggccgggctggtgcgggtggcccggcccggcggggtggtggcgttttccactctgctcagcgggtcgctggatgagctgaatcaggcgtttgcccgggtggacagcaaccgtcacgccaacggttttctcagccgtgaggcggtttccgccgcctgtcagccttaccggcatactttgtcagaagtgtgttaccggctctcctttgattctctgcccgcgctgctgcattccctcaaggggattggtgccacccatgttcatcagggacgtgcagccgggctgatgacacgcaataaactcattcagctggcgaatcattaccccgccgaagacggcgtatttccgctcagctatcttattcagtacggagtcattcatgttggaaaataactggtttttaaccggcaccgatacagatgccggtaaaaccgtggtcagttgcgccctgttacaaacggcccgcaacgcaggtttctgctgcgccgggtataagccggtagcctccggcagtgagatgacagaagagggactgcgcaacagtgatgcgctggcgctgtggcggcatacggtaccgccggtcagttacgcgcagattaacccttatacctttgccgagccgacatcaccacacattgtcagcgaactgactcaaaccccgctggaatttgcggtgatgactgacgggctgcatgcactgaatcagcaggcggactgggtgctgaccgaaggggcgggcggatggtttacgccgctgtcggccacacaaagctatgcggactgggcggcacaaatgcggatgccggtgctcctggtcgtcggggtgaagctcggctgcattaatcacgcgttactgactgtactggcgatacagcaggccggactgaccctggcgggctgggtggctaatgaggtcacaccgccgggcctgcaccagccggagtatctggcgacactgaacaacctgatcccggcaccgtgcctgggtgtgttaccgcatctgccggatccgctgaatcaggacttatccggttatctttcactgccggtttccgcgcactgatcctgcatccggacggatcgtgccgggatcacggcaaatcttccggccgggtgttttttatcaggaaaaaatcctgaattattttttctctttgtgctgaaagtgacaattttatgactgcacaatgtcacgcaaccatgcaccggcaaacgactttattaagttatccactattcctgtggataaccctgtgcattaactttagaaaactcacgctatccttgcaggaacggggctttcactgacattgttgtaaaatcgggcttttatgatttatttataaataacaattagataaataaaatcaagggtcctccggcgtgaaaaatagcaattggtcagaggggcgtcagatttcagcataatttaaaattgcaagtgcttttttttggggataactgtgaaaagccaataaaattttccccggttttgcaagcaaaaaatcacaaaataacggattttttctgccgggggttgaagctggttttttatccagtatcatagtgaccctattcgcgcaggggggcccatgagcaaactatttaaactgcattctgactttaaaccggccggtgaccagccgcaggccattgcaaaactggttgagggcctggaagacgggcttgcgcatcagacgctgctgggggtaacgggctcggggaaaaccttcaccattgccaatgttatcgccacgctgaaccgcccgaccatgatcatggcgcccaacaaaacccttgccgcgcagctttacagtgagattaaagatttcttcccggaaaacgcggtggaatattttgtctcctactacgactattatcagccggaagcctatgtcccgagctctgacacctttatcgaaaaagatgcctcagtaaacgagcatattgagcagatgcggctttctgccaccaaagccctgctggagcggcgggatgtggtggtggtggcgtccgtttccgctatctacgggctgggtgatccggacagctacctgaaaatgatgctgcacctcaccgaggggatgatcattgatcagcgttcgatcctgcaccgcctttccgatctccagtacacccgtaacgaccaggcctttcagcgcggcacattccgtgtgcgcggcgaagtggtggatattttccctgcggaatctgatgattacgcactgcgcgtggaactgtttgatgatgaggtcgagcgcctgtcgctgtttgatccgctgaccggccatatccattatcaggtgccgcgctttactgtttacccgaaaacccactatgtgacgccgcgtgagcgcatcattgaggcgatggaagggattaaaaccgagctggcggagcggcgcaagttcctgatcgacaataataaactggtcgaagagcagcgcctcgcccagcgcacccagtttgatctggaaatgatgaatgaactgggttattgctcgggtatcgaaaactactcgcgctatctctccggacgcaaatccggcgaatccccgccgaccctgtttgattacctgccggcggacggtctgctggtgattgatgaatcccacgtcaccattccgcaaatcggcgggatgtacaaaggggaccgttcgcgtaaagaaacgctggtggagtacggtttccgtctgccgtccgcactggataaccgtccgctgcgttttgaggagtttgaatccctcgcgccgcagagcatttatgtgtctgccacaccgggaaaatatgaaacggagaaatccggctctgatgtggttgaacaggtggtccggccgaccgggctgctcgatccggaagtggaagtgcgtccggtgaccactcaggtggatgatctgctgtctgaaattcgtatccgcgcacagaaaaatgagcgcgtgctggtcaccacactgaccaaacggatggcggaagatcttactgaatatctggaagagcacggcgagcgggtgcgttatctgcactcggatattgatacggtggaacgtgtggaaattatccgcgatctgcgtctcggggagtttgatgtgctggtgggcatcaacctgctgcgtgaggggctggatatgccggaagtgtcgctggtggcgattctggatgcggacaaagaaggcttcctgcgttccgaacgttccctgatccagaccatcggtcgtgccgcccgtaacctgcacggcaaagcgattctctacggcgataaaatcactgactcaatggcaagggctattgaggaaactgaacgccgcagagagaagcagatggcgtttaacgaagcaaacggtattgtgccgaaagggctgaataaaaagattggcgatatcctgaaaatcggccagccgtcagccggggcgaaaaataaaggcaaaggaaaagcagccgcgaaaagcagcgattatcagcgtatgtcgccgaaagagctggaagttaaaattcaggagctggaagcacagatgtaccgccacgctcaggatctggaatttgaacaggcggcagcggtacgggatgaattacaggggctgcgtgagcagtttattgccaactcctgacgggatcagggcagcaggctgattgttttatccagcgcactcagcagcaggcggcggtcatggcggtacggtacatcctgtgcctccaggacctctctgacgatcaggcgatcgccgaggtcgccggtattgatatgcggtgcgcacaccacggcatctatccgtttgcggccgatgcggctctcaatcacggcgattttttcactcaggctgagggacgccgctgccgggctcagttctttgccgagattctcaatatagatcatcggcgcctgattaaaattaatggctttggtgaagtcgggcagcagcatcagcggcatcaggctggtaaagaaactgcccggcccgataataatcagctctgcgcggcagatggcatccagcgcctctttggtggttttcaccggcggggagagctgcagctcctgcggcgggcaggtcagctgatcgacattcacttcgccgtacacttcatggccttcgctgtcgatagccatcagatcgaccggcgtttccgacatcgggatcaatttggctttgactttcagcatattgcggatcagattgatggcatccagcgggcgcacactcatatgatccagcgccttgagcatcaggttaccgaggttgtgtcccgccagttcgccgttaccgctgaaacggtattcaaacatggtggaggcaatcgacggctcagtgatcatctgattgagacagttgcgcatatcaccccaggcaatgccaccctccgcccggcggatccggccggtggagccgccgttatccgtggtggtgaccacgccggtcagccgcgatcccagaccgttcaggcaggacatcacccgtcccagcccgtggcctccgcctaaagcaacaacatgttccagcgacgtgagtgtgcggtttcccatagtgtttatgcattccctgagttttcatatttatttgcgcggtaatctatcataaaaaccaatttttcgcgtcacgatactgagatttatcaaactccggtcaatcataaagataaattatctttttgctgcgtacttttacgtgtgattcagaagtggcagcggcagggaagtcatggtatgagtggatgcggtgactgaaaacatcacaaataaacatcaataacaaaaatcaataaatgacaggaagaacattatgaatgacctgacgtgcaccattccggtgctggaaactgaccgtctgatcctgagtgcccaccgcagagaagatcatgcggcggttgctgatatgtggtcagatacggaagtaacgcatcatgttatggcaggacaaatctccacaccgcgtgacagctggatgcggatgctggcctatctcgggttgtggccgctgctgggctatggttactgggcggtcagggagaaaagcaccggagagtatatcggcgatatcggttttgcggatttttaccgcgaaatggaaaaagacaccagccactatccggaagctggttgggtgtttacaaagcgggcacacggtaagggctatgccggtgaagcattgggagccatactgaactggctgaaagaggtgcgcggtattaatgaatgcgtgtgtattattgcccctgagaataaaccctccatacggctggcagagcgtcacggattccgtccgcaggagacactgagaatgaatcataaatccgttattttctatcaccttacactggactgaccgggcctgctatacctgtgtcagatcaagaaagcggtaaataattttcctgtcaaaccgccgtatttccggcggttttctgtttattatttattcagtggcctataattaatttgctaattaattgaaaaactgtgtgaaattttcgttatccggcgtatccgttccttttcccggaggcccggtaactcgttgtataataagatatatagcgtatttatcatggtaattcccgcagggcaacgctagaatcaactcacttagcgtggttattaacagcattaatgacaacgattaactcctagccttcacacctacgtttcaggtcggaaccggaaatagggtgagctggccgtgacactcacgagtgccaccagggtgcaggatagaaatgtccgcatctcccgtatttggaaaggtgttatgactgaacaactgacagatccctttgcgcgcaaattttattatctgcgcctctccgtgacagacgtttgcaatttccgttgcaactattgtctgcctgatggttataaaccaaacggacacaaatcctttctttctctcggcgaaatccgccgggtgacccgcgcatttgctcagctgggcacggaaaaaatccgtctgaccggcggtgagccgaccatgcgccgcgattttaccgatatcgttgccgctatccgcgaaaatgagaatatccgcaccattgccgtgaccaccaacggttaccgcatggcacgggatatccgcgactggcgtgccgccgggctgagcgccgtgaatgtcagcgttgacagtctcgacccgcgccagtttcacgctatcaccgggcaggataaattcatgcaggtgatgagtggtatcgatgccgcgtttgaggccggttttgagaaggtgaaagtgaatgtggtgctgatgaagaatgtcaatgacatccatctgcctgcatttctgaactggatcaaagaccgcccgatccagctgcgttttatcgaactgatggaaaccggtgacggcagcgatgtgttccgccgtttccatatctccggcaatgttatccgcgcccgtctgttacaggcaggctggcagcagggggcgcgtgcccgcagtgacggcccggcacaggtgttcagtcatccggattatcagggcgaaatcggcctgatcatgccgtatgaaaaagacttctgccagagctgtaaccgcttgcgggtgtctgcggtcggtaatctgcatctgtgtctgttcggcgagcaggggatcacactgcgtgatctgctggcggaagacgggcacgacgcagagctgaaagcacggcttcagcgcgcattgcagcacaaacgcgaaacccatttcctccatcagggggacagcggtattaccccgaatttatctgttatcggcggctgatccgccggtcatatcaggagtttacatgtctcaactcacccatattaatgcggcgggcgaagccaacatggtggatgtgtccggaaagcaggaaactgtccgcgaagcgcgcgccgaagcctttatcaccatggatgccaaaacattacagatgattattgacggcaaccatcacaagggggatgtctttgcgacagcccgtatcgccggtatccaggccgccaaacggacctgggatctgatcccgctgtgtcatccgctgatgctgagcaaagtggaggttcagctgagcgcggagccggatacatcccgtgtgcgtattgaatcctgctgccgtctgaccggtaaaaccggggtggaaatggaagctctgacagcggcttctgtggctgcactgacgatttatgatatgtgcaaagcggtgcagaaggatatggttatcggcccggtgcgtttactggaaaaaagcggcgggaaatcaggacattttaaggcggacgcatgattaaggtactgtttttcgcgcaggtgcgcgagctggtgaataccgatgagctttctctgccgtgtgattacgccacagcggaagatttacgggccgcgttatgtgagcgcggtgagcgctgggcgctggcgctggaatccggcaaactgctgtgtgcggtgaatcagtcttttgtgccgctgtcgcacccgctgacagacggcgacgaggtcgcattcttcccgccggttaccggaggctgagtcatgaataatacccggattgctgttcagactgacaatttcagtgtcggtgaggaatatcagtggctggccggttgtgcggatgatggtgcggtggttacctttaccggcaaagtccgtaatcataacctgggtgataatgtggcggctctgtcgctggagcattacccgggcatgaccgaaaaagcgctggcggatattgttacacaggcgcgtgagcgctgggaattacagcgggtgacactgatccaccgggtcggcagtttgtacccgaatgatgagattgtgtttgtcggcgtcagcgctgcccatcgcggtatggcatttgaagcggctgaatttctgatggattacttaaaaacccgcgcgccgttctggaaaaaagagacattgccggaaggcggtacccgctgggtggatgccagagaaagcgaccagaaagccgcagatcgctggtaattcaccgctgataacctcctgatcgcaggattttttccggcggctgtctgtcaggttaaaaatatttcctgtttgtaaagaaatggggagaattcctgacagtttgcctgctggcaacaccctttttatgtgataatctatagtccttggtcgtttatcatccgataaacaatttgatacagatgaaagggttatccatcatggaccgatttcctcgttctaacggctcgatagtttcacaggcgggctccggtattcaggcttatatggcccaggtttacggctggatggcgtgcggcctgctgctgactgccttcgtcgcctggtattcgtctaactccatggcgattatgagctttgttttctccagcaaaatcaccttcttcggactgattattgctcagctggcactggtctgggttatctccggcatggttgagcgcctgagcgcgtccatggcgaccgggctgtttatgctctattccgcactgacggggctgacactccccagtatctttatcgtgtatacagatgcatctatcgtcagtaccttctttatcacggcagggatgttcggtgcgctgagtatctacggttacaccaccaagcgcagcctgtccgggatgggtaacttcctgtttatggggctgattggtattatcatcgcgtcactggttaatatctggctgaaaagcgaaggtatgacactgatcatcacctatatcggtgtgattgtgtttgccggtctgaccgcgtatgacacccaaaaactgcgtgagctgggtgagcagattgacagcaacaacaaagacaccatgcgccgttatgcgatcgtgggtgcgctgtcactgtacctggacttcatcaacctgttcctgatgctgctgcgcctgctgggcgaccgccgctaatcacagacagaacaggatgtaacaataaaaggccggtgaaaaccggcctttttacgttctgattcacgcaatcttgcgccggaacaacgcataggcagccgttccggtggtcacggcgatcaccagtagcggccagaggctttggcggataacactgaaatcagcatctttgaggtaaatctgtttggtgatttcattaaagtgacggataggattgacccaggtgatatgttgcagccagaccggcatattctccaccggggcaatataaccggacagcagcacggcaggcatcataaagacaaacacgccgataaaggcctgctgctgagtggcggaaagggcggagattaacaggccgaacccgaccagcgacaagccgtacaccatcatggtgaaataaaacagaagcagtgagccggagaaggggatgcggtaagcaaaaatgccgatcaccagcacaatactggcctggaccgtggccactatcagtgccggaactgccttgccgacaaaaatttcaccggtggtcagcggtgagaccagcaactgatccagcgtaccctgttcccgctcacgggcaacagagagagaggtcacaatcatcacgccgatggtggtgatcagcgccaccagtgacggcacaataaaccatttataatccagattcgggttataccagttgcgcaccaccagctcactggtgaccacctgcggcatccgctcctgctggtaatgcgcggtgatttgctgaacataattggcagcaatctgcgcactgttggagttccgtccgtcgagcaggatttgcagctgtgccggtttctgtccggcgagctgcgcactgaaattctgcgggaaatgcaccagcagcagggctttgcggttatcaatcacatcctgcacatcatgccggttctggatcagcagcacatcagaaaaggcactggctttggcaaactgctgggtcagctcaatggatgcgggacccttgtcctcatcataaatggcgatagtcgcgttggtgacttccaatgttgccgccagcgggaacaaaatcatctggaataataccggtacgatgaggatcgtccgggtctgccgttcacggagaagtaattgcagttctttgataattaaggtgagtatccggtgaaacatggcagtctccttaatcaagccggcggcgggttttcagggcggtcaggccgataaacacaagcgctgacaggatcagcaacaccagattactgataatcaccggcataatattacccgccaggaacagtgtctgcagactttccacaaagtagcgcgccgggatcacataagtcaccacctgtatcgccaccggcatgctgtcaatttcaaatacaaagccggacagcataatcgcaggcagaaacgcggcgttcagtgaaatcatggcggcgttaaactgattgcgggtcacggtggaaatcagcaaccccataccaagcgcggtggcgagatagagggaggtcaccagggccagaagccacagcgagccgtgatacggcacatccagcacatacacggtcaccaccatacacagcaccatgacaaagctgccgagcacctgatacggcagcagtttggagagcagcagttccgttttggttacctgtgttgagagcagagcttccatggtgccgcgctcccattcccgcgccaccaccagtgaggtcaggatagcgccgaccacggtaataatgatgctgatagcgcccgggataataaaatgctggctgatagccgccgggttgaaccagtagcgcagccggacatcaacaggcggctcactgctgatcccccgatcctgtgcccgctgctgctgccagatctgccagataccgctggcatagccctgcacaaagttggcagtattgggctcgctgccgtccgtaatcacctgaatctgtgcgatatcgccctgacgggccagacgtttgtccaaatccgccgggatcaccacaataccgcggatatgccccgcctggagtttatcaattaattcacggcggttatcactgagggtggcatcgataaacggagagccggtaaaggcattgatcagttcccgcgccggttcgctctgctgattcaccaggatcccgaggcgcagttttgatgaatccagattgataccgtaaccgaaaataaataacagaatcagcgggatcacaatcgcgatcagggcactcgacgggtcgcggacaatctgtttgctctctttgatgcacagcgcccgcagacggcgccatgaaaaaccggaaggtgtgctcatgatgcagcctcctgtgcgctttctttgtcatactcctcgaccagcccgataaaggcatcttccattgacggatccggacgggtgtcatcagccaccgaggctttcagctcatcaggggtaccggcggcaatgattttgccgtgatagaccagcccgatgcggtcacaatattccgcctcatccataaagtgagtggtcaccatcacggtgacgcctttatccaccatgccgttaatatgcagccagaattcacggcgggtgagcgggtcaacgccggaggtgggttcatcgagaaagagaatatccggctcatgcatcagggcacaggccagcgccagccgctgtttgaagccgagcggcaaatcttcggtggtctggcgcaggatcggggtgaaattaaaggcatttaccatatcatcgattttctgctgctgcgctttaccgcgcagtccgtaagcgccggagaaaaatttcaggttctgggcgaccgtcagattgccgtagagagaaaatttctgcgccatataacccaggcggctgcgggctttggctgagctggttttcagatccagacccagcaccagggcacggccactgctggggatcatcaggccgcacatcattttgaaagtagtggatttgcccgcgccgttcgggccaagcaggccgaaaatctccccgcgcttaacctgaaaatccacatgatcggttgcggcaaaatcgccgaattttttggtcaggctgacggcttcaattacggtttgattgggtgccgccgggatctgcggcataatctgcgccagctgtgagcggtgagaagggccgccgccgagcagatcaataaatgcatcctcgaaacggggcttagcgggcagcagctctgcatccggacatttcagtgcgctgagcagggtgcgggtatctgcctgtggttttacaatcagccggacataacgtccctgaataacaccgtcggacacctgtggctgaatcaatgcttcctgtaaaatgcggcggcgttcaccgggggcagcggaaagcaggaaagagcggccttccatcgtttcggtcagttgtgccggtttgccttcataaatgacttttccctgattgagcagcagcacatcacggcactgttccgcttcatccaggtaagaagtgctccagaggatcagcatgccgtcatcggcgagagagtgcaccatccgccacagttcgcggcgggcgataggatcgacccccacacccggttcatcaagcagcagcacctgcggctgcccgagcagtgtgcaggccagtccgagcttctgtttcatgccgccggagagtttacccgccatgcggccggtaaaacgggtcagatcagtaaaggtcagcagccggtcaaataccgcctgctgttcatggtgcggcagaccgcgcagttcggcatataaacggaggttttccatcacggacagatcttcatacagcccgaatttctgcggcatataaccgagctgtgcacgcagagcgacactgtcctcaatcggatcaaacccggctacgcggatctccccgctgtccggtttcagtaatccggccagcatgcggataagtgtggtttttccggccccgtccggcccggcaagcccggtcacaccgccgccccggatggtggtggtcagccggttaaccgccggattatcaaggccgggaaagcatttttcgacggcactgagggagatagtgatgtctgacatcgtctctccttacggctgcggctcttcattatcaaagcggatggtgaccggcattccctgacgcagcagcgggtcggcatctgtcaccacaatgcgcagacggtagaccagatctgtccgcagtgccggggtttcaacggatttcggggtaaactcggcagtcggggagacaaatccgacatgcccgtgatacggtttgcccgggcggctgtcggtttccagtaatactttacggccgggctgtgcctgtcccagctcgctttcgctgacatacgcccgtacccacaccggattggtcagtgtcagggtgaacacggtgctgcctgccggtaaaatcgtaccgggctcgatggcgcgggtcagaatagtgccttctgccggtgcagtcagacgggtgtccgccaggtcaagctgtgcctgctccacggcggcttcagcctgtttcagctgtccgcgcgcttcggcaatctcttctttgcggtaaccgttttccagctggttcagtttgtcctgtgaggctttcagtgccgcatcggcctgattacgctgattgcgggcattttccagatcattggcggagatagcccggcttttcatcagtccggcctggcgctgataaaactgacgggcaaattccgccgctgctgtattacgggcaacgtcggcttttgcctgcgcgatttcttccggccggtagccggtttccatcatcagcaatgcggcttgtgcgctgtcccgtaccccttccgctttcagcagggcgtgacggtacggtgtatcatccagcataccgagcagctcaccgggctgaaccgctgctccttcatccgcattcagggattgcagtttgccgccgacacgaaaaccaagattcaccgtccggatatccacattaccgtacagcagtgcaggccccgacgggcgcgactcccaccagtaccatccgccggcaccagccagcaggatcagaataatgataaatatcccggtttttttcattggcttcatgaattgattcctggtgagttatcagagacggtggtgtatcagttccggtaatgctgctttaatccgctgagcagcaaccggatatgttcccgcagcacatcattgatcatgtcatactctttcgggccgatattatcccagccggtctggcgcagcaggttttcccgtgccagacggaaagataaaatctcccccatcagagcgtgtgtatggatcagtgtgttgatatgtccgtccggcagcccggtataacgggcaactaatctggcctggcgggtaaaaatcgcggacagcgcctgttcgtggataagtgtgtaagctttggtcggaattaactgctcgcgtgacataatccggctgatattaatattacttttcttcagtaccagttcattataggcaagaaaactcagttcaatcagttgcagacagcggctttcatcccgttcgtcagcgcggttttccagaaacagatcgatttcttcaatgacaggacggaattcatcacggataatgtcggcaatatgctgtgcaacggccagatacaacccgtcttttgagccgaaataataagcaatagctgcgatattttgatccgcacgttgtgcaatctggcgagtagtggcactatttgggccgttcagtccgaaaatctcaatagcggcttccagtaaagcgagtttggcttgttcgcctcgcggcgtattagtcgtattgactgacatggcgtatatccttatgggggtgtcggcataaacgagagatcaatcatatgattaactgtatgctcatcagtatctgttgtaaatgagcagtaagcaacggattgatcacagacgtattttatcgatatttcttccggagtgacggattaattttcgacattcaattatcagcaggccccgcagacaacagaccggggcggagtcttaacaattcatgagtttttcatcattaccattatgcccggaaattcagaaggccgtcgcagagatgggctacgaacagccgaccccgattcagatgcaggccattccgcaggttcttgccggacatgacttattagccagcgcacaaaccggtaccggaaaaaccgccggttttaccttacctatcctgcaatatttacaggataatccgcgcaaaggcggcgggcgtccggtccgcgcgctgatcctctccccgacccgcgaactggctgctcagatcggcgaaaatgtccgcgagtacagccgccatctgcgcacccgttcgctggtggtcttcggcggggtgagcatcaacccgcagatgatgaaactgcgcggcggcgtggacatcctgattgccaccccgggccgtctgctggatctggaacatcagaatgcggtggatttatccaaagtcgaaattctggtactggatgaagctgaccgcatgctggatatgggctttatccatgatatccgccgtgttatcaaaaaattaccggtgaaacgtcagaatttactgttttccgcgacattctccaatggtatcaaatccctggcgaataccattctgaataatccggtgacggtggaagtttccccgcgcaacagtgcctcgcagcaggttacacagtttgttcatctggtggataaaaaacgcaaagcagaactgctggcgcacctgattggccgtgataactgggagcaggtgctgattttcacccgcaccaaacacggtgccaaccgtctggcggaattccttaacgacagcggcatcaaagcggcggctatccacggtaacaaatcccagggagcacgtacccgggcactggcggatttcaaaagcggcgctatccgcgcactggtcgcgacggatatcgcggcacgcggcctggatattgagcaactgccgtatgtggtgaactatgaactgccgaatgtggcagaagattatgtccaccgtatcggccgtaccggacgtgcggaggctaccggcctggcattatcattggtatgtgtcgatgagcatgatttattacgtgacattgaaaaactgctgaaaaagcaaatcgagcggatggctgaaccgggttacgatccggatccgtccatcaaagccgaacctatccagaaagcgaagcagggtcgcggcggcaacggccgttccggcggcggacgtcagggcggacaggggcgcagcgccgaaggccgcggtaacagcggtggcggtgataaacgcccgccgcgtccgcgtcagcacaaaccgcgttccggcaacagcgactccggcagcccgtggggtaaccggggcaaataacggaaccggctcatgcgtgttcttttagcaccaatgcagggggtcttagaccccctcgtccgtcatctgctgacggcggtgaatgattatgatctctgtatcaccgagtttgtccgtgtggtggatatgctgttgccggagaaactgtttttccgtctctgtccggagctggaaaacggcggtctgaccgaatccggcacgccggtgaggatccaactgctgggacagttcccgcaatggctggcagaaaatgccgcgcgggcggctgatctcggttcacacggagtggatctcaactgcggttgcccgtccaaaacagtgaacggcagcggcggcggggcgacgcttcttaaagacccggagctgatttatcagggcaccaaagctatccgtgaagcggtaccggcacatctgccggtgtcggtgaaagtgcggctcggctggagcagcaatgcgcaccagtttgaaatcgccgatgcggtggcgcagggcggggcaacggagatcacggtgcacgggcgcaccaaagaagcaggttatcgcgcggatctgattgactggccggcgatcgcagctatccgtcagcggcttccgattccggtgattgccaacggcgaagtccgggactggcagagtgcgcagcaatgtctggccgtgaccggctgtgatgcggtgatgctcgggcgcggagcgctcaatgtgccgaacctgagccgggtggttaaatataacgcgccctttatgccgtggccggaagtggtggctttgctgcaccgctacacgcagctggaaaagcagggtgataccgggctgtaccatgtggcacgtatcaaacagtggttcagctatctgcataaagcctatccgcaggaagcggatgaactttttgccgtgatccgcccgctgaaagattctgcctcgattgcacaggcgattgcccgggctcagggcgcataaaatttgctttttttaccatatcgcactttaattgacaggtgagccggattttttcttaacccgttaatacagcaggaggtactgatgaattttctgtcctggattatttttggcctgatcgccggtgtgctggcgaaatggatcatgcccggaacctataatatcggcattattatgacgattgtgctgggtgttgttggtgctgttgtcgggggatatatcagtgttttcttcggcaaggggcgtgtcgacgggtttaatttcggcagctttgtggtcgcggtgatcggcgcgatggtggtgctgtttctcgccgggaagtttgcgggctgacagccgcataacagatttaaaaaatgccggagcagctgacgcgctccggcatttttttatggttcaatcggcagggtgtctgagccgccccattccgcccaggagccgtcatacagacggacattctgatggccggtgagcgtcagcgccagcagcagtatggcggctgtcataccggaaccgcaggacaccaccaggtatttgcttaaatccacacccgcatcacggaatatctgctgaatctgtgtcggggatttgaagatcccgttttctaccagagtattccacggcacattgcaactgccgggaatatggccggaacgcacgccgggacgcggatccggtgccagcgcctgaaaacggtcggcagaacgggcatcgacaatctgaatttccgggtccgtaatcgccagcagcacatcatctttattcaccgcattatgacgctgaaattccggcacaaaggttttcgcctgcggcggcggcagttcaccgctttcggtggtataaccggcaccggcccaggcattcagcccgccctgtaaaatacgcagatttttcacaccgaaggttttcagtgtccaccaggcgcgcggggcggagaacaggttaccctgatcataaataatcaccattgtgtcattatcgatcccgaactcaccggcagcttgtgcgaacacctccggtgatggcagcatatgcggcagcggggaagagagatcagcgactttatccagatcaaaatagtgtgcgcccggaatatggcgctcaagccataactgatggtaatctgcgggctgaacgggcggagctttgctgacatcgagcacaacaagattgtcgtcattcaggtgcgtgtgcagccagtctgctgtcacaaaatagtctcggtacatcgcaattaacctcgttagcaggacgcagagtgctaccgggtttctccggtggtcgtttcctgcgccgtggatggagtctcaggggcaacagaacgattatacatattcataccggcaagaaaaacgccgccgagggagccgaaggcaaaaataaaaatgaaaataatcaataatttcttcatagatgtattgtggtcttatctgatggagcctgtctgccggacaaatccggggttatgttgattaattgtaacaaattattgaagcaaccgtatgcagaaaatgagcggtaacggcccggacatgctgattttttttctgtagtgtgaaacaatagcgccctgtttatttatccataggtttttcagatgcccctttccgccaccgtcaaacaacaaatcagcgcctggtacaaagccctgccggagcagattgacggctttgtcccgcgcgctccgcagcgggaaatgattgcggaagttgcccggacgatggcgggcgatgaagggcggcatctggtgattgaagccccgaccggggtgggaaaaaccctctcttatctgatcccgggcattgcggtggcgcgggaacagcaaaagctgctggtgatcagcaccgccaatgtggcgttgcaggatcagatctacagcaaagatctgccgctgctggcaaaaattatccctgatctgcgttttaccggtgcattcgggcgcgggcgctacgtgtgtccgcgcaatatggcggtgatcggcgcggcggaaggggaacaaatcgatctgatgctgctgctcgaagataaagcggatgtggcaacggcctctgaacgcgataccgtgcgcaagctgcagaatgattttacctctttcggctgggacggcctgcgtgatcaccataaaacctccattccggacagcctgtggcgaaaaatcagcaccgataaactcagttgtctcggccgcaactgccagtattactcgcgctgtccgtttttcctggcgcggcgtgaaattgaaagtgtggatgtggtggtcgccaaccacgcgctggtgatggcggcaatggaaaatgaatcggttctgccggaaagcaaaaaattgctgctggtgctggatgaaggacaccatatcgctgatgtggcccgtgattctctggaagtggaaggggatatcaccctggtatcgcttcaggcgcagctggacaacctttcccgctttgtcacccagtatctgcaacagttccgtccggtaaaaccgccgaaactggcggacagcgcccgtctgcagaaacacctggaagcgatgtcagatgtgtaccgcgatgtggcgatgtacacacaggcgctgctgccggagcaggcggcggatccgcactatctgtttccgctcggggaactgccggagccgctgacggcggcggctcagcagctgtcaaaacagacggatgccctgcacagcatggtggaggggatactcagtgatctgaacgaacagacggcaaaacaggatattgtccgtctgcaccgcgccatcctcaccgccggaaagttcctcggtgcgctggaaaacagcgctaaactgtggcgtctggcggcgttgtcggaaatttcacacgcgccggtttcaaagtggctcagccgccgctatgaaaaaaatcagtctcacctctggttccactgcgcggggatccgcgtcagcgaacagctcggccacctgttatggcgcaatgtaccgaatattgtggtgacctcggcaaccctgcgttcactcaacagtttcagccggttgcaggaaatgaccgggctgagtgaaaaggcggacgaccgctttgtggcactcgattccccgtttgatcactgccgccaggggcggctggtgatcccgaaaatgcattatgaaccgacaccggcggatgaagccgcgcatatcggggagatggcgcgttatttccgctcccagctggcgtccggtgaacaccgtggcatgctggtgctgtttaacagtcagcgggcaatggatctgtttctcacccatgtgacggatttacgtctgcaactgctggtgcagggggatcagccccgttaccggctggtggaaacccattgtcagcggatccgggacgggcagaacagtgtgcttatcggcctccattcttttgctgaaggccttgatctgaaaggggattacctgactcaggtgcatattcacaaaatcgcgtttccgccggtcaccaacccggtgattatcacggaaaacgactggctgaaatccctgaaccgctacccgtttgaaatccagagcctgccgggagcgtcatttacgctgatccagcaggtcggacggcttatccgcagtcaccagtgtcacggggatgtggtgatttatgaccagcgcctgctgaccaaacggtatggcagcaggctgcttaatgcattaccggtctttccgattgtgcggccggatattgaaccggaaaaataatataaacggctgagcgttattctgccgtggcggtaaaggttacgttaccgccctgatcattgatattactgactgtcagatggtcaccgcgtttaactgctctttttaccgctatttccgaactgcttttcggttgcagcataaaggatttatgcagtatttgttttttatccgccagggtgatttccgtaatggtaatgtggtacggcgatgtattattgacccgtattgaatgactgccggactgaaatgtaacctgctgtgtggcagtgtttctgtcacttaatccggcagggcggtaaaaaactttaaaccgtgaacggacggccagttgtcctgaatttttttccttcagtgatgatgtttcactgaccggcggaatatcaaggacattcagccaccacaggctttctctgtccgacggcatactgtttttatctatcagccgcatacgtaagatttgctctgccccggcattgatgcgtgaaaccggcggggtcagttcaaacggcgtgaccggcagtttcgcgggcagtgtttctgaatcccctgaatcaagccagtattgtacaaataccggtgaggcagattcattattaaccctgacagtaatatctttttcaccttccggataaatataccgtgtgctgttcgtactgacaccatctgcgaatgcaaaggcactgataaaacacccgataaataacagatatgatttcattttatttccccgctgtgcacgaaggaatacacggacaggtattattactgagataatgacctgccatgattacgtattaacgtattccctttatttcatttaattttatgcgttttttttatttttgaaatacgtatgttttccctgttttgtttattacggaatactgataataccgaaaaataataagcaaaaaaaaccgcccggaggcggtataaagggtaggattgactcacaaggtcttactgtttttattgtctgcgacacatactcacacatgagatgtttatttcagcaccgtaacccgccggctgcggtgccgtatttctgacgattattcgatattggcttcaataaaccacagatactggtcgaggtcgcgggaggcggcagtaaacatatctgcggtattttcatcctcaacgcggctgacggcacggcggatatcgttggcgacaattgcataacggtcggccagtgctttcaggtgatcctgcacagtgtggatatcggtcggataagccggtaaagcagaggctttactgacagcctgtgaggtaccgagtgccacaccgccgagctgaacagcgcgttcggcaaaggtatccaggtggctgttgaggctgtcacggaagccgtccagcatttcatgtacagcaatgaaattacggccgcgcagattccagtgcgcctgtttggtcatcagcgacaggtcgataaactgcagaacctgatgattcagttcatcaatggtttcctgcttaatatcatcagtgacatcgttacgggtgtacactaagtgagaagctgtggttttcactaatttcgcggtgctcattattgttccccttatttattccgttaaacatctttgtttcgatggggttactatagggcagcgcagatgatagttaaattcgattaaatctatagaatcgataggcaaaccggcacgaggccggtttcagtatggcgggtgattactcaacagctttgatttttgattttggtttgatggtcagtgccgcacccatggaagcgatgacaatgcagctcagcgccagccattgtgtgaataacagatgctcgctcaggaagataatacccaccattgcgccaatcaccggttcaagactcatcagtatgccgaatgtccgtgtcggcaggcgggtcagtgccaccatctccagtgagtacgggaaggccgttgataagatagccaccgccaccccgaccggcagtaccgcccagctgaacatcacactgagatcactgtgataagcccctatcgggaaaaaaatcagtgcggcgataagtgagccgacggaaaccgtggctgcgccgtaaaaccgcccggcccgctggccgaagataatatagagtgcccagcctgccccggcaccaagggcgtataacatccccaccggatccagctggttaatctgtccgatctgctcaccgagcggcagcaggaaggccagaccggcgatcaccagaataatccagagataatccgttattttccgtgccccgaacatggcaaccgccagcggcccggtaaactccagagcgaccgcaatcccgagcggaatggtggacagcgccagatagaacagatagttcattgccccgagcgagaggccgtatcccagcatcggcagcaaagactcacgggtaaaacgcagccgccagggtttaaaaatcaccagcagaatcgctgtacccagcagtaatcgcagggcggtcacacccggggcaccaataaccggaaacagggttttcgccagtgaggcgccgctctgaatagagatcatcgacagcagcaataagccgatcggtaaccacggagaaccattttgctggcggggagacgcagacatgaagaacctcgggagcaataaaaatgcggtgagacaattagttatgttgaattgcatgcaaaaggcagaactcgtcctgcaatcttagcggggcggctgacggatagcaattactgatttaagaggatattaatccgcagacagcgattgccgggtaacatagcaaaatctgacgagtgctatcttcagaccgcttgcgtatactgactgccggattttcatttcatcacgataaggacagggcagatatgcgggatattaaacgaatagcagtctattgcggatcagctgcaggtgcatcagagatttaccgccttgaggccgtgaaatttgcccggattctggttgagcagggaattaccctggtttacggcggtgccagtgtggggatcatggggacggtggcggataccgtactccgcgaaggcgggaaggccatcggggtgatcccggcattgctggaaggacgggagattgcccataaaaacctgactgagcttcaccgcgtcagcaccatgcatgaacgcaaaagcaaaatgattgaactggcggacggctttgtcgcgctgccgggcggcttcggcaccctggaagagtttgccgaggtctttacctggagccagatcggactgcatcagaagccggtcgggctgatgaatatcaataattattatgacccgctgctgtcgctgatcagtaaaatgaccgatgagcagtttatgcaggaaaaataccgccatatggcaattgtcgaaacggacggtaatgcacttatccgccgcttccgtgactatgaggcacctgcggtcaaaacctacgattaaccggagaacaccatgataatccgccctgccgccctgaatgatactgaccgcattgctgatctttatcagcagttatttaccctgatggcggaatatcagccggatcgctggcgcccggcgcagcaggatcgcggatttatcgaaaacgccgtgacggatgaaaaattctgtctgctggtggcggaaacggaagggcgtattgccgggttcgcttttgcgcagacgcaggatacctcaccttacacctgtgtggtgccgcgtcgtttcggttatatctttgatattgtggttgatccggcggtacgcggacagggcaccggtaaaaaattactggatgctgttaaagactggtcaaaggcacagggccatacgcatctggagttgtcggtgctgccggaaaacaccggtgccatgcgtttatatgagcgcgaaggctatcagccggtgatccacacactggcgattaagcacggataatccggttgtcagcatattgagaaaaaatcagcggaaagtattgcggctgccagaatcacaattactgcaataagcgctatgccggacagagcaaacagaaacagctccgccacaatcacaccaccgccgcacagcagggcaatacgtgcggcgattttattttctttgcgcataaacccggcaccggcaaaaaacagcgccagcagtgccagtgccgttccggtatagcccgcataacgggctgattccgataacgcgcgccgttcttcatccgccggtgtggtttccgcctgatactcatgtccccgcagcgccgctttggcagcctgtttcatcgcactgattttgttataaaccacctgttcggcaggcggacggctttcaatatatttatcagtctgatattgcgcaaaaaagaaggcggctatagcgagcaggccgagtaacataccggaaaaactgaacgggttttttctgacgatccgtttcatggtgaatatccttataaaaagagcctctgacagaggctctttaactgtataccggaacggcgtttttgtcagttggtcagatgaacggttttaccgccgacaatggtgcgcagcactttcacattggcaatatcatcagcaggtatctgaaacacattgcgatccagcacgatcatatccgccagtttgcccggctccagggaaccgagaatatcttcccggtgctgggcataagcagagtcaatcgtggcggcacgcagtacttccgtgacagtcaggtcacggtcggtgtccagacgcggtgccggctgaccgttgaccggatgaccacggcgggtggcagccactttcagatcataccattcatcaaaatcatcaatcggccagtcactgccgaacgcaacgactgcaccggcatcaataaacttaccgataggttccaactgctgaaaacgggtttcaccgatcatattgcgggtgaattccgccagttccgcagtcggtgccgcccactggaaggagaggcaggcaatggtgccgagtctggcgaaacgcgcgtaatctttggcatccaccagctcattgtgagccagtcccggacggatatctttgcccggatgcgcagcccgcattttttcgatgccgttgagcaccatatcaaccgcaccttcaccgacggtatgcagatgcggatcgtacccggcagctgcgatacgttcgagcagggcatcgatcacctctgaagtgaaatagagatcaccgtaattttctgtctctcgccagtccggttgtgccggggtaccgtgattgatccggtatggtttcagcagggaggcggtcatggtcgggaactgaagcacaccatcaacaaacattttgatgttttttaccgcgatgcccggttccgggccccattgcggctgatgataacgctccgcaaaggcaacggcgttttgcacggcctgcggcacggatgccacatccggtgcatcatccggggtgatttcacgggcagcctgcacacgcagtgtcagttcaccctgttcctgtaatgcacggaacgcatccagctgtaattccgccacacgggcatccatgaccatggtgacgccctgttcattgaggactttctgcaccagacgggcaacatccaccgcacggtcggcctgaatggacggaatactgtccgccgcacgcatggccggggcatcctcaaggataccgttcagttcaccattggcgtgtttgccgattttaccgtcactcggtgccggggtttctctggtgatgccgaacagttccagcgcacggctgttggcaagcagggtatggcagtcattggagaacaatacgacagggcggcgggtattgagcttatccatatcttcgcggtacatatcaataccggccggtaacatgccctgacgcagccaggcggtcactttcagccagtcgttttcgccggtgcgcggatcattatccagatgcgcctgcacacgggcgaggatctcatcaatggtcagggattcataattcagatggcagccgaacagctgaataccgccccagaacgggtgcatatgaccatcaataatccccggcatcatcattttgccgtcgagatcgataaactgtgtatgctcaccacggaatgctgccatgtcatcattatcaccacaggcaagaatacggccgtcagcaatggcgatggccccggcgacgcggttttccgcatccgcagtatagatataaccgttgtgataaataatatcagcggcagtcattttcattatgctctccaatcctcatcaacagagttaattgataattaagtgagtttcttcttccgtgattgacggcggacggcgggtaaagaagcgggtgatcacaccgaggtataccacaccgatccccagccagatcagaccgacagtcagtgcctgagcatccaggctggtccacagccacagggtcagcagcaccccgatcgccggtaccaccagacagcgcaggatcacggcagccgtcagcggttctttccggtcaataataaagtgtttgataacacacagatttacaaaggtaaacgcaatcagtgcgccgaagcttatcatggatgcaaccaggctcagggagagcaccagcgccatcagtgaagcgagggcgacaaacaggatcgatagtaccggggtgttgaatctggcatgcagacgggcaaacacagagcgcggcagcaccccttcacgccccatggcataaaaaatccgcacaatactggcctgggatgtcatcgcggaggcaaacacgccgatcacataggcagtaataaaggaggatgccatcagtgcgccgccgactttttccatcacctgaatactggcgatatcggtgttcggcaggaaatcacgccacgccggatagctcagatgtgcggcgtaagagataatgataaacaacgtaccggcaataaacacggtatagaggattgctttcggcagcgcccgtttggcgtctttggtctcttccgccatggtggagatggcatcaaccccgaggaatgcgagacacagaaccgccgcaccggcaaacagcccggacacctgatcggacatcaccgtcagcggggcgagcagcgcctctttatccagcgtgaatgctgaactgaagctgagatacaggaacagcgcgataaatatcagctgcatcacaatgatcagcatattcatcgaggtgaccagtttgatcccgagaatattcagcacagagacaatcacaatggtggagacgataatcagctccatcggcaccgacggcagggcttcatgcacaaaaataccgatggcgatatagttgataatcggcagaaacagataatccagcaattgcgcccagccgaccagaaacccggtattcccgccgaaaattttctggacataggaatatgcagagccggccagcggcagtgtgctggtcattttacaatagctgagtgcggtaaacaggacggctgtcagagtaataatataagcaaccggtaaatgaccttcactgaggacggtaacctgtccgtaagttgtgaagataccaaggggcaccatataggcgagcccgaagaaaaccaacgcgggggtatttaagacgcgtttcatctgcacagtattctgttgcatttttacagcccttcccaatagcctgaaacatgccgcggatatcgcatccgggcacaatatatatctccggccgtcagcggatgacggtcagtctgcatttattttcaataaacctcgcaccttgcgtctgcatcgtgcgcactttactgaaacgtcagtgataaacgggccatcaccacacgctggggtaaatgcaggcggcgtacaatatatgagttatctgtatttggcaacagaagttgcacaggataataataaggataaaccatccttaccagtcgtgcttttccggcttattatcaggcataccgaaaacaacgtaacctgatatattttcagtaaattcattgcaatacctgttttaattaataagccggtgttaccggcaatacattacgtgacataacgtaattcgttatccggccacaaaagagaataaccggggtatttttgaaccgggagggtgacggataagtctcaggctgctgcttttcatcgccgtaaaacggcggataaccgataaataaagataaagtaatagcgggtcaaaaagagaatgtaaaaaataaccgcatccccggcggaatatccccgaaaataaacgtattgcgggagagaaataggatccgcagcgattcagtattatttaccggcagtcataccacttttatggttacataatatgatggcaaataattaaaattataatgaattgatttttatgtaattttgagtctttctgtacaactgaggccggcttttaatcactttatgttcacgccctgatgacggatattaccctcccggccgaaaataacagagtgccgtaatctgaaatactctttttgtattttctgcctgttttttccgccggaacgatgtttgatacaaatattaacaatgtgttaattctcttaaagtgtgaacgaaatcgtttgcttttgttttttgcggctatagaattcgtcagatttttttggcctgagaaaagcaacaggaggcaattgtgtccggggataaaaattacagtcatgggcctgtgcccatatccgcgcggaaaggcgggctggcattaacctttgtaatgctgggtttgaccttcttttccgccagtatgtggaccggaggtgctctcggtaccggtctcagttttaatgatttcttcctcgcagttcttatcggtaatcttcttcttggtgtctacaccgcttttcttggtttcattggttccaaaaccggcttaacaacccatcttctcgcgcgttactccttcggtattaaaggctcctggctcccttcattcttactcggcggcacacaggtcggctggttcggtgtcggtgtggccatgtttgccattccggtcggcaaagcaacgggctgggatatcaactggctgatcggtatctccggggtgctgatgacggtgacggttttcttcggtatctctgcgctgaccgtactgtccgtgattgcggttccggcgattgccattctcggcagttactcggtttaccttgcggtaaccggtatgggcggcatgagcgcactgcgtgatgtgatcccggcacagccgattgattttaatctggcgctcgccatggtggtggggtcgtttatcagtgccggtacgctgacggcggattttgtccgcttcggccgcaagccgaaaattgcggtgctggtggcgattatcgccttcttcctcggtaactcactgatgtttatcttcggggcggccggggcggcgtctctcggtatggcggatatctctgatgtgatgattgcccaggggctgttattaccggcgattatcgttctcggtctgaatatctggaccaccaatgataacgcgctttacgcctccggcctggggtttgccaatatcaccgggctttccagcaaaacgctgtctatcgtcaacgggcttatcggcacactgtgcgccctgtggctctacaataattttgtcggctggctgaccttcttatccgccgctatcccgccaatcgggggcattattattgccgattacctgatgtaccgtcaccgttatgaaacctttgaccgcagcaaaatgcgtgatgtaaatgtcagcgcactgctggccgtggcggcaggtgtgattgccgggcactggctgccggggattgtgccggtgaacgcagttctcggcggggcattaagctatgctgtcctcaatccgttacttaaccgtcgtcgtacaaccaacccggagatgacccgtgcttaatcaaacagtaaaacatatttttaatgcccgtctgccggatcgtgatggcctgtggcgtatcgacatcgataatcagcgcattatcgcgattgtgccgcagccggagggtgaagtactgccggagagcctggacgccgaaggcggcctggtcaccgcgccgttcgtcgagccgcatattcacctcgataccacccagaccgccggggaaccggcgtggaaccagtccggtaccttatttgaaggcattgaacgctgggcggaacgcaaagcgctgctgacgcatgatgatgtgaaaacccgtgcctggcagaccctgaaatggcagattgccaacggcatccagcatgtccgcacccacgttgatgtctccgatgcgaccctgaccgcgctgaaagcgatgctggaagtgaagcaggaagttgcgccgtgggtggatttgcagattgttgcgtttccgcaggaagggatcatgtcctatccggacggtgaagcactgctggaagaagcactgcgcctgggcgcggatgtggcgggggctatcccgcactttgaatttacccgcgaatacggcgtggaatccctgcacaaaacctttgcgctggcacagaaatatgaccgtctgatcgacgtgcattgtgatgaaatcgatgatgaacagtcccgtttcgtggaaaccgttgccgcgctggcacaccgtgagggaatgggcgcgcgtgtcaccgccagccacaccacggcgatgcactcttataacggcgcttatacctcccggctgttccgcctgctgaaaatgtccggcattaactttgtggcgaacccgctggtgaatattcacttacaggggcgtttcgatacctatccgaagcgccgcgggatcacccgtgtcaaagagatgctggcggcggacattaatgtctgcttcggtcacgatgacgtgtttgacccgtggtatccgctgggcactgccaatatgctccaggtgctgcatatggggctgcatgtctgtcagctgatgggatatggtcagattaatgacgggctgaaactgatcacggaatacagtgcgcgcaccctgaacttacaggattacggcgtggcggaaggcaaacgcgccagcctgctgatcctgccggcggaaaacgggtttgatgccgtccgccgtcaggtgccggtgcgttactctgtccgtgacggccgtgtgatagcagaaacacagcctgccgtcacacagatccatctggataaaccggagactatccgttacagccgcacacctcgcactgaggatcaggcttaaggttaatggtgcggaactgcatgcgcatcgcatcaaacagcaccacttttccgctgctcacctgcccgtagccggtgagcagtttgatgcactccatcgcctccagggtgccgatggtgccgaccagcggtgccatcacacccgcttccacacaggtcagactgttttccccgaataaccggctcaggcagcggtaacagggttccccctcctgccaggtaaagacagaaatctgtccttccatacggatagcggcaccggacaccagcgggatcttcagctgatgacacgcccggttcagttgttcgcggacagcgacattatcggtacagtccagaaccacatggtgagaccggatcagagcggtaagctcatcatcatccagctgtttggtaacggtttcagtccggcaatgcggattgacggctttcagcgcaatcgcggcagattctgtttttgccatcccgatacgggcatcggtatgcaggatctgacgctgaagattggagagggagaccgtatcaaaatccagcagcgtgagatgccccacgcccgctgccgccagatactgcgctgccgcacacccgagtccgccgaggccggtgatcagcacacgtccggctttcagcgcttcctgaccatcaaaatcaaagccgcgcagcacgatctgacggttataacgcagtgcttcctcatcactgagctcaatatgtacgggttcagtcgccatcagtcattcttcagtaaatggttaaaaaactcgatttcaacagtttcaccggcggcaaccgcaccgcgctcacgctccagcacaataaagcagttggcgaggctgaatgaactgaaaatatgcgagccctggtcgccggtggtttttaccaccatctgaccggactcattcactccggcaataccgcgctggaaatccagacgaccggcggattttttcagcggcgtggtggtcacggctttaaaccgcatcggcggctgccactgactgaagccggacaggcgggcaatcagcggctgcaccagctcataaaaggtgactgtggtggagaccgggttgcccggcagaccgcagaaccaggcgttgtccagtttaccgaaagcaaacggcttacccggttttatcgccagtttccagaaattaattttgccgatctcatcaagaatctgtttggtgtaatccgcttcgccgacagacacgccgccgctgctgatcaccagatccgcctgtgcatcggctttctcaaaggtggcgcgcagaatgtccgggttatccgggataacgccgagatcaatcacatcacaaccgagcttttccagcatcagacgaaccgcaaagcggttggtatcataaatctgtccgtcacccagcggctggccgaccgcctgcaattcatcaccggtggagaacaccgccactttcagtttgcgcaccacggacagctccgccagaccgagggaggcaatcagcggcagctgggcggcggccagtttggtgcctgccggtaaaacttcgctgtgctgcgcgatatcctcaccaacacggcggatattctgcccggcgctgatccaggcggtaaaggtgatcccggcgtccgacacttccgcttcttcctgcatcaccacagtatccacacccgccggtaccggtgcgccggtcataatacggacacactgtccggccggtaattcacctttaaacggaacacccgccagagcgcgaccggcaaccggcagcggggtttttccgtcccaatcggacaggcgcaggccgtaaccatccattgcggaattatcaaatggcggtacattgataggcgaaataaccggggtggcagtgatccgcccggcggcatccgtcagcgcgattgtttcagtaccggtgatcgcggccggggtcgcgagcagcttatccagtgcttcctgtaaagagattaacgaagaggtgtaactttctgtcggattagccatgatgctgtttcactcccggcgcctgctgggcgcagataaaacggataataaagagaaaggcattatggcagacttacagcacaagttgaatgatgtggcacaaaagcgtgagcgacagatctgattccggaagtcattattgcattttaaaggcttcttttggtataacgaagttacaaattattaacatattgcatttcatatgacgacatctcactccgcccgtcagacaacggcgcttcatattgcagtcagtggttttcttgcgctggtggtggccatgggaatagggcgctttgcttttaccccgcaggtgccgctgatgattgacgagcaccagcttgacctgacaaccgccggtattgtggctgcctggaactatctcggctatctggccggatcatttgatgccatgcgggcaaagcgcggtattgagctgcggctgtggaccggtttatggggcgcggtgattatcacactgctgtcagcggtgatttccggagcggtgctgcacagtatcgcacggttttttatcggctgggcgagcggctggacgctggtgttagcggccgcctggaccaatgacgcactggcaaaactcaaccgtccggcactgagtgtcgcggtttacggcggcaccggtaccgggattctgctgtgcggactggcggccatcggcattcagggcttatcgctgaccgcctcacagggctggtggatctatggtgctgcggcactggtattcagtctgtatgtcagccgctatctgccgcgcccgggggaactgagcagttcctcctccccgcacagtaaaccgctgatgacaccaaaaatccgtcgtttattgtggagctatgcgctggccggattcggctatattctgcctgccacgtttttatcgcagatggcggcggcacgtttccccggtagcctgtttgcccagtttgtctggccggtattcgggatagcggcagtcgtcggtatcgttgctgcgattgccgcgcgacgtttttttacgccgcagcggcggctggcaatcactctctgggcacaggctgcgggtattctggcggcggaggtcatgcccgggatcagtggtctggcggttagtgcttttctggtcggcggcggcctgatggctgcggtgcaactggcattccagtgcggacgtgaactggccccggaacacggtcgttatatggccggattgctgaccacctggtatgcggtcgggcagctcggcggcccgctggtgtcctctgtctccgcgtattttaccggcaaactggaaccggcgctgtgggtcgcctttgcggcactgattaccgctggtttgctggttttccgtgaccacagcgatataaaagaataatgatctcagtgataacaggattactatttattaatcctgttatctttattattcattaaaaataaaaaactgataattaaaaaacgattttataacttagcctgtttatgctttatttaattttcagggcataaagtcattattccaaaatataacagggtagtcattcccgatgagaaagaacaattttcttcagaaggcaatcaatgatctgaaagatatacgattgtggtccatgagtatcagcatgatactgacatctctgacagtaacgcactcgtcactgcgcattgtcaggcctgacaatgtgatgatcgatgtctttctcaccccggttatttatgcgggattctatatcctgataaaaaagatactgtactttatatttgaataattgagaggttaattatgaaagaattaaatcaggaacaattattgttcgtttcaggtgcagggtttatctctgccggaatgatgttcgccggtattgcatttgatattagtgctgtaatgatttcaaatatcacccagaataacgaagaaattgtttttgttgatcataaggatatttcccgtctccgttatgaggttatataacacatccgttatccggcatttttccggcaaatgtttccgtcagcgtcattccggctgatatccgcattattaacagggatttccggtgcaaacttttcatcaccaaaaccacaaaatggattaacaaaacggcgtattgctctaaaatagcagggcggcgggtattgaccggccgacgggtgcaacacagcaccgggagtcacctgaaaaatagtcggagaaggtatgtcatcattaagccgggaagcagaacttgtccacgccgcgctcatcgcacgcgggctggagacaccattgcgggagcagacactgccgccggaaacccgtaaggttcagattgaagcgcatatgacagaaattatgaagctgctcaatctcgacctgagcgacgacagtctggctgataccccgaaacgtatcgcgaagatgtatgtggatgaaattttttcaggactggattatcacaatttcccgaaaatcaccctgattgaaaataaaatgaaagtggatgagatggtgacggtccgtgatatcacgctgaccagcacctgtgaacaccactttgtcactatcgacggtaaagccaccgttgcctatatcccgaaagacaccgttatcgggctgtcgaaaattaaccgcatcgtgcagttctttgcccagcgcccgcaggttcaggaacgactgacacagcaaattctgctggcactgcaaacactgctcggcaccaccaaggtggcggtatccattgacgcggtgcattattgtgtcaaagcgcgcggtatccgtgacgcaaccagcaccacgaccaccacctcactgggcgggttatttaaatccagccagaatacccgccaggaattcctgcgcgcggcccgtcatatttaacggatgaatacttcagtcacatcagcttctgcccgtattgatgtcctcgatatggtgcgggggctggccatcctcggtatttttattctgaacatcggcggatttgcgctgccgtctgcggcctatctgaacccgctgtacaccccggtggcgtccgcaacagatatcgccacctgggcggtactgagtgtgctggttcaggggaaattcctcggcatgtttgcactgctgttcggtgccactctgatgatgctcagccgttacagccagccctggaatatggcgcggttactggtgcttggggtgatcgggctgctgcataccgctctgctctgggacggggatatcctgctgatgtacagcctgaccggtgtggccgcctgctggataatccataatgtctcctcccgctggtggctgaagctggtaccggtgctgatcctgaccggattgtttttactgtttttcctgttatcggaaggtggtgagctgaaactgctgtactggcagccgtcgcaggaaatgctggattatgaagtactgatcgccaacaccggtggtattgccggcatgctggacagaatcagcactatcagcggtatgctgatgatgatggtggttcagtatggctggcagttactggcaatgatgctgctgggcgcaacactgatgaaaaatggctggctgaaaggggcatatccgctgtctcattaccggcggctggcggcgtggctgctgatcccgtcactgctgctgcaggctgttgtgatgtggctggaatacctgaacggctggagtgtcttctggatgggcactgtcggttatccgttggcggatattttgcagccggtacagactaccgggcttattgcactgttctatggtttacagccacagctgaaaccggttgccgcctgtctgcaacgggtcgggcgtaccgcactgagcagttatctgctgcaatcggtgtgcggggtgatactgtttgagtacctcggttatttctgtcagtttgatcgcctgacgctgctggcatttgtgccgctgatgtggctgatcaacatcctgttctcaactctgtggctgcgttatttttctcaggggccggtggagtggttatggcggcaggcagccaataagctggcggcccgctgaaaccggattattgcgcggcgggtgccggttgtgtggtatccgccggtttttccggtgccgcaggtggctccggataaagcacattcaattcttccggtgtcactgccggatatgacggtacattctccggtaacgtttgtggtgccggaatcgactcctgcgggccgaggaaacgcggctcgcggttgagaatatataaatcagccagtgcgcccagccgggcaaccacttcccgcgcccggacagtaaacatattcttcggggaggaaacagcgtaacagcgcgcctcaatgcctttttccattgcgatatacagcgcccgttcacaatggaagcgctgggtgataatcgtaaagccattggtatcaaagactttacgggtccgcaccacggaatccagtgtacggaacccggcaaaatcgagcacaattttactggccgggatcccggcattcaccagatccttgcgcatcgtgctcggttcattgtaactgtgctgagcattatcgccgctcagcagcagatacttcaccttgccgctattgtatgcattcacggcaccctgaatacgataccggtaatattggttaattgtcccgtttttatagtacttagccgtaccgagtaccatgccgacttcactcggcggcaggtcattgatattttcatagatataaggcgcggttttccagctaatccagcgatctgccgcaatagccgctgctgctgccagaatgatacctgccagcatccacagaatgatccgtttccatatccgggcttttcccattattactgagacctttatcactatatagttatcataaggctaagattacttgagcggggaaaggctggcaagggtgaaaaaaagaataaaacccgcacaagtgcgggttttcagcggcagaataccggttattcgtcagaaagatgtccggcggtaaacacgatattccggatgccagaagttgcgttcgatagcttcatcgagtgcaccgtcagaggtcacagtcgcgacaccctggatctgtgcttctttggcaacctgtttggcgatgatacgggagacttttttgatgtcctcgatatccggcagcagtgagccttcgccgttaacaaccatcggtgagcattccgccagggcgcggcttgctgccatcatcatgccgtcagtcactcgtctggcaccggcggccagcacacccagaccaatccccgggaaaataaaggagttgttgcactgggagataggataggttttatccttataaatcaccggattaaacggactgccggttgcaaccagtgcatgaccgtctgtccaggcgataatatcttccggacgggcttccacacgggaggtcgggttggacagcggcatgacgaccggacgctcacagtttttgtgcatttcacggataatctcttccgtaaacagccccggctgaccggaaaccccgataagcacagtcggcttagcgttacggaccacatcttccagtgaaatcgcatcattctgcacatcccagtccgcaataatgtcacttttggtgatcagtttgctctggaaattcagcaggttcggcagtttgtccgtcagcaggccgaatctgtccaccataaagatacgggcacgcgcctgctcttcactcagaccttcggatttcatctgcgcgataatctgctcggcgataccacacccggctgaaccggcacccaggaaggcaacagtctggtctttcagttgtccgcctgcggcacggctggcggcaatcaggctgccgagggtgactgatgcggtaccctggatatcatcattgaagcagcagagctgatcgcggtagcgttccagcagcggcatcgcgtttttctgggcgaaatcttcaaactgtaacagcacatccggccagcggcgcttaacggcattgataaattcatcaacaaattcatcatactcttcgccggtgatacgcggatgacgccagcccatatagagcgggtcattcaggcgctgctggttattggtgccgacatccagcacgataggcagggtatacgccgggctgatgccgccgcaggcggtatacagagaaagtttaccaatcgggatccccatcccgccgatcccctggtcacccaaaccgaggatccgctcaccgtcggttaccacgatgacttttacattctgcttggtggcattctgcagcatgtcatcaatgtaagcgcggttcggataagagataaacagcccgcgcgcacggcggtagctgtccgagaaatgctcacaggccgccccgacagtcggggtgtaaatgataggcatcatttctttgaggtgagcattgagcagacggtagaacagcgtttcattcgtatcctgaatgttacgcaggtagatatgtttgtcagtatcgtttttaaaatcagaatactgacgataagcgcgttcagtctgctcttcgatggtctccaccgcttcaggcagcaggccgtggaggttgaagttactgcgctcttcttcggagaaggcgcttcccttattcagcagcggaaattctaacaggatagggcccgcatacgggatatataatgcacgtttgctttcgtattccagttccatgtatgactactctttgccaattgacatttttaagacaggacgcactgatcctaagttatctgaaaaatatgtacagtaattgttacgaaattagtgataccgatgtgtgaaagtgagaggcgggatagatttatattgagtaatcacgtaaaggcagatacccggaacctgcgggtatctgcctcagcaaagcagaatcaataactgaacagggcgatatcctgacaccccagggcgcgcagtgtggcagaggtactttcccactgtgacagcatggcgttactgccttccaccagcacggcgcggtggatgtcatgcaggtcgccgccggccatattcataaagatcagnnnnnnnnnnnnnnnnnnnnnnnnnnnnnnnnnnnnnnnnnnnnnnnnnnnnnnnnnnnnnnnnnnnnnnnnnnnnnnnnnnnnnnnnnnnnnnnnnnnnnnnnnnnncgcagcctgcagtggcggcagtcccgggttaaaggcggcattttcaatatacgcaccgctgtagatgcgtccgcggctgtcctgtaatgctacactgctgtgggaatgagaatacggcgcatggctgcggttggcagcttccagcgcttttccgaccaccgcattggtggcgaggaaatgataaccatgatgcacctggtcaaataaccgggtttcaattcccagatccaccggcccgaaagcatgaggcagcagggttttcagcggcatggcagccagttccggtaactgaatcagcaggtctgtgccgctgttcagttcattcataaactgacggcagtggccgcacggtgtgtaattgacggtgactttgcgcaaacctttctcgccgcgcagccaggcgtgggtgatcgcgctctgttccgcatgcactgtctgttgtaacggcacatggcagaattccatattggcaccgaaatagaggttaccgctcagtccgtgtgcaactgcgccgacattaaaccgggacaccggcgtcacggcacaggctgcggccagcggcagcatagccagtgcgagtgcatcctcatcagtacctgcggcgctgcagagtgcagtgatctgtttggcagataagtatcccgggaaagtatcagcacaaacagtgtccgtcagcagggtctgtaacggggaagggagtgtgttcagggctgcatgaaagcggttttgcataaaatgacctccattatcaatgagatcattctagcgggtagttatacataatgaacgtgatttttatcacgttcattatgaaacgaatgaaacaaatgttgaacttgcgagatgggactcaaattttcaggtcaaccgaataatgccagcagcaccgggaagataaatggcgccatcagggaagtaataatcccgcaggtcattaatgccagagagctgtaagcaccttccacataatcctcttccgcgcagcgggcagtgccgagggcgtgagaagccgtacccatcgccaggccgcgtgaggctttggtggtgacccgcaggcgtctgaacagggtatggccgaaaatcgcgccgaggatcccgacgaaaatcacacacacagcactgattgccgccacgccgccgatggaattggacaccgcgatcgctatcggggtggtgactgacttaggcagaatagaggcggcaatttccggtgtcgcgcccatcataaaggcaatggcggtaccggtgaccatggcaatcacactccccgcaaagcagatggtgatgatggatttccactgtgcgcggatctgatgcagctgttcatacagcgggaatgccagcgccaccacagcgggttgcagcagatcgttaaggatgcggctgccctcaaaatagtggttgtatgaagttccggtgaatatcagcagcggaataataatcacgatggatatcagcagcgggtttaataccggcagcttaaatttgatatagatagctctggcgagaaaatagacgccgatggtaagcgggagcgaccaccagatatgcgttaacatttgcgtttctcttgttgttcggtgtgttctgctgcggcaaccgcatcggcttcctgttgttcaggaaccggaacatggcggcggtgaataaattcagaactcagcgccacagcacacatggcgataaaggtactgacaacacaggcgacgaggatcggcagcaactgggcgctgagggtatcgtaatagttcatcacaccgataccgatcggcagaaataacattgtcatgtttttcattaataaggtgcagccgggctgaacccagtgcgccggaacaatctgcagtgcgagcagcacaaaaagcagcagcatgcccacgatgctgcccgggacggaaaacggcagtaataccgcgataatattgccggcaaacaggcacagatacaggatcagaaatgcccggagatagcgccagccggtttccgctatctgttttggtttcatgataatgttccttcttggatgaacccattcatcatacaattaactttttatttgtgctacaggtcacgaaaaaaaatcatacatcggtgtgaacgtattggtcgttttttatacttcgtataatcataaaggacagattgtaacggacgcgaaataagatatcagatacaatagtgtctgttttactaattatttgttctttttggataccatgatatccataggaggtcttatgctatcccggctgttattaactgatgcggatgtcagcaaagcatttgccgtctggctgcgtaaaaaacgcgaaagccggaaatggtcgcgtgacgctctggccgcccggagtctcgttcccgcatccacgataaaaaaatttgagctgaccggccgcatatcattccgtcagctcctgacattatggcagtgtctggatgatatcggtgtactttatgatgttgtcgacccgaaaaaacgcactgaggtgaagataccacagacaatagaagaggtattgaaagatgaattttaagcctgttcagaaactgacggtaatgcggacattatcaacgggagagacaacagaagccggaacgctggtacagaaccggacaggcgttttttttcagtataacagtgattatctccggctcttcggtaacagttcgcccctgacactggagaccagcactgagcttcagccagcaccggccagcccgcatgatggcttacacggactttttgcagatagtcttccggatggctgggggcgcttactgcaggacagagtattccggcagcagggtattgcactgcataatattactgcgatggacaggctggcatttgtgggacatcgtggtatgggagctttttcctattatccggaatcagattatcagcctgaagaagagggatatgcagacctgatttctctgggaagagatgctcaggcggtatttgagggtgagacggatgttgttctgtctgctctggtggcagcgggaagttccggcggagccagacccaaagcacagctttatttcaagcccggggatttttctgcctgttcaaccggtgaaattccgggcagtgaagcctggctggtaaaatttacgtcagcatcactgccgctggggcatgatgagggattatgtgaagctgtttatctggatcttgccggacgggccggacttaatccgccacagtggcgattgatcgataccggaagccggggagcagcaaaagcctggctggccgtaaaacgttttgaccggacagataatggtgcagataaacagcccggccgtttgctgatgcacagtgtgtgcggattactggatgcagatttccggataccgtctttagattatgaggagctgattcgtctgagcaggatgctgtgccgttcagtccccgccgggcaactgcaattccgtagggccgtatttaacctgctggctgcaaatcaggacgatcacactaaaaactggtcttttctgcaatcagatgacggtcagtggcagccggctcctttttatgatgtgacttataatccaaatggtatgaatgagcatgcaatggctttcggcggatacggaagaacaccaccggcagaaacaatgaagcatctggctgaactggccggttttgataactgggaaactgcgcgtcaggcaattggggagatcgcggatgttgtggccggttttcctgagctggcaaaagcagccggtgtttcaccgggtatccgccgggaaatagaaagcacgctgacacagcggcggcaaagtaatcagcatttattgtctgtataaaaaacggcagcggatctgaatgatgcgctgccgttatttttactggtgaattacaggatttacttcacctgctgacccggttgtgcaccggaatccgggctgagcaggaaaatctcgtttccgcccgggcctgcggccatgaccatgccttcagagatcccgaaacgcattttgcgtggtgcgaggttggcgaccatcactgtcaggcggccttccagcgctttcggatccggatacgcctggcggatgccggagaagacctgacgggtttcgccgccgagatccagtaccagtttcagcagtttgtcagagccgtccacgaaatcggcagacataatctgtgcaatacgcatatcgactttggcaaaatcatcaaaactgatggtgtccgcaatcggatcatctgccagagggccgctgaccggtttggcggacatcgctttgatatcctctttggaagcttcaatcatctcttccactttcgccatttcaatacggctgaacagggctttgaagtctgcgatctggtgatccagcagcggtttggcaatgccgtccagtgtcagttcctgattcaggaatgcttcactgcgggccgccagttccggcatcaccggtttcaggtaggtcatcagtgcgcggaacaggttgatacccatggtgcagatggcgtgcagctcatcatctttaccttcctgtttcgccaccacccacggtgctttctcatcaatataacggttagcgacatcagccagcgccatgatttcgcggatagctttgccgaattcacggctggtgtactcttcgctgatggttttttcagcatcgacaaactgctgatataactcaggttcagccagggttgcactcaggcggccgttaaagcgttttttgataaatccggcggtacgggatgccaggttgaccactttgttaacgatgtcactgttaacacgctgaacgaaatcttccaggttgaggtcgatatcatcaatacgtgaagagagtttcgccgcgtagtaatagcgcaggctgtccgcattcaggtgattcagataggtgcgggcctggataaaggtaccgcgtgatttggacatcttcgcaccgttgaccgtcacatagccgtggacaaacaggttggtcggcttgcggtaaccgctgccttccagcatggcaggccagaacaggctgtggaagtacacgatatctttaccgataaagtggtacagatccgcgtcagaatctttcttccagaactcgttaaaatcgagattgccgcgtttgtcacacaggtttttgaatgatcccatgtagccgattggcgcatccagccagacatagaagtatttgcccggtgcatccgggatctcaaagccgaaatacggtgcatcacggctgatatcccactgctgcaggccggaatcaaaccactcctgcattttgttggcaacctgctcctggagcgcgccgctgcgggtccatgcctgtaacatgtcagcgaaagccggcaggtcaaagaagtagtgctcactttcgcgcagcaccggtgtggcaccggagaccacggagcgcgggttaatcagctcggtcgggctgtaggtcgcgctgcacacttcgcagttatcgccgtactggtcttccgctttacatttcgggcaggtgcctttcacaaagcggtccggcaggaacatgcctttttccggatcatacagctgggaaatggtccgggtttcaatatggccgttctttttcagtgccagataaatgttcccggataacacccggttctcctcgctgtgcgtggagtggtagttatcaaagctgatggcgaaatcagcaaaatctttctgatgctcgacgctcatgttggcgatcatctcttcaggagagatcccctgctgttgtgccttgagcataatcggggtgccgtgagcatcgtcggcgcagatgaagtgaacctctttgccgcgcattcgctgaaaacggacccaaatatcagcctggatatgttccagcatatgaccgagatggattgaaccgtttgcatatggtaacgcacaggttaccaaaattttattagcgatctgagacatagagtatttcacttcctcaaataataaagggtctttgatgttaaccgatcccgtccacccctgccagcagtaatccggctttgtgtgtggttttccggacttttttctgccgtgaacatccggcgataacccttcttattgcaggggatttgttttgtgcgggtttgcgcggaatgactaaattaatcagttggcttctgctatcattgaagccgatagttacaggcaataaaaacgataaatctaaggagccgggatgaatgcgaaatcccccggggagatgaaccctgaattgctgaacgaccaggtcgcgcaggtactggcgacatttgagcatccgacactcaaacgcaacctgattgccatcaaagcgctgaatcactgcgcaatgctggatgatgtgctgcatgttgagctggtgatgccgtttgtctggaagcgcccgtttgaagcactaattgaagcaaaaaccaaagaattacgcaaagtgaccggtgcggcagcggtggactggaaactgcgtcatgatatcgcgacactgcgccgggccaatgatctgccgggcattaacggtgtccgcaatattctggcggtcagttccggcaaaggcggtgtgggtaaatccagcactgcggttaacctcgcgctggcactggcggcggaaggggcgaaagtcggtatcctcgatgcggatatttacggcccgtccatcccgaacatgctgggcaccaccaaagagcgcccgacctcaccggacggccagcatatggccccgattatggcttacggtctggcctccaactctatcggctatctggtgaccgatgataacgccatggtctggcgcggtccgatggccagtaaagccctgatgcagatgttacaggataccctgtggccggatctggactatctggtcatcgatatgccgccgggcaccggtgatatccagctgaccctctcacagaacatcccggttaccggggcggtggtggtaaccacaccacaggatatcgcgctggtggatgccatgaaaggtatcgtcatgttcaagaaagtgaatgtgccggttctggggattgtggagaacatgagtgcgcacatctgcagtaactgcggccatgtcgagccgattttcggcaccggcggggcagagaaactggcggaacgctatcacaccaaactgctgggacaggtgccgctgcatatttcgctgcgtgaagacctcgatcgcggccagccgacggtgatgcgtgacccggacggcgagtttgcggatatctaccgtgagatcgccgtaaatgtgacggcagaaatgttctgggaaggggataaaatcccgacggagatcgctttccgcgcagtataagcgggatttatttctgctccggcatgtccggaaagtcaaaaagaccggcgcagtgatgtgccggtctttttttcgggtggccataagagcggttaccccgaaataatgaggcaggatgcccgattatgctggaatctcacgccgttactccctataattcagcgccgggcggacacgttttgttactcacggccggataagcattaaaagaggccgcagcagaccgtttcggtttttttctctcctattttcaaaccgggttatttcaattatggctgacacagcacagcagcagtgcactatcatcggcatcaccggcgcatccgcgtcaggaaaaagtctgattgccaacacgctttatcacgagttacgtgctcaggtgggcgatcacaatatcggtgtgattccggaagactgctactacaaagatcagagcgatgtgccgatggaagagcgcatcaaggtcaactatgaccatccgggctctatggatcacgaattgctgttacagcatctgaaaacactgaaatccggtaagacgattcagttaccgcaatatgattacgccgagcatacccgcaagccggaatcggttctgttcagcccgaaacgggtgattattcttgagggcatcctgctgctgacagacaaacgtctgcgtgagcagatggacttctccattttcgtcgacaccccgctggatatctgcctgatgcgccgcatccgccgtgatgtgaatgagcgcggacgcacactggattcggtgattgcacagtacaataaaaccgtccgtccgatgtacctgcaatttattgaaccaacaaaacaatatgctgatatcatagtgccgcggggcggtaaaaaccgcgtggcgattgatattctgaaagccaaaatcagtcagttctgcgagtaagccgccgacaacgattaacccgcgtttatccgccggtgataaacgctgagttttataaggatgataccatgcgactttgtgaccgtgacattattcagtggcttgatgacggcagactgaccatctccccgcgtccgccggttgagcggatcaacggggcgaccgcggatgtccgcctcgggcatcagttccgggttttccggggccataccgccgcgtatattgatctcagcggcccgaaagaagaagtgaatgcggcgctggaaaatgtcatgagtgatgaaatcaccctgactgaagatgaagtgttctacctgcatccgggggaactggcactggccgtaaccctggaatcagtcacactgccggacaacctggtcggctggctggacggtcgttcatcactggcgcgcctcgggctgatggtccacgtgaccgcacaccggatcgatccgggctggcacgggcaaatcgtactggaattttacaactcaggtaagttacccttggcactgcggccgggaatggtgatcggcgccctgagttttgagccgttatccggctccgctgaccggccgtataaccgccgcagcgatgcaaaatacaaaaatcagcagggagctgtgggcagccgtatcagcgaagattaaacggcggacagtactgtccgccagcgggtttaacagagaatgggaaaggaacagggattatgaaacgatttttcaccacgctgattattctgcttgtcgtgatagcggcgggcctcgcggccttaatcctgctggtgaacccgaatgatttccgcgactatatcgttaacaaggtgaaggaagacaccggttacgagctggtgatgaaagatgatatgcgctggcatgtctggccgaaactgagcatcatcaccggtaaaatgtccctgactgcccccgatgccgccgaaccggtggtaactgccgaaaatatgcgcctcgatgttgaactctggccgcttctgtcccatcagttatcggttcgtgaagtgatgcttgacggcgcactgctgaaaatcctgcctgaaaccgaatcaaaagagaagaaaagcgctcctgttgcgccgggtaatcagaaagcccgcccggtgcctgtcgaacaggaaaacaaatggtcgtttgatgtcgaccgtatccgtatcgccaacagtctgctggtctggcagacagaagacggttcgcagatcaacatgcgcgatattaatttctctctcgagcgtaatacccctgaacgctatgtgatagcgctgaacagtaatattctgcgcaatcagcaggaactctctttcagcctgagttctgatattgacctctcccagtacccggtacaggtcagcggcaatattaaccgcctgaattaccgtctgtccggtgccggtctgtatgccaacggcatcaacggcaacggtacgaccacctatacctggcacgaagcggtcggccaggcaccgcagtccctgatcctggaaaacctgaaactgagcgctaacgaaagccagctcagcggtacagtggaagcggcactcggtgaaaccccgcgttatgatatccagctgacctcctcaaaactgaatctggataacctgctcggttatgagcgtgccgtacatgcagaaaacggggagaaaaccccggttgccaccaaaccggcggtggttaccaccggcagtgatgcggataaatatgatctgacctttatgaaccacttcaatgccaccctggcgctgaatgtggattccctgatttaccagggaatggaaatcggccagctgacggtgaaagcagagaaccggggcagcatcacggaaatctccaaaatgaccggcaacgtgttcggcggccgtttctctctgccgatgacgatttattccgaaaaagtccctgcacagctgcgcatcaaaccgctgttacagaatattgatgtcaaaccgttgctggcagcgtttaaaatgccggaaaaattcaccggacgcctgagttttgacggcgatctgcgcggtaccggttatgaccaggacgcggtcttaaataactggcgcggtgatgtggctctgaccatcactgatgttaagctgctcggcctgaatattccgtatcttattcagcagtcgctctcccaggcgacagataaagtggcgcagccggaatcgatggatgctatgactgaagcgaaaaaactggaagctatcggtaccctgaataacggtgaagtgaaaatcagtaaaattctggcggtatccgatgcctttaatattaccggcagcggccggacaaacctggtgaaacagaatctggatgtgaacctgggggttcagatcttaaaaggctgggggaaaaccaatgacctggtgacctggctgcagtctgtccgtattccggtggtgctgttcggcaactgggataatattcagtataagttcgaagtggaaaacctgttgcgtaatcagatacagcaacgggtaaaacaggcagccggagagctgctgaatgaaaaaaccggaaaggatctcaaagctgtggaatccttgcttaaccggttataaattcgcggacgatttatacaaacagagcagtgacgataatttatattgtcactgcttttttaatgccggaggccggaatacttaaatgatacgggtaataacccaggttcattgacgcatatcatttaatctgttcccggttttcggcagagtgcattaatcatttttataaataaaaataccagacaggagcagaaatgttagatcttcttattggtgctgtcgtcgccgtcggcgtcgggcgctatattattaaagggtattcagccacaggggtgctgatggtcgggggcttactgcttctgatcatcagtgtcatcatggggaaaaacatcctgccgtccgccgccacctccaccggctggggaccgacaaacattattgagtatgttaagtacttgctgatgaaccgcggcggcgatctcggtatgatgatcatggtactgtgcggctttgcggcttatatgactcacatcggtgccaacgacgtggtcatcaaaatggtctccaagccgttacaggtcgtgaactctccgtatctgctgatgatcgtggcctactttattgcctgtctgatgtctctggcggtttcctccgccaccggtctcggtgtgttactgatggcaaccctgttcccggtgatggtgaacgtggggatcagccgtggtgcggcggcggctatctgcgcctctccggcggcgattatcctggcaccgacctccggtgacgtggtgattgcggcagaagcctctcagatcccgctgaaagagtttgcgttcagcctgactctgccgatttctatcgtggcgattgtatctatggcgattgctcactatttctggcagcgtttccttgatcgtaaagaagatatcaaatctgagatcctggacgtcaaagaaatcaccaccaatgcgccgaaattctatgccattctgccgtttatgccgatcatcggcgtactgctgtttgatggtaagccgttcagcatcggtttcctgagccatatcgtgctgcctgaattacacatcatcacgattattgtcggctgtattattctgtctgccatcattgaattcctccgtggttttgacggcaagaaagtctatgccgggctggatgtctgctaccgtggtatggcggatgcctttgccaccgtggttatgctgctggtggcggccggtgtgttcgctcagggcctgagcaccgtcggctttatctccggtctgatcagcctggcgcagtctttcggttccggcgcaatcatcatgatgattgctctggtgattattaccatgctggcggcgatgaccaccggttccggtaatgcgccgttctatgcgtttgtggagctgatcccgcgcctggcacagcagatgggtatcaacccggcgtacctggtgatcccgatgttacaggcatccaacctcggccgtaccatgtcaccggtttccggtgtggtggtggcggttgccggtatggcgaaaatttcaccgtttgaagtggtgaaacggacatccgttccggtgcttgtcggcctgctggtggtgattgtcgccactgagttcctggtgccggtaacactgtaaaacgacacgggccgcagcggttatccgctgcggcttttttgtatcagtacggaaagagtgaggttggctttggataagatttttaccggtgtggtgcagggcacggcgctgattttaaaaattgaagaaaacaatgatcatctgattcatattgtgcagtttccggaggagttgttaacggggctggcgattggtgattccgtatcgtataacggctgctgcctgactgtcgcagcgattgataacannnnnnnnnnnnnnnnnnnnnnnnnnnnnnnnnnnnnnnnnnnnnnnnnnnnnnnnnnnnnnnnnnnnnnnnnnnnnnnnnnnnnnnngccatgtcgggttttatcttttcaccgataccctgctgaaaaccgcgctcgggcggctggctgcgggtgataaggtgaatatcgaaagagtggcggtctgatgatataaaaaaaccccgtatctgacggggtttttgctctgtaaggggcgttaattacacacggttaaaggcaagaatacggactgaacgcaggtcagcctgagactcgtcggcaattttctgagtagcttgttctaatgcatcccggggtgacacaccggcttcggtttctgtgatctgatgtccctgtaaagtgtctccgttacgggcacgcactttgtacgatacaaaccaataatccatatcatcacctgcttctgtcattaatcgtttaatcaccatagcggtttacgtcactgattaatgtgaccggaatcaatcatttaattgtttttctgtccggacggcagcgcatcagcctgagccgcgatatcttccagaatcgtttcccgctcaaagagcaattgttgttcacggcttgaagagcaggtgaacagcagcaggataagcaggccggttgcggcggcggaaatcagccatgaacggcgatccattttacggttacggacaccggaggcagcagaatacagccaccccagcacagcaccgcaaatcagcccgctgaaatgggccacattatccgtcaccggctcctcatcatccggcactgcactgagtaccgacagcacgatcaggacaatcatggtgatcagcagatttttataacgcaggctgtccgcgacagacacggacggatctttccgggcccggataagatacatcacggtggcaccggcaagtcccataatggcgccggatgccccgacgccgacagtcaccggaatgccggacagcggaggcatatcgttctgagcagcctgccagagtgcgctggtaaaggatgcggaaataccggtgaacagatagataaacagcattctcatcttaccggtcagtgcttcacagttaatgccgaacaccagaagggcgatgagattgacgcccagatgaaacggatcggaatgaagcaggatgctggttacatagcgccaccagtcaccggtcagtgataactgatacacactgccgcctgccagcagcatattgtagacctggtctgtcagcggcgaagcataattcacctgccagatataagccccggtattgagcagggcgaggaaaaaggtgagcagcatggctgagagccggtactccggccgtgaaggcagaaccacatcaccccagggatttatgttattcattattattttgcggataatttgatttgattaagtctatttgaggggcaggcgggctgtaaacaggaaaaagccgggataattatcccggctctgactggtgcggatagcggcaggaattaattattttccagccattcggtgtggaacacaccgtctttatcagtacgtttataagtatgtgcaccgaaatagtcgcgctgtgcctggatcaggttcgccggcagtaccgcgctgcggtagctgtcataataggcgatagcggcagagaaggtcggtgtcgggataccgtgctgaacaccgtagcagaccacatcacgcagtgcctgctgatattcatcggcaatctgtgtgaagtaaggggccagcagcaggttagccagtgccgggttttccgcatatgcgtcagtgattttctgcaggaactgggcacggatgatacaaccggcgcggaagattttcgcgatttcgccgtagttcagatcccagttgtactcatcagaggcaacgcgcagctgtgagaagccttgtgcataagagacaattttacccagatacagggcgcggcggactttctcggtaaactctgctttatcgccgctgaacgcagccgctttcggccctttcagtactttggaggccgcaacgcgctggtctttcaggaacgagatataacgggcaaatacggattcggtgatcagtgtcagcggcacgccgaggtcgagcgcgctctggctggtccatttaccggtacctttgttggcggcttcatcaaggatcacatccaccagatagttgccgtcttcatctttcttacggaagatatcttttgtgatatcaatcaggtagctgctcagttcgccgttgttccactcactgaaaacggtggccagctcatcattgctgatgccgagggcatttttcaggacggagtaagcttctgcaatcagctgcatatcgccgtattcgataccgttgtgaaccattttgacataatgaccggcaccgtcagcaccgatataggtcacacacggctcaccttcagcctgtgccgcgatctgtttcagaatcggggcaaccagttcgtaagcttctttttgtccgcccggcataatggacggccctttcagtgcgccttcctcgccaccggaaacgccggtgccgataaagttaaagccctgtgcggacagctctttgttacggcggatggtgtcctgaaagaaggtgttaccgccgtcgatcagaatgtcgcctttatcgagatgcggggtgagggacgcgatggttttatcagtggcttcaccggctttgaccatcagcaggatacggcgggggtttttccggggggcaacaaactcttcaatgctgtagctgggaaccagtttttttcccgggttttcagcaatcacttcatcggttttatctgaagagcggttaaaaacagaaacagaataaccgcggctttcgatattcagtgcgaggttacggcccataacggccataccgacaacaccaatttgttgtttggacatgaagactccttcaggaattgacccgtgactaacgacgatttcgttagctgactgttaatttcgtcacagtttaacgcatgtaaaggctgcgtggtagcgattgatgcaaacggtatcgtcatagcgcacaacaggaacagcggcaaagtgcggaattttttattgctatttggccgcacaatccgcattattccggatgcagcataagctgtgtgaataaaaggtaaaactaaccgtatggaatggatcgctgatccgtcgatttgggccggcctggccacattaatcgtactcgaaattgttcttggtattgataaccttgttttcattgccattcttgccgataaactgcctcctgcactgcgtgacaaagcccgtataaccggtctgctgtgtgcactggtcatgcgtattattctgctgttcagcctctcctggcttatcacgctgaccaaaccgatgtttacgatgttcggccatccgttcagtgcgcgtgacttaattatgctgatcgggggtctgttcctgctgtttaaagccacaatggagctgaacgaacggctggaaggcggtgagcataacgacgggcagcagcggaaaacctcaaaattctgggcggtggtggcacagattattgtgctggacgccgtcttctcgcttgactctgtgatcacggcagtcgggatggtggatcacatcggtgtgatggtcacagcggtgattatcgctatgctgctgatgatctggggcagccgtccgctgacccgctttgtcaatgagcacccgaccattgttatcctgtgtctcagcttcctgctgatgatcggtttcagcctggtggcggaagggttcggttatcacattccgaaaggttacctctacgcggcgatcggtttctccatcatgattgagatgctcaaccaggtggcaatttttaaccgccgtaaattcctgcgcgggagaaactctctgcgtcagcgcacggcggaagcggtactgcgtattctgagcggcaagcgtgaatccgcagaactggataaccgcacagcggatctgatttctgataatcaggaaatttttgacccggaagagcggcagatgattgtccgcgtgctggggctgtcgcagcgtaacgtcaacagtattatgacctcgcgtcatgatgtggagatgctgcggattgatgcgaccagtgatgaaatcgcggcgctgctgattaaaaatccgcacacccgcgtggtgatcaaaggctcggcggatgatgatgaactgctgggcgtggtgcatgtgatcgacctgctgcatcagcgtttacagcaggacacgctggatctgcatgcgctgatcaaacagccgctggtcttccctgaacagctgtcattactgaaagcgctggagcagttccgccaggcgcagacacactttgcttttgtggctgatgagttcggctatgtcgaaggggtggtgacactgacagatgtgatggaaaccattgccggtaatctgccggtcagcggtgttgagaatgatgcccgccatgacattcagtttacggatgataacagctggatcaccaacggctttatgccgctggaggatttaatcaactatattccgctgacactcgatgaaaaacgcgagtatgaaacggtggccggtctgctgatggagcatttgcagcgtctgccgaaagtcggtgagcagattaacattgacggctgcctgtttgagccgctggaaattcagaatcaccgtattaaccgtgtgaaaatcacgctgccggaaaatccggaagaccgtgacgactgactgttaaaatgataacgccgccggaaacggcggcgtactgaaaagatgttcagctgtcagcggtagatcagggtaaatccggccgtggtctgaatcagcccctcacgaatttgcggctctgtctgataataacgtccgctgaccgcaaaatgatagataccccggataatttcaccgccttttaccacatcccactgagtatcatcatcaatataaaccggcatatctgtgccgagtggtttgacattattatcaattagtacctgtacccctacaccttttgcggcattctgtccggtcaggttgttcagtaataccccctggcggcgcagcgcggcggaggcttcattaccggcggtgccttcaaaaacagaggcacggataccctgaataaagttggtgccgccgcagtcgatatacacatccacggattgcgggccgttttccccgtaggccgtgctgccgggaccggagaactgccctgatgccactttaccgaggctgatgatctgctcgcggttggaaaaacggtactgacaggactctttcagatatttcactgcgatattactggtttttttcagcggaattgaccatcttccgtccagtaccaggtttccggccgggtcataaaccgaaatagccaccggataaggtgatgcaatatgcaccggtaaaaatgaaagcccctggctatcatccggctgttcatcagttcttaccagtgtcactttgacgcccagtgcaaactggttttgtgatgtacagggaagatcaatatcggttgcaccatttacgcctattttactgtagcgggtaattgatgggttaacgtatgttccggaaatttccccgccgatatccagtcggtaancccgaaaattcccccgccgatatccagtcggtaacccacgcccgggatattggactgaattacagcatacccgtctttctcacccagaattgttccgataccttctgttgtgacagttgctcgataggtttcaccacgggtgcagcggaagcggggcgatgaataacttaagtgaaaatgcgggatatactccgtttcaatcaactgtccgttggtattccgtataggatcgccaaaccggtaactgcctgagttaaaaacacctattgtggctttgatatcctttgccccccgccagacaggggcaacgtggcctttaatgtccgttactgtgctgaaagcggctacttgtgcactgaccatcatggcgaagacaaaaagcagtgatttaattctcatcattaattatcccgcaggtcgctgtcacgaccgacactttatcattcatcaggtatttgcgattaatctcagtcaggtcaatcacacattgctgtccgtcggcggcactggtatccacgcggacggttgtcattttttcattcagattgaggaagattttcccgccctgaccgacaaacgtcagcggctcattttccggcccgtacactgttgcacccagcggtaacagatttccattagaatcgcgggttttcagtaccaccggcgcaccgatacgggtatccagctcaataaatatcgcgctgccggagcggggaattatcgtccgttttgattcttccaccgtgtaattctgccccaggtcgcgggtttcgataccgaccaggtttttgcggtaaggcacaaggtttggctggatggcataaccggcactgtttgtgtgtgtatccgaccccaggacctgtgcattttcaatgccttccgctttaataatggcgaatgaatttcccagcgtattggcaaacagtaatccgccgctgtggccgacaatggcaccggacgcactcatacttaatgtttttgagtcaggataatggctgtaatccgctgagaaatccgcaatgccggttttataacggccgcctgctgtggcgtaacggctggtttcatcctgatattgatcctgtccggcggataatgagtaatcaagagaatccccgagactgccgctgacaccggtaccgatattccggttattgtcggaattgagataattggcggtcagataggtgttatttccggcagacagcggaatgctcagtgataatgaaaagagggtgtcattattatactggttatcggttttctggagagaagcgataaccccggcatcatacacggtggtggtataagacagggtgtactgcttactggtttggctgctgttccagtaatcggccgttgaaccgctgacactgacactgccggcgttatacggcaggcgctggctcatcgacagggtgtactgggttttcagtttataggcattattctgctgctgttcatcatactgataatagccgtgattcatctgcatcgcgttataaacgctgacatagtttttggtatcaaactgaatggaagagaggttgatataggtttccgttgacggaaatgttttgctgtaactgagcttataagaattcccttcaagggttttatcattatttttcagtgtggctttggcgtggatcacttcaccgttaaaagcaccgaccggggtattaatggtcattccggccgcgccggatacataatcgttactgaataccgtacccagtgaggcagaaatacggttgctgacaccgtaacgtaatgaggcgtcagttaccggatcaccgaataccgtattacggtagcgcagtttacccacgccgacatcgaaatccagtttacccggacgggtaaaggctaaaccgctctgtaccgggatccgcattttctgaacactgccgtcggattcaataatatcgaccagcagatcccctgaataatagattggcaggagatcatttatttcgaacggcccggcaggtaccacggtgttgtaaatttccgttccggaatccgcaagatagacctttacctgcgcctgggttttggcgatcccctgaatcaccggggcaaacccggtctcacggctcgataacatactgttatcattacgtaaacgcacaccccgtaatgaactgccgttggagaaaaccgagccggaataaaaatccccgagtgtcagttttccttttaccgaatcaatatcccgttcaagccaggtcataacagcggtgtatttttcattatttatctggctgtcattacggaaacgccatttggaaaaattaatgccggaattcagcgttaatgaattggtggtattggaatagccttctgagcgggtggtatagcggttaaaaaaataattggtaaatataacagccttaccttcatcccagttaaccgggttactttccggcggaaccggtttcagtaaatcccgttgcgggacagaaagatgcagttgctgtttactgaaaataaattcaaatgcggattcagggatcagatcagataaataaaagcagctgttttcatcctgcgtttccgcctgtttatgaaaggcatcaacgagtgaattgattaatcccattgaatcaaccaattctggtgttaagcagacctgcaatttttcagctttattattttccagcttaatcaggaatttcccggtattctgatcgttgacataaacatcagtacggtataacccggtcatctggtcattatcggtggtcaggcggcgtaaatcgacatccccgctgaccgcatagtttttaataaaggccgggttaaattcataatcatcgtcatcatcatcagcaaatgccacactgaatggcagcgtggcggaaaaaacaataacaggaagataaacaggccatttcatacgcgtttttttacaaccttaattcacggttttttcagcgtctgaactgccgccggaatcattgacataactgaatttaatgaccgcggatgacggaactgtggttaaccggcttatttttgcctgtgtgctgccgccgaaaggtgccatcatggcaagacccggctgtacatcatattcctgttgattaacaatcactttggctttatccggcgtgatataaaatgcactgttgtttttagcggataaccagatgtccgcgccttgttttgttattgtccagtcagttttatcaacggcggaattataatcagcggcaatcgcggaagggcggtaaaagagtttgaattttgataagacagaaatctgcaggctgttttcaatggttttgcttttcggcggaacatccagaatattgagggtgaatattgtttcacgatcagcaggaagcggttcgccggtatacagaatacggacggtctgcacatttcccggtttaattttaaataacggtggcagaacgacaaaaggagtatcttcaatatccgctttggtgacttctttaccggaacgtttctcagaaaaaccggttgtcagccagacctgactcagcgctgttttttcaccactgttttcaatattaacggatatttctttatcatcggaaggatatacaaaacgggttccggtcaccacaatagcggcgcttgccggaatagccaccaacgacagaaagacagctatcatctttttaatcatattcgctcttatatactcttattttgatgagtggaatacagaaaaggaaacagggtgattagaacaaattcatcaccctatttccattatattttataaataaggattatttgtaaataatttcaaaatcaacgttagattccactaaacccggctcagaaacacctacggcataatacttagcaatatagtttaactggacatttccttccgctaatttagtaaagccgacattctgattgtctttatccatacccagtttaataaactggtcattctggttatacagcgcaatattgacgtttttggccgttgttgcaccaatacctttggtattcagggtcttggttgtcaaatcaatgttcgggccgacaaaacttaaaccgacgtcagtcacggaatctgctgccgcacatttggataattcaatggtgaatggggtagtacctgtggtatcaccgacattctgtaatgcgttggcactgacttttggtaattcaacggttttatctttatttgaaccttcaaccacacagctttgttttaccacttcacctttaaaggtaattttaccatcagccgcaacagcacctgctgaaatagcagtaaacaggatagcagtaattaaattaatctttttcatggaattctttctcgtcgtcgtaataatgaatttggttatatttttgggtaagtaacttaacttggaaatactctaacacaccccttcatacctttaaaattgatctggcgcaagtttcaaattggtaaattttttatctgaaaaaatgaccatttatggaatttaaatcccgactgaatcgcttcaaatggtttgaaaaactaaattaagtccgtagtggcgctataaaacaaacatagatgcggatcgacgagaaaactttatgttcacgagggcgtgatgaaatgtaactcattgataacaaatgagtggcataaaaataacaccagtaaatattaactatacatgtactaataccacatcttattttgtttatttagaataatgctaagtattaatgaccaatatttaacacgcaattgattgcctgtgtttaaataaaacaatgacaatgtgtttccggatgagacaagcaggtttattttttattgctgagtcttctgatgtctttgcggcaggtttttaatggccataactgaataattaatttttctgatattgattaccggccattccggttgttttaattatccggaatgaataatcatttttaaaaaaggaatatttatttttttattacggcaggtaatagctaacatgttgttaaaatgatgtttttacttatcttatgcgttaattatgcaatgtccgtgttcaggaagggtaggtgatcagattttgacacacaataattttacattccccgctttctctgctttatttttactgtcaatcgtataccctgcaaaccctgaattgtggttatgtatcagatttctgtaaggataaaaaaccgcctatgtctgttgtgacactgatccttgttttcctgctggctgtgattgccagtgtgtttatctcccgtctgctgggggacaaaattccgctgccttttattcagattgctattggtgcggggttatcactcttcggttttgatgtggcgtttgagccgcatctgttcctgttcctctttattccgccgctgctgtttctggatggctggcggatcccgaaagaagcgctgttcagtgatatcaaaccgattttctcgctggccatcggcctggtgtttttcaccgttgtcggcatggggctgtttattcactggctgatcccggcggtttccctggcggttgcttttgcactggcggcgattttgtcaccgacagacccggtgtctgtggcggcaatgactgtcaatgcgccgctgccgtcccgtatggcccatattctggaaggggaatccctctttaatgatgccagcggcctggtgtgtttcagttttgcggtaggtgcggcactgaccggaacgttttctctgccgtcggctgccgggaaatttatggtggtggcgctgggcgggattatggttggcctgctgattgctatgtttatcgggaaagtgaaccagttcctggtgcagcgcaccggggaagacccggccattcagattatgatcagcctgctgatcccgtttgtctcttatctggcggcagagcacctgggtgtgtccggcattctggccgcagtggcagccggtatcgccatgcactatgagcgtattgtcggccgtatgcagtctgctacccgcatgcagagcaaggcggtctgggacaccgtgcaggtcgcgctgaacgggatgatctttattctgctgggtgaacagttaccgggaatgtggcgctcagtgccgcaggtggcggcagatgccggggcttccgcaccgtgggtgctgctgctgtatgtggtgattatcacctttggtctggcggtgctgcgttttgcctgggtatggattgccatgacactgacggttttccgccagcgccgcaaaggtaagcagtctgatatgccgcatctgcgcctgatggcgattatggcaaccgccggtgtgcgcggggcgatcacccttgccggtattctgaccctgccgctgctgatgaatgacggttcaccgttcccgcaccgggatctggctatctttctcgccatgggggtaattctgttttcactggtgattgcggcggttgcactgccggtgctgaccagagggctgaatacggacttaccgcatgataatgaagagctgaatgcccgtttcaccctgaatgaagccgcaatgagtaatctgcgggtacagatggcggagccgctggaagacattgatgaaatgacactgcgcacagaagtggggactcacttgctggagatttacggccgtcatcttgacagtaacagtgatgaccagaccgccgggtttgactggcacaatgtgatccgcatggaacggcggatgtcactgacagcgcttcaggcggagcgtgatgccctcaaacagctgcgtaaaagtaagaatatcagtgagcacacttacacccggctggtgcaggaactggatctgaaagaagaggcgctgaaactggcgctgcactgatcgccgcagaaaaaagatcagaagacccgccgagtgcgggtcttctggctgagtgtggacgtatccggttttcggtcagggccatgtgcaggaacccgcggtaaatgacgttaatccggatttctttcaccagacggcgttcggacgggaacacggatgaattcagtaacaagacggacatattggcttagccttgacagaaaatttaacttaaggttaatttcatattttctaactaaggacgttgttatggcacatccgatttatttgacgttaaccggtaaaattcagggactgatttcagcgggatgttcatctgttgattcaatagggaaccgttatcaggccggacatgaaaatgaaattctgatacttaatttaaacgcaggggcgttccgggcgcaaaatgccgcctataaagagctgatattcacgaaaccgatagataaagcatttcccctgctttactcttgcgtcgataataacgagattctggaagcaaccttcaaatgctaccggacaagtcagcacggacaacttgaggtctacgccacatataaacttacaggcgtatcactggttgatgttgatgatgttcacgcgaacttaatcagtgaaggtagtgacgacccctatcagcgcgtcaaaatgagatatacctctatctcaagagaacatacaaaagccagtacctcaacatacagcattaacagtgaaatgatttaacaggcaacgataaaggatatgtgctatttgcacatatcctttgaaataacgtatttagttggtgcgtgaattgattttttataacatttgacataaccgcgtgatgttaaatcatactcaacataaaatgagaaaacaaaactaaaaataataccaaacatcgctattaccgcaagagagttggttattttattatttacttttagttttctctttcgatatgccaccatgaatattaaatatgataaccacgaaagaaaaggaaagcaaaaaataagaaaacccactacaaatgaaaatgatatgatgtcagctttaaaaaaatactcaacatagccacttgctgaaccatatacaccaattgctataaagaaaaacaaaatggcagaaataaaatacatcttaactggttttatctcatccacggctgtacctgccaaagttcgtgaaaaaattatcagcatgctatctgccatcaccatcagaccttggtttacgctgctttttcagctctctgataatggattcacttattcctaaataatcatccaaagcatataaaccataagaaataaaagcacctgcaacgaataccccaaaagctacaacaataacactccctgcagcaaaggcactggctgttgttagtactccgacagctattgttcccagcttaatacttatcaaaagctttgccatatccatagtcacgttcacaaaaaaatctgtcaacgtatattcatccttaaatataagctcaacaacacgataggccagagaatacacaattgaaaatcgtgttgctttgactgaaatgtcattctgcccctgggttccgatgcctatataaagtatttttgcattgtctgccaaataccgggttgcattaagaaaggttctgactccggcatgaccggatagacggatataaacattaccatttttccctacgtattccgtagctttaatacctatatccttaaattcattaataatccgaaaaaccctgcctgactcataaacgctgcctgcgaaattggaaataaaatcaccgacaccaaacaacgcttctttcgctgacgaaaagggattcgaagtattggtatttattaaaacatactccgcttcctcaaccgtaatcagtgcggcaacattctcgtcatcagtttcatcaccaattattgattttattttaagcagattagcctgatgatgtaattcatcataatcgggtctttcctcaaaaccgtacggcgtctctgatgaaatcactgttccgcgtacggggtcgtatttatatcccatgtaacctccctgattatttcacttaggttatatcatgagctaattatgtacaataaaacacgtcaaaaatcgccctgacaatccatttttcacaatgaaactccctgcgatgccttaagtgacatagccgatatataaatgttttataaaaaaggaaccttatggttcctcagatccgctgcgcagcgggtctttttttacatcacaacactgctgcgggtatgtgcctgcagaacccgtgaggcggtttgtgtcatggtatcgttgatttcatcgagccagtgatgcacctgctctgcggataactgcaatgacgggcagtcccggtccttctggttgttctcttccagcagcagcaccagttcggtatccagcagggactggatcatatcaatccacagaccgatttgctgattcagcggtttcccggccggagaggtgatgcagtagcggtttagccgttcagcggcggtatactgaaaatcatcccgcagtgccatccgctctgccagcgtggcggtttcaggcgcgggcagcggggtaccgagacaggtaaactcataactgtcttcccgggtaaacagactgtcattcagccggatccgcttttcctcataatgcatcagcacttcacgcagcagagcgctgaccgcaaaaaagtggtcggttttatgaaactggctgccgttaagatacggtgcacttagttgctgccgcagggattgctcatcttcttccggcgaggagacaaaacgcctgcgggatttctgtgttttgaaccatcggcgccagcggtggcgcgacagatacagcagcaggctgagtaacagcagataataaagtgagtctaaaagttcgtcctgcataagcgccttcccaagcaaaaatcagagttcacggcggacaaacgatactgtttcaggatcggcaatccgctgatagtcctttgtattcagaataatggagcactccaggctgccggcattaaaagccagctcactgaaacgttcaaataacatcggatcggcaacgagacggagatcagggtggaagctgaacggcgggatagcaccgaacacacactgtgtcagttcagctgtctctgcagggctggcgagagaggcgcgggtgccgccggttttttttgccagtgcctgtaaatccgcctgctgatcagaaggcagaattgcgaggatatactgacggacaccgtttcccttgatatgacaaaccagtgctttggcaccctgaccgtggtgtgtgccgcgcactctggcgacttcttcggttttcccggcggaggtatgatgcaccacacggtagcgggcattatgttcatccagccgggcggtcagtttctcaaaaatcgggttcatatcactcacagtctctgcatttgttgccaatatcctgcctattatagaaggttacggcaacaaaaacagcggacaaaaaaggatttcccccgctttcggattaacggtgacgggagcgtagtttttcaataacagcggccagatccagatccgcatcctggagcagtaccagcaggtgatagagcagatccgctgattctgacgtcagttccgctttatcgcggacagtggcggccagtgcggtttccactccttcctcgcccactttctgggcaatccgtttggtcccggcggcatagagttgtgctgtgtaagagctgtccggatccgccgttttgcgggatttgatcacggactccagttcatacagaaaaccctgggctgtctgcgccggagcaaaacagctgttggtaccctgatgacaggtcgggccgaccggggtgaccagcgcgagcagtgtgtcgttgtcacaatctttaaacaggtcttccagattaaggaaatgcccggacgattcccctttggtccacagccgctgtttggtacgggaataaaacgtcacgcgtttttcgctgatcgttttgtctactgcatcgcggttcatgtagcccagcatcagcacatcaccggagacggcgtgctgaacaataaccggcagcaggccgccggttttctgccagtccagttgtgcgatttcctgttccgtgagcattgtgtgttactcctgtattctgacaacgatcccgtcgcgggcaagtccgcgtttcaggtcgccgatattaataatttgtttgtggaagacggaggcggcaagtgcgccgtccacaccggcctgtaaaaacgcatcacggaagtgatccggatgaccggcaccacccgaggcaatcagcggtacctggcacacctcacgcacttttttcagctgctccaggtcgtagccgttgcgcacaccgtcctggttcatcatattgaggacgatctctccggcgccgcgctgctgcacttcctgtacccagtcgagggtgttacgggaagtggcgatggtgcgtttttcatcaccggtaaactgatagacctgatagtttccgctttccgcatcgtgccaggtatcgatcccgacgacaatacactgcacgccgaagcggtcagccagccgggtgatgagggtcggatcactcagcgccggggagttaacggagattttatccgccccgaaactgaggatcgcggcagcatcttcggtactgcggatcccgcctgcgacacagaacggaatatcaatcacttccgcgactttggcgacccagcttttatccaccacacggccgtcagaggaggcggtgatatcatagaataccagctcatccgcgccttcttcggcataacggcgggcgagggggacgatgtcgccgatgatttcgtgattacggaactgaacccctttgaccacctgtccgtcacggacgtccaggcagggaattatgcgttttgccagcatgcgatagcctccggtaatgtcattttgccgtcgagcagcgcccggccgacgatcacgcccgccacaccggtggcaggcagcggggcgatatcactcagcccgccgataccgccggatgcctgaaaggaaatctccgggaacgcggcacagatttcctgataaagcgccacattggagccggccagggtgccgtctttcgagatatcggtacataatacgtggcgcagtccggcagaggcgaaatcacggatcacgtcttcgatggtctgttctgaatcttcctgccagccgctgaccgcaacccgttttttaccgtccgcgccgatgcgcacatccagcgccagcacgatgcgttctgctccccagcgggcaaaccagcgttttactttttccggggatttgatcgccgtggagccgaccaccacgcgggcagcgccggcttcaatcagtgccgccacatcttcttcagtgcggataccgccgccgatctgtaccggcacgctgacaccggccagtaaggttttcagcaatgcgatctggcgtttggccggatctttggcaccggttaaatccacaaggtgcagcagttctgccccttcgcgctcataagcctgcaaacggctgagcggatccgcgccgtaatcgcgctgttttgcataatcgccctggtgaaggcgcactacctgtccgtcaattaaatccagtgcgggaatgatcatgacgctttcatctccagaaaatttttaatcagtgtgatgccggttttacctgaacgttccgggtggaactgcacgccgtaaaaattatcacggcagagaacactgctgaaagcctcaccgtacgtggtggtggccgccgtggcgtcactgaccgggcaggcgtaactgtggacaaagtaaaaatagctctgcggcgcgatatcacggaacagcggcagatcggcagtaaattcgacggtattccagcccatatgcggcaccggcaggccgtccggtgtcattttctgtaccggagtatcgatcaggccgagcagatcaatatttccctcttcgctggtggtgcccagtaactgcataccgagacaaatccccagcaccggctgggtcagggaacggatggtgctcaccagtccgcgctctgtcaacttttccatcgccgcacctgccgtccctacgcccggcagaaacactttatcggcctgccggataaggtcagggtcggcggtgaccagcggctgataacccagacgctcaaccgcgtagcggacggaggcgatattggcacagccggtatcggtgatcacgatgcgcatcacaacaccccttttgaactcggcagaacattaccttccacacggatggcctggcgcagtgtccgtccgaacactttaaacaggctttcagctctgtggtgatcgttcttccctttggttttcaggtgtaacgtgcagcccatggtgtaggagagcgagcggaagaagtgctcaatcatctcagtgctcaggtcgccgacacgctgatatttaaaatcggctttgtattccaggtgcggacggccggagatatccagagcgcagcgggcaagacactcatccatcggcagggtaaagccgaaacgggtgataccgcgcttatcgccgagtgccagtttcagggcttcgcccagcgccagtccggtatcttccacggtgtggtgatcatcaatcaccaggtcgccgctgacctgaatattgaggcggaaaccgccgtgggtggcaatctgatccagcatgtgatcgaaaaagccgacaccggtgcggatggtgctgccgccttcgcggtcgagccatacttcggtgagaatatcggtctctttggttctgcgctccacgcggctgtaacggtcacggcgggtcagctgctctgcgatactgttccagtcagtgtccggctggccgtaacgcaggccggtaatgcccatgttttccgcgagctgaatgtcagtttcacgatcgccgatcacatagctgttttgcacgtcgatcacacccggcagcagatatttctccaccagggtagtttttggtttacggcagttgcagttatccgccggtttgtgcgggcaaatcagaatctcatcaaaggtaatgccctgagaggtaaaaatctgcatcatcagctggtgcggagcatcgaagtcggcctgcggaaagctgtcagtaccgagtccgtcttggttggtgaccatcacaaagcggtatccggcgtctttcagtttcagcagcgcggggatcacatccggctcaaaggccagtttgtctaatctgtccacctgaaaatccaccggtggttcggtgatcagagtgccgtcgcggtcaataaataaaacgttctgtgtcatggtatccgttgtcctcagattatggcatttcaagcgcggcgatagcggcgatcacccgcaggcattcagcccgggtgccgacagtaatgcgcagacagttttccagcccgcgttgtttgcgctggtcacgcaaaataattccttcattccacaggctgcggaaaacccgttccgcatcacggaaacgcaccagaatgtagttggttttgctcgggaaaacggtttccgtcagcggcagcttttgcagctcatcacacagcatctgccggttgcggcagatttcagtaacgcgctcctgcatcacggcaatgccttccggcagcagggcttcggcagcaatggctgccaccggggatgacagcggatacggcgcgatcactttcatcagcacgttaataatatccgcagaggccagtgtgaagccgcagcgcagcccggcgagcgcaaaggctttggagagcgtgcgcaggatcaccaggttcgggtattctttcagccacgatgccacgctgaactccgggcagaactcgatataggcctcatcgaccacaatcagtgcccggttgtcgacgatatcaaacagataacgcagatcctgttcgcggatcgggttgccggtcgggttgttcgggtggcagacataaatcactttcacgccgctgagactggcggcaatgctgtccagatccagctgccagctatcgagtgacggcaccactttctgtgcgataccaaaagtttccgcactgacactgtacatgccgtaggtcggcgggcagaacagcaccgcatctttccccggctcacagaaggcgcggatcagtaattcgatgctttcatccgcgccgcgccccgcgataacctgctccgggctgacaccggcgtaagccgcatagcggttgatcacattcgcaggctggcactccggatagcggttcagattgcgatccgtaaaggtgaagtccggtgcctgcggatattcgttggcgttcagccagacatccccgttaccgccgaggcggcgtgccgactgatacggcgtcagtaactgcacattttcgcgggccagtgccatcgcgctgaatggtttgttcatcggttgttttcctccgctttcagggcattcatccgcagtgtcacggcatttttgtgcgcggtgagcagttctgccgccgccagggtttcaatcgcgtctgccagaccggataacccggccggggtcagcttctgcacggtcatccgtttcataaaatccgccagtccgaggctggaataggtcgaggtataaccataagtcggcaggacgtggttggtaccggaggcataatcgcccgctgattccggcgaccagtcaccgaggaacacggaaccggcgctgttaatggcaggcagcagggcatccgggtcgcgggtctggatgattaagtgctccgggccgtactggttgctgatcgccacacaggtgtccaggtcgcgggcaataataatgcggctggcggacagggcctgacgggcaatctctttgcgtgataataattccagttgtgaattggtttccgccaccacgcgctgtgccattgcttcatccggggtgaccagcaccacctgagaatccgggccgtgttcagcctgggagagcaggtcagcagcgacaaaggccgggttggcgccgctgtcggcgatcaccagtacttcagaaggcccggcaggcatatcaatggctgcaccgccgatagtctggctgacctgacgtttcgcttcggtcacataggcgttgcccggcccgaaaattttgtcggtggcaggaatggtttctgtgccgaatgccatcgcggcaatcgcctgggcaccgcccacctgatagatagtctccacaccgcaaagttgcgcggcatataaaatttcatcagccaccggcggtggtgagcagagaatgatccggcggcaaccggcgatttttgccggaacagccagcatcaggactgtggaaatcagcggcgcactgccacccgggatatacagcccgacactgtccaccggacgggtgaccagctggcaactgacgccgggctgggtttccacatcaatcacatccgggatctgcgcctcgtgaaagcgggtgatattggctttcgcagtcgccatggcggacttcagcgaatccggcagacggtcagcggcggcggcaatttccgcagcactgatttgcagttctgttacctgtgttttatcaaagcgggcactcagcgcgcgcagggcgttatcgccgttttcccgcacatcacggatgatgtcactgaccacgcggctgatatcaccggatgctgccatcgccggacgcatcagggcatccgcctgctgctgtgcatcaaggttttcccagcggatcaaggtattaaaggtcattgcggtcattgtcatcactccatcattttttcaatcggcagaaccagaatggagctgcaacccagggctttcagtttctccatggtttcccagaacagggtctcgctgctgaccatgtgcatcgccaccaaatccggctcaccggccagcggcagcagggtcggacgctctgcgcccggcagcagggcgatcacttcgtccagacgttctgacggggcgtgcatcatgatgtatttggattcacgcgcctggatcacaccctggatacgggtcatcattctgtcgataagctgctgtttggcaggcggcatttcaccgtcgcgctgaatcagacaggctttggagcggtaaatcacttccacttcgcgcagaccgttggcttccagcgtggcaccggtggaaacgaggtcacagatggcatcggccagaccggcgcgcggtgccacttccaccgagccgttgagcagacaggatttaaagcggatacctttctgatcgagatagcgcttgagcaggaacgggtaggaggtcgcgatacggctgtcctgaagacattccgcgccgctgtagctgaaatccaccggggcggccagcgagagacggcaggtgccgaaatccaggcggcgcagcgtgaagtaacgcgggttttgtccctgtgcctgacggcttaataactcttcttccagtacgttttcgccgatgataccgaggtcaaccacgccgtccatcaccagaccgggaatatcgtcatcacggacccgcaggatatcaatcggcatattctctgcgtaagcaatcaggcgctgctgttgtaagttgatttttatgccgcagcgcgcgagcaattcgcgggaatcttcacttaagcgacctgatttctgaatggctatccgtaagcgcgttttatctaacattttgattatcctttaattttataattctttaggtataaaaaaacccccggaaaaaagattcttccgggggttctctcttagcacgcatgccaccggaagctctgaacgtcttccggcaccaatcgcctgaaagactagtcagggtgatggtggtggtgatggctgaactggatgcgtgtcatgataatctctcgtcgtttatctgcctgttgctatcacggataatgttgtcattatggtgataacgatgtttataaattgcttgtctttcaacctatagaactcacccggactttgcaaccccttttttgcaaagaaaacagaaattaagataatttactgaaatcaaagaaaaataagccacagagaggtcatgcacgatgaaaacagtttccatcgcggggctgggctggctgggaatgccgctggcactgcatcttgcggatatcggtatccgtgtcaaaggcaccaaaaccacgccggacggcacagaggcggcgaggatgtgcggtattgagtgttatatgctgaatctgacaccagaaccggaatgtaacgctgatgatctggatgcctttttgcagacagatattctggtgatcacattaccggcatccagaactgcgggcggtggttacctgtatgtgaaggcggtgcagaatctggtggatctggcggcggcgcgcggtgtgtcgcgggggatttttaccggttcaacagccgtttacggtaatcagaccggtaagctgacagaaaactcgccggtcgatccggtgacggaatcagccaaagcgattgttgagattgaacactggctgaatgagctgccgggcgtgtcagcggatattctgcgtctggccggtctggtgggggaatcccgtcatgcagggcgtttccttgcgggaaaaacggcggtgaaaggggcgaatcagccggtcaatctggtacatcaggatgatgtgattgccgcgatccgtttactgatccagcgtccgcacggtggccatctgtataacctgtgtgcgccgcagcacccgtcacgggctgaattttatccggatatgtcccgtcagattaatttgctgccgccggtgttcagggaagaagatatcactgaaggaaaagagattgacggcagccgcatctgccgggaactgggctttgagtatcagtaccctgatcccggccggatgccgatgacggagtaagtattaactgaccggcagtgccacgatatcgcggtacgccgggcgggtttcaatccgtgcaaaccagcgctcgatatgcgggaagtccggtctgtcgtgacacacttcccgccacggatagagcagcggcaccagtgccatatctgcgatactgaaggtatcaccggcgatataatcacgctgtgcaaggtcgtcattgagcatggcaatcaggcggttcagcgcctgtttcagctcctccacccgcgccggatcgcgctgctctgccggggttctgaccagcagccccatcatcgctttgatatacgggaacagactgccgtctgaccagtacatccattgtgccgcccgggcacggaattccgcattatgcggaagcagtgtgccgtcatcatatttatccgccagatagctgagaatggcattggattcccagagaataaattcaccgtcctgataggtcgggatggttttattcgggttcatggcgaggtattccggggtattgagaccaccgaacggcccgcccgcatctttctgctgataagtcagccccagttcagtcagacaccataagactttcttgacgttagacgagttttttctgccccagacggttatcatagtgactcctgttgatagatatgcgatgacgtgtgcgtattgtcggttattttgtgtcatgaagtgtaaatttttacacgaaatccccgtaacaggaagaatcgcgttaaagtgtcattggcttaccattcatgaaatgaatatagtattcattatcacagagttatcactcttatttttgtcacgatgtaccgggtttaaagagggaagagtaatgcagacagtaatcagttcacgggtaaccggtttaatcggcgggcttgctttcggatttttaagcatcggccacgcatttgcggaggaaacaccggttgcaccgcaggtggatgcaaaagcgtatgtgctgatggactataacagcgggaaaatcctggcatccgtaaatgcggatgagcgccttgacccggcgtcactgacaaaaattatgagcagttatgtggtcggacaggcgattaaagccggaaaagtgacaccggatgatatcgtcaccgtcggtattaatgcctgggcaaccggtaacccggtgctgaaaggctcttccctgatgttcctcaagcccgatgaccgcgtaaaattaatcgatctgaacaaagggatggttattcagtccggcaatgacgccagtattgcgctggcggaatatgtcgcgggcagccaggaaacctttgtttcgcagatgaacagttacgccaaacagattggcctgacaaatacccattttaaaacggttcacgggctggattccgaagggcagtacagtactgccaaagatatggcactgctgacccaggcgctgatcaccgatgtgccggatgaatatgttatccataaagagaaagaatttaccttcaataagatccgtcagccgaaccgcaaccgtctgctgtggagcaccaatctcaatgtggacggtgtgaaaaccggtcacaccagcggtgcgggacataacctggtggcttccgcgacagacggcccgatgcgtctgatctctgtggtgctgggtgcaccgagtgaccgtgtccgttttgctgaaagcgaaaaaatcctctcctggggcttccgtttctttgaaaccgtggcaccggtgaaagccgatactccgctgactaccgagcgtgtctggttcggggatatttcagaagtgccgctgggcgcggaaaaagacatttatgtcactatcccgaaaggcaaactcaaagatctgaaagccacttttgagctggacagcaccacgctggaagcgccgctggcgaaaaaccaggtggtcgggaaaatcaactttatccttgatgataaagtcgttgaacagcgtccgctggtggttcagcagcaggttgaggaagccggtttcttcggccgtatctgggattacattgtccgcttctttgccggactgtggcattccgtcttcggttaatcacaacagcctgccggttaacggaccggcaggctttctctccgtttaccgggcaaatccggtatcacgttcagacagtactcctgaaatcacgcctccattcttactgctgctattgttgtatgtcatctcaatgacctgcgaaggtatcttcctgcggaatttaatctgaattaaggaagaaaaacacggaatgcaccatcccgtgcggctattttttatcagagcggcaataatagacaggcagataaaacggcggtaacaacaggagagacgatgattcgtttatgtccggtcagtaaagataactgggaagcgtgtgtggatctggaagtacgggaggatcaggaggattttgtggcctccaatgtgtattccctggcacagcttcagtttgtgaataatttcagtgccgatgtgatttatgacgacgaaactatgatcggttttgccatgtacggtattgatgacgatgatggcatgttctggatctggcgctttatgctggatgcacagtttcagggcaaagggctgggtaaagccgcatttgctgctttgctggaaaaaatcactgcgatgaataacacccgggagcagccgctgccctggctgcggttgagttatgagccggaaaatgaattcgcaaaacacttttatcagcgtttcggctttaaggtggtgcagatgatggatttcggggaggaaatggcgcaaatgccgctatcttcataaggttattcccctttcaggcggcaatttatcatgctgtctgctgaattaccctgttgaaatccgtataagatccgatattacatcctgatatcggatttttttataaaaaaggaccggtatttttacacaccggtcaataaaggattaaagatatggggacaattgtgtttatcgcgctggtcattgccgtggccggaattgtgtggatccggcgggtatatctccggataaaccgccttcaggctccgatcaccgaagcttatgcggcgattgacggcatgctgcatcagcgggcggagaggatcggtcagctggtggatatgacggaaaaagccggtatccgggatgcaacgctgttttattcctggcaggatgcgtatccgcgctatacagaggcggcgacactggatgaaagtgtcagtgccgcaaatgatatcagcagtgctttttatcatattatgacgctgacagagacatttccggtgctgattgcggatccgcagtttgtccgtattcagttggggatctgtgatgttgaggatgcactgaatcccggcatccgcgcttttaatgaggcggtacttcagtacaatattgcggttcagcactatccggacaccctggtggccgggctgttcgggttcggacccaaaacactgctgctgatgtcctgatacaaaaaaccccgcaatatgcggggttttttgactttccggggaccggagttaatcagtcacacgggatcactttgattgccaggccgccctgtgaggtttcgcggtatttggcgttcatatctttaccggtttcatacatggtttcgataactttatcgagacaaacgcgcggctcactgacacggcgcagcgccatacgggcggcgttgacagactgaacagcggcaatggcgttacgttcgatgcacggtacctgtacctgcccggcgaccgggtcacaggtcaggccaaggttgtgttccatcgcgatttccgccgcgataaagacctgcatcgggctgccgcccagcagttcggtcagaccggctgccgccatggagcaggcaacaccgacttcaccctgacaacccacttccgcaccggaaatagaggcgttcattttgtacagtgaaccgatcacgctggataccaggaaatagcgggtataggcgttctcattcaccggacggatgaatttatcgtaatacgacagcactgccgggatgatcccgcaggcaccgttggttggtgcggtaacaacacggccgccggcggcattctcttcgttaacggcgagggcaaacatgttgatccagtcaacaacctgcatcgggtcagtggaagtgttatcactggtgaccagctgacggcgcagtgcagcggcacggcgtggtacacgcagcggccccggcagcagaccttcggtgttcacaccgcgctcgataccggctttcatcacgtcccagactgctgccaggtgagcagaaagctcttccttgctgtgcagcgccagttcgttctgcataaccagtgctgacagagacagcccggtttcgttgcagtgtttctgcagatcagccgcatactggtacggataaggcactttggtttcgctgtccgcagcctggccaaaatgctcttcatcgacgataaagccgccgccgacggagtaataggttttcttgtacagtaattcatcaccggcgaatgcgctgatggacatgccgttttcatgcagcggcaggttttctttatggaagttcatcccgttttcgcgcgggaaatccacttcatggcgttggtttgccagcaaaaggcgttcacgttcttcaacatccctgataaagcccggtatcgcgtcaatatcaacagaatccggcaggttacccgcaagacccataatgatggcgatatctgttgcgtgacctttccctgtcagagacagagagccgtacacatcaacctgaatgcgggtggttttttccagcagtccggccgcgataagatcatcagcgaactgtttacctgctttcatcggaccgaccgtgtgagaactcgacggaccaataccaattttgaagatgtcaaatacactgaccatattgctcgccccctatgttaaggcgtggattaatagtgtcgtgatgattcacgaagccgttacttttcagttccggctgattattgttgttgctgttgcccgccggagagggcaacagtcatttatttattaaccaaaaaacagctgatacagattgtagaacaccgctgaaattgcaatgagacccatcacaaccacaaacagattactcaggtgaccggcatatttacgcatcgcaggcactttgcggattgcatacatcggcatgataaacagcagcatagcgatgatcgggccgcccagggtttcaatcatacccagaatgctcgggtctaaggtggcaacaatccaggtggttaccagcataaacagtgcagtcagtttattcagtttagacggtgcaatgcttttgcccttggcgcgtaatgctttgttaaccagaccgttaaagccttcacgggcacccaggtagtgacccaggaatgatttggtgatagcaataaacgcgatgaatggtgcgatataggcaatcatcggnnnnnnnnnnnnnnnnnnnnnnnnnnnnnnnnnnnnnnnnnnnnnnnnnnnnnnnnnnnnnnnnnnnnnnnnnnnnnnnnnnnnnnnnnnnnnnnnnnnnnnnnnnnnnnnnnnnnnnnnnnnnnnnnncgcattttcgccgtactcttcacgcttggcgacagcaaaggcagagataatcggggaatggttaaaggagaacaccattaccggaatcgccagccacagcgttatcagcagaccatgaccggtgacactggccgtattgctgtcgaaagtgagggttttgaatacatctgtgctccagtgcgggatcagatacagcgccagcaccatcagaaccgccacaaacgggaataccagcacactcattgccttgacaatcgcggcctcaccgaagcggataatacacataatcccgataatcagtaccagtgacagaataatgcgcggcggcgccgtcataggcatctggttaacgataaagctttccacggtgttggtgatagccacactgtagaccagcagaatcgggtagatagcaaagaaatagagcagggtgataaggccgccggctttggaaccgaaatgctcttccaccacttcagtaatatcttcgcccggatttttaccggacaggacgaagcggcacatgccgcggtgtgcgaaaaaggtcatcgggaaggccagcacggccatgatgataagcgggaccagcccgccgataccggcgttaatcggcagaaacagtacgcctgcaccgatagcggtaccgtacagtccgagcatccagacggtatcggacttacgccatttacgataatcattgctggtgtcagtcttgctgaccacaacctgcggttgtgttgtatccatagaagtctccaaaatgtacaacaataacaacaattaaaattttgcacgctgatctgtgcatttattcgtctctgaaatagggtctatgtacgtaaccagataaaaaaataagtaaagctaaaaagtcaccggcaattgcttaccggtaaaaataataaacagcagcgacctgatatctgtaatggataaataaaggtctctgcattaattcatattcaaaagtacctgaaattgataactctctttctgatggtgaaaatatactgtttttcagtggaaaataccgtgatcgcagtctcaaatgctataaatcacagtaaaacaggctctgttgcaagatttgataaaattgttaatccgggtttacggaatggagtatgccgaaacggcataaagggattgcgtgctctgtaataatgcggtttttgtcggtattctatttaattaaattaatttattcatatattaataaatatatcatccgcataaatcgcattatttagaaatagcgaaagcctgatttttacaggactaaaaaccctgtttaagttgtggtttatttgtgttatttgttgtttttaatatggaaaatattttttgcttaagtgcgtgactgtaccggatgtgtgctgagaggcgagcagcataaaatatggctttatataatgatcactctgtatatctcagatgattaaaataattattttaatcacgaattaagttacttgcgtgatactggtttcatataaaacaaaaatgttaaataaataccagaataatattctgcgaacaaaaatagtactgccggcagtgaaaaatatggttaaaaaaagatcgccggcggcaattaaacagcgataaaaaaataccggcgtgcgggccggtatcacgccggtatcagcagaacccggcaggttgcccgccggagaggccaaccgtcatgtacttatcagccgaaaaacagctgatacagattgtaaaacaccgctgaaatggcaatgagaccgatcacaaccacaaacaggttgctcaggtgaccggcatatttacgcatcgcagggactttgcggataacgtacatcggcatgataaacagcagcatggcgatgatcggaccgcccagggtttcaatcatgcccaggatgctcgggtccagtgtggcaacaatccaggaggtcaccagcatgaacagtgcagtcagtttattcagcttagacggtgcaatgcttttacctttggcgcgcagtgctttgttaaccagaccattaaagccttcacgggcacccatgtagtgaccgaggaacgcgttggtgatcgcaataaaggcgactaacggtgcgatataggcaatcatcgg

SEQ ID NO: 24 - DNA, 77 bp, unknown
  Altogen 322075 strain
tgtactgtcgggacgttcctggtgaactggtattacaagcggaaagaattccaactgaaagccggagaacatcatga

SEQ ID NO: 25 - DNA, 953 bp, unknown
  Altogen 322075 strain
tggcgcattctcgcgttcgacgatgctgcgcaaactcaatgctggtgacatcgatggcgcatgtgacgaaatgaagcgctggacatttgccggaggtaaacagtggcagggactgattaaccggcgtgagacggagagagcgatatgtcacggaaccctttaactctgatcatcattgctatcattctgctgactactgctattttggcgggttgttatctgtattcactcccgaatcactgtaagccgctgccgggtaatcctctggatggtgtgatccactatgagtgtgaaacgccatgaaaagggtaatcacggtattgctcaacggctgggtgtgggcggtcgtgttctttggtctgtggatgttcagcctgctatcggctgaaaaatcagaagggcagcacaaagacaatgtgatcactgaaaagcaaaaggtgattgataacgcctacaccagtatcgatatttttgaccgcgtggcagccgcaaacgctaaccggaatatgcaggcagaagccaaatcacaggagaagcagattgaataccgcactattatccggaaagagcctacctgtaatctgtatattcctcagtctgtttctgacgggctgctcagtcacgtctacgccatccgtgaatcagcaatgcgttccgctcccggcatcactgacacaaccggtactggcaccgctgccacccgccgactgacatactgccaggtggttgagtggatagagccgctgctgatggcactggataaggcgaacgggcagttaatggatatccggaaagcggatacagagcgaagcgggaagccaagataagcgggcgatgcgggagattgaggcggagagggtgaagtaaaaaaagcccccatgacgaggggcacatataaaagactcaggaaatgtttattgtgattttcgtgttgagtatatccccgataattc

SEQ ID NO: 26 - DNA, 153878 bp, unknown
  Altogen 322075 strain
  misc_feature (97157)..(97157): n is a, c, g, or t
  misc_feature (114503)..(114503): n is a, c, g, or t
  misc_feature (140978)..(141041): n is a, c, g, or t
gggcgaatcaatagagcctcgctaaatagcggggcattttattaccagaggaaaagctatgtttaaacatgaattaggtcaggttgtgcaggtcaccatcagcggcgaagaaggtcatgtgaaagcccgtgctgaatatcataacggcccgaatcagtatctcattcactatctggcagcggatggccgtggaactgacggctggtttgaggaaggtgagctgtccccggctctgccactataacccatcacaaagcctgctcactgagtgggctttttaattggttaaggagaaagcaccatgaaaccggattggggggtgttacagcaacagttcctcgccgagcattcagtaacgggaatatccccgaaagaatggtgtgagatacagggactgaattacgcaacagcgcgtaggtacatcaaaaagccaactgcgcagagtgcgcaaaaaactgcgcaaaagaaagtgcgcactgcgcagaaaaaagaatgcgcaaatgaaccggtgcgcaatagtgacataccggatgcgcagagtaatgaatccgacaatgcgcagaatgatgaaactgagttcaaccttcgcaattaccggctcacagacttacaggctcgtttcgtgactgagtatcttattgacctgaaccggactgctgcatataaacgggcagggggaaaatgtgaggggcataacgcgtacgcaagcgcgagtcagctatatagaaatattgaggtgaaccgggcaatacgggacgctctcgcagcacgggaacgcagagccgaaatcacccaggacgcagtattaaaaatgtggtgggacattgccaccgcagatgtatctgagctgacggaataccgccggttatgttgccgctactgctggggctttggttttaactatcagtggcgtgactcaatagagtttgaggatgctgtcagtgaagcggccgcaaagaagcagaaggaaccaaacgacagaggtggctatggttacgacagcacgcttgacccgaatcctgattgcccccgctgtaacggtgccggtattggtcgtcctcatttccacgatacacgggatttaaggggcgcaagccgccggttatttgccgggataaaagaaggcaagttcggtaccgaggttatcacccgtaatcaggatgaagcgctgaaaatggttgcgcagcatttggggatgctgaaaaacaggactgaggtcaccggtgcagatggcggcccgatacaatcaacgggatttgacctaagtggcctgacgacagagcagcttctgcaattgcgagaaaaagcggggaaatagcctctgtttaacataatggatcttacccgaataagcgaaatcaggttcacgcaaaaagcacactgaacctgtcaaaaacaatactcatccccgggcaatatgcctgtttattttgttactcatttgttatcaaaaaatcagaaacagcttcggagtgattcgacgctgaaaggctcgtttttgtcattttaggtgatgtgatggatatcaatgtcgatctgtttgatgaagaagttcgcagagagatagcacggcgcagcctgcatgaatttattcaatacattaatccggaatatatcaccagccacttttcaaaaacggtctgtgtatctctggataactttctgattgagatgatggccggtaagcggccgatcctgattctcggcgcgccgccgcagcatggtaaatccgatattgtgtcgcggtatcttccggcgtatttcttcggtaagtatccggataaacgtgtgggcgcattgtcctattcgtcagatctggccggtgacatgaacactgatgttcagcgcatcatgtcgtcagatgagtaccggacgctgtttcctcaaagctggttaggtaataaaccggctgacggtgtggcggttaagcgtaataccgaagaattcgggattgccaatcacaggggaacatacgtctgtgccggtgttggcggcccgctgacaggtaaaaaagttgatctcgggattattgatgacccgataaaaaactcaaaggaagcgctcagtcccacggttaaaaagtcaatttggaactggtacgcatcaacgtttaaaacccgcctgtctcggaacagcggcgagatcatcatggcgacccgctgggccacagatgacctttccggccgggtaaaagagaaaacaccaaaagcaagagtgctggcatttccggccatcaacgagcagggtgaagcgcttgtccctgagttgcatccactggaccaactgctcgaaacaaaagccattctcggtgattacttctggtctgcgatgtatcagcagaaaccgaaaccgggagacgggcagatattccacgaagaattcgcccggtactacctaccgaaagatctgccggacacctttgatgaagtcattcacagctgggatatgacgtttaaggacagtgacggcacggactacgttgtcggtcaggtctggggtaagaagggcgcaaatgcttatctgctgtatcaggtccgcaaacgcatgagttttaccgaaacactgaaagccgtgaagctgctggctgagaaatacccgcaggcgcggcgtaagctggtggaggataaagccaacggcccggcggtcatcgactcgcttaaatcaactgtttccggtctggtgccggtcgagcccgatggcagcaaaattgcccgtgctcacgcctgcactgctgaatgggaagccgggaacgtctggctgccccataaagatattgcaccgtgggtcaccgaaacggtggaagaaatcacaacattcccgtttgccgggcacgatgacaccgtggatgccatgacacaggcactgcggtatctgttccagaagaaaggcggcggattcttttcacgcaagaggacataacatgtggccgttcagaaagcggaaaacagcagaggttgccgcacctaagcggtcagcattctcaacgcatttatattcagcactggcagccgaaacagggtttcaggggctggctttgccgcaacccaccatgcagggcgtggcgatggacagtatcgacggcactgtaccggcattcaaaggcggtcaggtatacggcgttcctgagtcacaggcagcgtggtacgcctcgcagatgttcatcggcaacaatatgtgtgcggtgatcgccaaacactggctggttgataaagcctgtaacatgcccgcgcgtgatgcgatccgtcaggggtatgacctggactgtgacggcggagacaatcacgacatcagtaaaaagttacggaagaaggataaaaaataccgtattcagcaccacatgaaagagctgatccacttcgggcgcgtgtacgggggcagactggcactgtttctggttgagacatccaacccgcaggaatggtatgaaaacccgtttaacccggatggcgtgacgaaaggcatgtacaaggggattaaacagttggacccgcagtgggtaacaccggatttaaccgatgccaatttacaggatccggccagtcctgatttttatgaaccgacctactggattatcggcggacgccggtaccacaaatcgcactttgtgaaatttgtaccgttccctgtgccggacattcttaaacccacttataactatttcggggtgtctgttcccgaacgggtgtatgagcgtgtttatgcatcggagcgtactgccaacgaagcaccacagctggcgatgacaaaacgcctgctgaccatcagtatggccgatgttgatggtgtagacaaaaacgtcattcatgaaaatatgctatatttcatggagatgcgggataactacggcgttcagacggttggggaaaaggatgccgttcagcagtttgacacctcactcgcagatctggatgccaccatcatgacgcagtatcagcttgtggctgccgctgccagcgtaccggcgacaaagctgctcggcacaaccccgaaagggtttaactccaccggggaatacgaagaagccaactaccgggaagaactggaaagtattcaggccaatgacctggaagaactgctgcaacggcattacgacatgctgcaacgcagcgagggattgggaacggaagaattgtcggttacctgggcaccactggacagcccgaccgctgtcgaaaatgccgatattcagcttaagcaggcgcagaccgattctgcgtatgcagcggtcggtgcggttgacgggctggatatccgtaaaaagctggcggcggataaagaatcggcattttacggtattgacgtgaacgaggacgattatgccccggaaaatacgggtacgaaccaaacgggcacggtgggcggcatcccgtcaggcggttatgaagggcaagccgctgcaatattcggcagcagcccaaagccgttaccagcgtgacatgtcacaactgattaaaggcatgattgccgattacgaaaagacattcagcagtctgcatgatgactttgacggcgtgaccatggatgccagctttgccagccagaccaaaatctggctgaaccggctgaaacgtaagtgggataagatttttaacagtaaggccgcagagatggcagataagttcacctcgcaggtggagatgaacgcacagcgcagcctggacgattccctgaaacaactctccggcggtattacaataaaaaccccggccatgcccgaagccctgaaagacaaaatgattgccgcaacggcagaaaacgtatccctgatcaaatccatcccgcagcagtttcattcccgtatcgagggcgcagccttgcgttcggtcagtcagatcggcagcggcagtaaaaccctgctggatgaaatacgggatatcggcggcgtgacagagaaacgggctaattttattgccgttgaccagacccgcaaaattaccacggcggtgaactatgagcggatgaagtctgccgggatccgcaaagcaatatggcatcactcggcaggcagtgccgaaccgcgtgaattacatctgcgtctggacggggaagtattcgatctggataacccgccggtgattgatgaaaagaccggtgaacgcggattacccggacagttaccgaactgcaaatgcttctggacaccggttatcgactttggtgaggagacatgacaaagcgaacctatgacaacaacggctggctcgaagtaaaagacaaccccatctcaaaggctggggtttttgattatctgggggctgaaatcggcgcaccggagccggacagaatttacaaagtgttccggccgccggaggaactggccagggacgaaaccattaaatcattccgcctgaccccgttcattgtcgaccacgaaatgctgggtaaaaacgccacaccggcagagaaaaaaggtattcagggcgttatcggcgaaaacgtgtattacgaccatccgtatttgcgcgggaatatcaaaatcttttctgacgccgctctgagcgatatcagcagcggaaaaattgacctttcaccgggctaccgcagccggtatgacttcggtaaccccggtgtgtacgagggggaggcatacgaagttgttcagcgccacctgcgtggcaatcaccttgcattagtcgatgaagggcgcaccggcgctgacgtggctgtgcaggatcatcttgttgtaaccattgatacaaaggaacttattcgtatgagcgaagaagacaaagacaaaaaacagccgaccggtgacgagaacggatttacaccggagcaggttgagcagattaaacaaatcctcgtggccacactggctgccggtacaccagcaacggatgaagacccggagaaaaaggaaacgactgacggcgatcctgatccggaaaagaaaaccggagatgccgaagccgaagcggaaaaagccgttgaagacgcagaggcggaagccgaaaaagcggaatccggtgacccggatgcggtagaagcggcggaagtggctatcgaaaccgcagaggaagcgattgccgaagcgaaagaagaacttgaccaggcaacaaccgacagtctgacgcgtcgccttaagcgtctcaaacgcagtattgcgtccatggatgaaatgtcctcaatgaaacgcaaaattgcccgtctggaaaaagccaaaccgaccatggacaccggcgaactgttaaagcagatcggggaacgtgacgcactggcgcacaagctgacgccgtttatcggggtatttgatcacgcaccaatgacgaaacagcaggtggcggaatacggcgtggaaaaactcggtatccgctgcgataagggcacggaaagtattgccctgaacgcctggatgcaggggcgcacaccggattcacaaaaagcgcatgcgacgatggataccgccgcaggcacggactcaattatgaaaaagtggggtgaaaaataatggcaatcccgaataccgtggcgaacggcatgatttccggtgttatcggtgaaatcagtcattacggcccgacccgcgtgaccgcagcggtgatcagttctgcggatgaaacgaaaaacctcttcggtcgtgcctacacatacaaagatgattccgttgaatccgtgcaggttggcggtgacggtgcgtttgccgggatcatgattaacccgaaagcgtaccgtatcggtgaagaatacgcccgtaacgggacgcagggcgagtttctcaccatgggtgagattaacgccgaaatcaccgccggagtgaagaaaattaatgcaccggtggtgttcagtccggcggacggttcgctgtctgcgaaggcaaaagcggaagccggtgatctggttatcggttttgtcagccgtcacattgagtcagcggaatcgccgcatctgtgtgttatccgtctgaccgaaatcccgtacacagtggctgcgaaggaaggtgaataatgccagtcagtaaagaaaaattttatatgtccggccgcgatatccgcaagcacgggcaactgaatattaagcccgatcagaagtggacatacagcgaactggatcagattggtttcggtggtctggctgcaatggactccgcactgaccggtccggccatgtccggcgggttcattcagcgtgagatgttacagcatgtgctgccggggcttatccgtaccgctacccgcgtccgtgtgctggatgaaatcaccggcgtactgaatgccggtaactggcacgatgaagaaattatcctgaatgtggcaacgcctgtgagtaaagccgaattgtacggtgatcacactaatattccgttgtcctcctacgggcaggatcaggaacgtcgcggtattgtccgttttgaatcgggattcctggtcggaaaactggaagaggcccgtcagtcagcagcagggtttgagactgccgcagagaaacgtaatgccgttgccgaagcgctggagcaggggcgggaacgtatcggttattacggtttcaacagcccggacacccgcgtcttcgggatgctgaatgagccaaatttaccggcgtatgaaacggcagcagcaaaatggaaagggggcacgtttgccgccatcaccggtgatattacagccatgttctcgcgtctggagatgcagtccggcggtattatcaaagatgatacggctatcacactgactctgccgctgggctaccgctctgcgctgaatgtggccaacccggtcgcccggggtgaaacggtgtatcagtgggtgaaagagaactacccgaatctgcgctttgtgttctcaccggaatttgccggtgccaacggcggcgcggatgtggcgtatatgtttgccgaaaccgtggatgatgattctacggcgaccagtgcggttcttctccaggtggtgccggtgaaataccagctgctgggttcagagaacaaagccaaaggctatctggaagatgccaccaacgcgaccgccggtatcatcgtcacccgtccgtgggctatcacccgtctgaccgggatttaatcctgtaacgcctcattgccctctgcggagggcttttttatttccgggagaaattatgtctctgtatatctattgcaccctgtccaacgaccagaattacgccacaccggacggtccggtgtttatcgccggtcaggccaatgtaatgaccaaacacatgtacaccccgcgtggacgcgtgactgaaatcagtgatgagcagtacacgcagctgaaaaataaccatgtctttaagctgcataaagaaaacgggtttattgcggtggaaaaccgcaaagaggatccggataaagtggcgaccgatatggaagccagtgacaaatccgccccgttgaccgaagaacaactgattgcggaggggaatgagccgccggtcagcaacaaagacaaaaagaacagtaaaaaataagggggttccgtggacccgtccgactttccgttagagtctttccgtgccatctataaggctttttccgcagtgcctgatgatgaaatttttatcattgcactggaagcactgaactacttctccccctgccgtggtgtctgcacaaattcagcgtggatgctggtcgtcgcgcatatgctcgacctgaatggccgtattgctgacggggaatcaccgaccggtgtcgtgaccagtgtcacgatagataaagtcagtgtgtcctacaccgcgccgcctgccggttccgattggtcgcactggttcaagatgagtacctacggccagcagtttctggcactgataaaacggtgcagtgtaccgcgttaccacggcggtggcggagaaaggatcgcatttcgcggagcctttggccgattcacacggggaggtcaccggtgacaaaactggcacagctgaaagccgtgtatgacgaactggcaaagaaacagcttaaggttggtttttttgcacactcacagtacccggacggcacacctgtcgcgtatgtggcggcgattcaggaactcggttatccggccggggggatcccgccgcgtccgtttatgcgcccagccatgacagaacacaaaccggaatacagcaacctgattgtccgggctgtgaaagccgcagtgaaaggcaatatcgccatcactgacggactgacgcaagtcggtgcaaaagcagcaggtgatgtgaagatggtaattaaatctgtcaccacaccgccgcttaaggataccacggtagccgcccgtgcccgtcggcacagcaaagggaaagccaccagtaagccgctggttgactccggtctgatgttgcaatccgtcacttttgccgtggaggataaataatgttcggaaatctgcaccggattgcctcgcggtatgttccgcagcaaaccgtactctggtaccgcttcaaaaaccgtgagactgacgaacggggccatgatcagaacatgtattatgacccggttgaggttcgcgggagctggcaggcggtggatacccaggacattcagtctatggggctggacaccagtcaggtataccgccgtttgtatacatcccacgatatcagcgccattcagcgtggaacttcaccggattatctggtcttcggcggcaaacgctacgatgtggccggcgatgctgactggtatgcgcaggatggctggaagtcggttatctgtattgaggcaggcaatcatgacggataacgatgttgagattgctgtccggaaacagcttctggcgcagctggcgcaggcgggtatcaatatcccggtcagagcagggtttcagtcagcaaaacaggggcgggaagataatttcgtcatgttctttcctgcaggggaaaatccgcagggctggcagaagcgcagttataacccgcagggcagtgatgccggtcacctggaagcacagcagtacgaaacaacattccaggtacaggcatttatcaccgaattcagcggttacaccgcgaaagatattacggctgtcgtccggatgatcgttaattcgttaccgtttgttgaagcactgcgcaaacaggggatcggggtgcagcgggcgaccgccatccgtctcccgtattttgttaacgaccgcggcgattacgaacaaaacccgtcttttgattttaatgtgacctatacccgcacactccgtccggaaacggctgctgttaccgcactgtatccggatattcaccgcatataaggttttactatgccaattaaacaaacccgttacgtcgatatcgcgtcagcggtgatcggcgcgtctgccgtgccgatgcgtaagctgacggcgcggttattttccaccaatcctaaaattcctgccgggcacgtactggagtttgcatccggtcaggttgatgaactgctgggtgctgactctccggaggctcagttcgcacggcagtatttcagctatgtcagtccggccccggtcagtaaaccgaaagaattgcagattgcttcttacgagccggttggccgggcaccgactttgttcggagcaaaagccggagcgctggctgatctgaaaatgattgctgacggcgcgttgtctgtgacattcggcaaggtcaccaaaagctacaaagatatcgatttatcagaatcaaaatcgtatgccgatatcgcgtcactgattcaggcgaaactgaatgccgaaagtgaaccgcagttttccggggcgtatctgacctttaatgcactcgacagtgcatttgaactcagcggcggcgtgcaggaacgtgcatctgtcagcgtggggtattccgttcttgcggatgcgatggggctgtcagccggacgcgcatccgagggcaatccggcacagactccgctggaggcattcaaagttgcggagcaggtttcggactccttcggcagcgccacatttctgagtgaactgtcgctggatcaggccgtcacactggcgcagtacgttgccggggagaatgtgaaataccagcttcatctgagtgtgacagaagacaatgccgaagatttcagcgcagcgctgatcggcaccgcatcaaccggtctgaacctgaaaacggaaagcggatattttatccaggcgctgccgatggcggtgatggccgccacagattacgatcgtaccaacgccaccaccaactatatgttccgtcagctcggcgtgacattcccggcgcaggtcaccacggatcaggatgcggaccgtttcgataaactgcgggtgaattactacggcgaaaccgctgtggccggttcacagatccgcttttatcagcgcggcttcctgtgcggcggcagttctaacccactggacatgagtgttcatgccaatgagcagtggctgaaagcgtatatcgcgcagcagtggttcagcctgttactggcgacacgcggtattccggccaacaaagacggcgaagcccgggctctgatggtcattgccggtgcggtcaccaaagccgtggataacggcaccattctcgccggtaaaaccttaacggaagtacagaaaatcgcggtagcggatgcgtccggtgatgatctggcctggcacgatgtacaggacaaagggtactggtacaacgcacagattgttgaaagtaccggtgagagcgggttaccggagtacgtgatgaaatacgtgctgatttacggtaagggcgactgggtgcggaaggtcgaaggttcacacaatttagtgtaaggataaaatatgaatgatgtctcagcaaccggccttgcactggtggtacaggccagcaaaacattcccttccgggatttttatcacgcagtttgcggacgatgcggatccgctggatttaccggcggtggatatcgcgcagaccggtatggatatcaacggcaatctcgtgagctggtcaacgcccacaccacagactgtcaccattaacgtgctggcgggcagtgaggaagatcagaacctggcaattcttctggaagccaacacggcgaaaaaaggccgccgtcatgccggtgacgttatcactatggtggcctcttacggtgacggctccaccactaccgcccgtaacggcaaaattaccaacggcagccgggggaactctgcggccagtgccgggcgtcttaaatcaaaacagtacacctttgtgttccaggattttgactccacgcgtaatcgttaatcaccggcgggcatgtcccgcctttttttacggaataaaacatgctgattaaaccgaaagaagttcagattaaagatgtggacggtattgaaaaggcatttgtcatcagccgtctgcctgcggtgaccggccgggaaatccttgccaaatatccgctgtccaatgccccgaaaatcggggattacgaagtcagcaaagaggccatgctgaaaatgatggcgtatgtatgcgcagtggctgacgatggtgaagagattccgttaaagacacagacgctgattgataaccatgtgcctgatggtgaatccctgatccgtcttgagctggaaatgctgaagtataacaccagttttttcgggaccggcgggaactccggcttcctgcctttcctcatcagcaaggtcggcagttcactcccgtcagttataaaaacgctgatggcttctttgcagtcatcatcagcgaaggattcgccaccctcaccgaactcaaaaccacagtagatctggaagaagcgatggacttgtgggaaatcgcgatcattaaccgctacaacgaagcgctggccgcttcaaaggaccgataatgtcattgatggatacctttgttcaggtctttgaatttgatacccggcaggctgacagtgcatttgaccgtgtgcagcgttcaacggatgacattatcgacgggatgaagcaggcgcagactgccgcgcagcagggggctgattctctcggcggcgtgttcactgaactctggcagtcattacaggggctgtccggtgagcactccgttgatttttccacgaacgcggctgatgtggcagagcagaccggggcggtaaaaacgcaggtggatgcggtaacagattccctgtctgaactggaatctcagcaggcgggaactgatgccggatggcaggatattcaggcctcactgacgggtacggaggccggttatcaggcgctggttcaggcagtggcagcactgagcagtgacaccgccgttctgacggatgaggaaagtcgcggtaatgcagtccggcagctggccggtggcatcattaaagccctgcagggggattaccgtgaacttggccggattgcggaggaagccggtaaaaacagcgttgcagcaggcagcagcgaagtcgcggcacagaaaaaagtacaggatgcactgagcaaaacagatgaacagtaccggaaggccggtgaatctgtggccggatttgccaaaaaagccctggcagccgtcggcctgtttatgagcgcatctgcccttgtcggtgaatccgttgcccgtgccgctgaaatcgaatccctggataaattcggcaaaaaaatcaatgttgccacggcagatgtggatgcctttgcagggtcagtggctgaactcggtggtacccgtgaggcggcgcagtcagacatggaagcgatggcgaaatcattcgggtttgccggtaactccatggaaaaaatcctgcggacggctgacaaagtgcagggtatgaaattcggtaaggccaaagccacactcggtgcgctcggtgtgtcggatgataaaaccgttgagctgatgatgaaaggccgcaaagaactcgaacggatgatgggggtgcaaaaggaatattccggcatcaccagagagagcattgagcagtctgtcaaattcaacaaatccatgcagagctttaaacagtcctccggtctgctgaaaaacagctttctggagatggtgatcccgatcctggcaaccggccttgaatgggtcagtaaatttgtcggcttctgcaaagaaaacaaaaccctgatcacgggattttttattgcagtcggtatcgcactggcaacctattacgttccgccgatgctcgcggctgcggcggccacactggcggcaacatggccgattattgccattattgcggtcatagccctgctggcggcagcgtttgcgctggtgtatgacgacatcatgaatttcatcgacggtaacgattcgatgattggccggatcctggataaatatcccggactgaaagccgtcattctggcgctgtgggacgttttcaaaaaactgtttaatttcattattgatgttgccgttattgtcggcaaagcggcagctgatgctttcaatctcattattgacgccggtaaatcgttgtggaactggctgctcggttttatcaaaagtctggggaactggggaaaaagctttcagggggttttcgataacgtctccaatgctgtggttggtattttcaaatggctgtggaaacagatagaagcttaccttggctggatcaacaaagggctgaataagattaaagagggctgggcggcctttaaaagctggtttggtgccggtgatgatgatattgaggttgaccagaccgttaaccgcacggtgaatgaacaggggcagattgggtacgacatgccacctgaaaaaacgatcagtgaggaggacgcggcaaaaatggcgcaggccatgaccgcacatctttacggtgtgtcaaatgaccctatgaatcctgtcaccagtcaggcgatcagcaatcagttgacgaccagtaatgaaacaaacatcagtatcggtgaacttaaggtcgaaacacaggcaacggatgcacagggtatggcggcgggagccaaagatgcactcggatctcagttgcaggactttggacatcagacaaatacggggctggggaaatgattacggaagtgaagatatttgatacggaatccttcactacgctgtttgagtcagtaaatcccgttcagctgaacgtccgggatgagcataaggcgacgcagtttcaggtggaatccggtgaaacccgcagtgaccatgttgtgattaacccggtggaaatcggtatggatctgatactcaccggcgaactgaaagatgcttttgaagccatgcagcaggcttacgatcagcatcagcttgtcggtattcagaccagagtaaaaacctatcagccgatgctgatagtcaatttttaccacgatgaaatcccggatatggcgggcgcggtgaaactctccctgcgctttaccgaatggcggacggttgagccggaatacggtgaactgccgccgcgtaaagtcgcgaagaaagagcagagcagcacggtaaaccgggggaaagtccagacaaaagaggctgacactgccacgaagaaaaaagggtctgttgcaacccgtatcgcagatggtgactggagtctttcatgaaaatcataccactgaatgcggctcccaatcagcgtctgcgggttaccctggacggacgggaatgggagctgacgattaaagccgcgcggcgtgtgatgtgctgtgatatcaggtgtgatgaccgggtgattgttcaggggatgcgtattgttccggggcagccgctgataccgtaccggcatctcactcacggcggtaattttgccctgctgacagagggggatgaacttccgtggtgggaactgtttgaaaaaacacaaacactgatttattgggggagcgatgattgatttgcgccggatccgctgcggcattgaacttaacgggcgtatgcagtggtatgagggattgcgcatccgggccgggggcaccaaatatgccaatccgctgcagaacgaatgcacggtgaatatcgacggactgaacgcggaaacccgtaccatgctgctgaccgaaaccagtccgttcgccggcaataaatcctcaccccggattgttgttgaggccggtcgtgccggtaccggtattttccggatctacaccggtgatattgtcagtgccgaaatctcatcaccgcccgatgtgacgctgacactgaaggcgaaaaccggcaatgccagcgcccgggatattgtgtcaccggaaggcaggcaactggcaaaaatgagtgagattgcagctgatattgcccgtgactgtaacgtgaccctgaattttcaggcaacggataaaaatatcggtaactggtatttctgcggtccggcgctgaaacaggttgaacggctgcaggaagccggaaatgtgaaagcgttcattgatgatgatgtcctgtatgtcaaagacagtgataaggcactttccggaagactgcggatcctcagtcagaaaagcggcatggtcggtataccgaaagccacggagaagggggttgatgtcacctaccttatcgacggggaatcctccctcggcggcatgctgcgtctggacagcaaatataaccccgccctgaacggggattacattatcgagcagctcaaattcgatattgcttctcacgacgatcctttcttttatcaggcaacctgcaaacgggcctgacacgggcaaaacaatgaacaaaccaaacagtgaccaggcgaatgacggcagtctcgccgggcagtttatggctgcgttccgtaatctgctgatgaatattgatgacatgcttcccgccaccgtagtgagttacgacgatgcgacaaaccgggcggtaataaaaccgctggtaatgatggtcaccacggaagggaagcggatcgggcgtggtgcactgccgaatatcccggtattccggtttggcggcggcgggttctttatccggatgccggtaaagccgggggatttcggctggctgaaagcgaacgaccgggatatcagtctgatttttcagcgcggcggcctggaggatgaaccgaatacggccaggctgcatacattcagtgatgccatgtttttccctgacacgctcaaaggctgggtgatcgacggcaaaaacgcggacgcactggtggtgcagtcaacagacggttctgtgtgcttatccctgcataatgataaagcagtctttgacggcccgaaatttatctctaatgcgccggaaaacgaatttaacggcaatgtgatcgtcaacggcaaccacgccgtaaacggtaacagtgaatcaaacggcggcactatgacgcataacggcaaaaatatcgggtctacccataaacattccggtgttcagggtggcaatagtgattcaggagagccggtatgaagacctttgatgtgaacgggaataatgatctgttcaccggaaacgacggcaatattgccattgtcagtggtgaaccggcggtaaaaaacgtttgtgcgcagtatgtgaaagcgctgcgcggggaaatgctgcacaagctggataaggggatcccgtactggaaaactaccttcgggcgacaggctgatctgtcgctgtttgaatccgcgttccgcgagcgtatgcgggaaattccgcaggtgaccgccgtggtgtcattcagagccacgctgaatgataacgaactgaactatgtggctgtcctgcagacagaatacgggagcatcacgttaaatggctgactataaatacattacctcatcaggtgtgattattccggataccgcagaactgcgggcggcagttgaggatgaattcagagccgtatttggtcaggatctggatgtctccccggaaaccccgcagggggcgctgatcacaatggaaacggaaaaccgtgatgcggtagtccgtaataatgcggaactggcaaaccagattaacccggacattgccggcggtgtttttctggatgccatctgggcgctgatgggcgggcagcgatgggatgccactcagtcgatactgacgcaggttgaattcggcggtgtccccggaactatcatcccgaaaggttcactggctgaaacgctggccggtgatcagtttgccacaacaaagccgttgattatcggtaaagacgggaaaataaccggcgatatgcgggcggttgaaaccggccctgttgagtgtccggccggtaaattaaacacggtggcaagttcggttctcggctgggaaacggtatccaacccgaccagtgcggtattggggcgtgttgccgaatctgatttacagtcccgccgccgccggaaactgacactggcaaaaaataccgtcagtgtcggtgaggcgattacctccgcgttatatgagctggaaggcgtccgttcgctggcataccgcgaaaattatactgataccccgatgagcctggacgggatcacgctggtgccgcacagcgtatacgtgtgtgttgagggtggggaaagcggggaaattgcccgtgctctgctgcgcaccaaaacaatcggggcggctttcaacggcagtgaggaggttgaggttccagagccggtcagcggacagatctataccgtaaaatttgaccgcgctaaagagattgtcctgttctgccgcgtgacagtgaaaaaaacatcactggatgcgcagacggttattccggcggcggttgagtcatgggcccggggcgaaaccgaaggggatggcgggctggttgtcggccgcgaagtttccccgtttgaaatatcggccggcattaatgcttctgagccgcgcctgtttgtcacacgggtggaactgtcaaccaacggcacggactggtcatccgatacttatccggtaaagctgactgaggttgccagaatcagccgcagtgcggtgcaggtggtatttgtatgatacagactattcagcagttaacatttcactctgatcttctgagggcgatcctgtggcagtacgaaggggcggataatctgaaagcgctggcccgttttaaatcggactggtttgaacgggcaaccgtcagtttctggcagaactggtaccgtgatgtgtttaatatcgatactgccggtgattttgggttgtcggtatggtcccgtatcctcgatgttccgctggggatcgatatcccgccgagtgaaaaagaaaaaatcggtatcggattcggcaggaagaaagccaatttccgggcaaatttccggcgtaatgccgattacaccctgtcgctgacaccggagcagaaacggctgattatccggatgcggtactttaatctgacccaaagcccgactgtcaccaatatcaatgaatttcttaagcggtttttctggaatgaggacagtaaagtctttgtgctggatccgctcgatatgacgtacatgtactacgtcttcaactttaatccggatgagcgtctgcgcgttctgctggaaaacttcgatctgatgccgcgcccgtccggggtgggtgtcaaataccgtattgtggcgaaaaaagccttcggccacggcgaacaccgtaaaaacttcctggaaagtaacttcggagaataatcccctatgacaaaaatatttaaaatcccctttgcaacacagggggatcgtactgttgtgcctgatgaagtacaggcagacggctcactgtcttatactcagggctacggttacgattatgaacgtgaccaggcgacggatccggccgccaaagatatcgaacgtgagaagatgaacggtatcttccatgatattaccggtgcggtcggggaaatacaggctttcggaatgccggtgtgggcggaagaaggtaagccctatgctatccgcagtatcgtgtatcacaataaaaaagcctggcagtcaaagattgaaaataacaagacagaaccggctgccggtaccgcatggacggaactgaaagcagatatgactgccggggatgtcggagcctacaccaaaggtgaggctgatcagaaatttcagccgctgggtaattatctgcctgccggttacagctactcaaaagctgaatctgacaccaattaccagccgaaaggtaattatgcacccgctggtaattacgccatgaaaggtgacagttacaccaaagctgagggggatggacgttatcaggcaaaggggaactatgcgcctgccggggattacgccgtaaaaggcgaaagttataccaaatcagaatctgataataaatatcacccgaaaggaagttatcaggcggcgggttacagttattcgaaagctgaatctgacaccaattttcagccgaaaggcaactacgccccggcgggaaactacgcggtaaaaggcgagagttacaccaaagctgagggggatcagcggtatcaaccaaagggaagctatcaggcggctggttatagctattcaaaagctgaatctgataataaatatcaaccgaaaggaagttatcaggcgtcgggttacagttattcaaaagccgaaagtgatggacgttatgagaaaaaaggagcagcgaaaggctggcgatgggttgggggcgccggaaatgccagcagctcgatatccatgtcagaagatgtcagaggtaagcaactctatttccagttgacaggatccggcgggattcactggaccacagtatgcatgccaccggttgacaatattggaactcagtttcaccagggcaataccggatatggtattgtatgcacacaaaatgcaggaaggacattgaagtcagtaggtggtcaattcatggagtggtcatctgtttatgtagcggactaaaagaaaaggcacgtggtataactacgtgccataaattgtattagctcagacttgatctgatagttttcactagcagcacacaatcaaatctgacagtctgctttgagcgatgagcggactttcatagtccctctcatcactgattaagtatccttcaaatcacggtgagttgaccaaggggaagtgtaaacacatctattttagttccacctatttttgacatttccgtgttttaagccttaagccagcactcttctgactataggtttcataactttattcctgcacattataaccatcaaaatataaataattagtcaaagaactactaagatggcgttgcaatgccttttaattgtgaagaatattcttcgaaaatccgatcgtatcgttcttcgtctttagcccgattacttttatgcataaaatcaggtaccggattccctgttgccctgtagttaaagatttggtcctgaactaaacgcgactgcttatctagcgcttttttgtcgtaagcgcgctcttttactacttgccttagcgcattctcaacaagtatgcgaagttcatctgcgcgggcaacagatttcttattatcactaacgtatcgataataaaattgataaatcggaagcaatattgctacaaatgcaacaaattgtagatatgttggattggtgaaaataaatattatcgcaagcataattatgttcagcgctaaaataacacgcaggaatgttgaagttttcttttttagacctgcatcccatcccatgttcttactttgacagagcattaccattaacggagcagaaacgctcatgggagcattaaggtaccagttgcggaggcgatgatcgccttcagtagctaagtgtttttgggcatactctagactttcagaaataggtatttttttaccagtaacgatatcattccattccatgttaaacaaactggtatcatactcctcctgaatacgcgctgcctttttcttacagttacttacatgctccattatgaagtggttaacaatgaaaaatactaccccatagatagtaagaagtgtttttatccaaggccccgtatgacctggataaaaactcattacaaagaaaattaatgaaagtattgatgggacaacaacccccgccaaaaaaactttcattagaatagctttgacatcagaatagatctgacgctgcccagcaagaagtttgagcatatgaggctcattttgcttttcatagaaatcgttcattatgcgtttcctactggaaaatctttacctaacactttctgccataactttccagatttttcgggatcagaaaattcaatcgatagagcctctttcgcattgttggcatcttcaagtgccatttcttgcacctttttctgctcttctgaacttaaatgatttatatcaccctggaattttttttgatcgccaacataaccgacgattgcagtagctaatacttgtaaagcatttgaaaattcgacatcgagatattctgacatggaatctttattaagttcgtcatagtggtttagcataatagtttcgagcaaatatgagccaattgcaggtacgccgcgcttacgcttccaatacttaactaaacgaattacgttcaataccttaccattatgcttttgattcactctagtcgcacggtctttatcaatacgcgggtcggtctgtttccagttaccgttgccgtctgggatcaggtaaaatgtgttcccatagctgtctggtgctgtgatgaaggctggaacaatatcaaaattccatgtataggatttaagattgagagtggctgcctctccttgacgtttactatcagcggcggagtattgaggtacagattttagcgaagaaacgaatttgttgacgattctgcgtgaatttacccactcaccggtttcgttcaaatagttttggaaacgggaatttgttcccggagttatatagaaggttttaccgctttgagtgtatgtgctgccttcagcatgcatgacaatcatcatatcgatgtcatcaagttcacgaatttttgttcttctggagaatgaaccaaaccacattttaggcgtactgcttaacagtgggaatttatcatctttatctggaaaactggtcagctgctcatcgactaaccagtcacggcttcttcttccgttgcgtgtatcatctgcgtctagattgacaaagttgttcatgaggctatcgaaagcagtactaacctgataaggcatgtgttttttccttgtattggtactatgtaaagtaaaggtaaaccatatgcagggaatgcgtacagcaaatcaaacctactacatgtggtgctttttacgtattttatacacaatatcttgtgattttcattaacgaagttttcatttctattgatgtaggacaaggtataaatgtgaaagcaggaatggtgcgggattagagcgattgtaaattttacatttttaataatgcattaaaaatcatactcaccgagctatgagcattgaccttctcctctctaattaatgtaatgcggacttaacaatgtctgcttctggcacaaagcggcctgtcagattaggtttagatctgtgccgtagctgtgtcagattaaatctgagctaatacacataaaccatttccggaatataatgcagtataaagggaaaatattcacaatatttcatcgtacagcgagctattatattgataataaacacattatttattatcttatattgtgaatattgccgttaactaattgatattcatataataagcaatgaatttaaaatccctcggccgcaaggctgtgcgggttcaagtcccgctctgggcaccatacagaaattcattgatttatcagtgagtcagagttaaaagagagcgacctttatggtcgctttttttgtgactgaaatcacggttcagaatactttcagaatataaatttcatatattgaatgaatattcattatttctgattacccaccaccggaacaacctgaatttttctgtcatatctggccgtctgagtgatagttttgtgacccgatattttttgtttatcctgcagcgttccatccagatctgatatccccttagctttcaaatcatgaaaagtaaaatcaaatgaaatgtcagggtgattctgaatagctatctttctggctgcctgccagcggctgttaaacccgtctctggtatatttcccccattctgttgatggacaacataaaagcaagatattccaggtttgtttggcaaggtttcagccatttttatgactttatgcaatctgtcagtccagcctttaatttgtttcttgcgggaaccccggaaacggaaaccatcttcgcggataaggggggatgtcgttttcattcagcagaccggcatcatttgctgtgcagaccatgccgataacggtagtgttgacggtgcggattggccggggaccgttattgtgctcaataacgcgtacaccgtggtgatatttttgtgacacagaaattccctttattgagattttctatggtgttattggtgtggttttgtgtcgtgttgccggtgttgcagaaggcgggaatacaacaatcagtcctgacattacgagcataaaaaagctccggaaggagcctgttttcaataaatgaatcagataggcttagtgacaacctgaccggactgttcggcttttttcttcgccagcaggaaacgctgaagcattgcattcttctgtgctttgatagcggcatagtcaatctcagtgtttttcttagttgtccgttcgtataacataacaagcctcttctatatgtgcgtccagatttctggcggaggcataacgtcttacaagtttatcgtatacacgacgtaactcttcgctgtatgcctggaaagttaatatccggatatcttcagtttcagctatccggagaatgatgtcaactaatgtactataaaggtaaagtgcctctgacgcggtaagatccggtgcgccgggcggcttttcaaacatggtgtcacattctttattattttcagcgtcaatattataaaaactgataacgctgatggtgagggtaattagttcatcaccaaataatttataaagaatattattgtcagactcatttttgcaaaaaactaaccggaaggttatccggcgggtatcatcaccagagaaaacgtaattaatatctgtgtatctgaatacatcaaatccctgtagttcatcatgtaaaatgtaatgcgaatgacgcggcatcttaaactcgtgttgtttgtgtcatgccggaaataatacattaatatttatgtaatcgtcaccccgggatgtgttttttttgttaaaaaatgatttttatggggatggaatacttaccttagttactggtttatattataattatttttaaatcaattggttgtttgatttttgtaataattttagtgatatggggcttgatttacatttactcttgataacaaatcccggacgaaacatgtaatttattaaatgaattttgcgtttggcttgttctgctacggatgaggaaggggctgtgatttatgcagaggaggatggttttgtggtgcagggaatctcggtttaattcatgcatgcgatagacatataaaataaaatcttaaaatagattatatattttatttattctgtggaaattaatgaataatcaggtgaacaaattttcaattttcatttattttaatgtacataattattgttttttattgttagttttaccaaaaatattatttgtaatgaggcaaaatgaaacgtaaattttgtcatcggtgtttcacttaaacacaaccccctacccacggcgatagtttgatgcttaaatgataaccaggaattttcagaccggtaatcaagagataaatcatgcaaaataaatacattatgaccattttgattagtacattactgtcaggctgctctgcgtttgataataatcacgggattaattggggaagtggtacttgcccggagccatccgctgatgaaattgcagcgtcagggcatcttaaaatcatggatggcaggacactgaaatgtcagttgcgcccttatgtcagtaacatggcctgtcagggcattacggacagcacgaacgcagacggcatggtttgtcaggatgcatcaggaaagggaatgttatttatctttgatgataacggtgtgctcaaaggacataagtcgctgcagaattgaaccggaatgaagcacagaaaatacagaggtatcagtcctctcatcaggtcaaatcctattccatatcgccaattctctttgttaatatcactataatactaaaaccactgatgaccgggacagacacggaaagcaccgttaagggatgaacatgaaaaaaagtttatttttgattttgggaattatgctgattggcggctgtcaggcaccggcaaataacagtgcaacagacgggatgtctgaaaaatggggaaactgccttatccgttattctgccggacaggcactgacaaccactgacagcaaaaaaacaattaccgataacgcgtataagaattgtaagaaagaaatgaatgaagcggtggatatgctggttgaggatatctcagcggatagcgcaaccaaagccgccgccagaaaaaaggcgtttgagatgatagaagaagggtacagacaagagattgttcctgagctctataatgctatcgatgaagtcagaaaattataacagcacaaaaattactgtgctgttatgaccccggatgtaatatccggcaccggaattctgcaggtgccggtgttttctgaaatgcttcaaggcaggtgattttctcagtcagattttttctttcatcacaggataataaattaacagtattatccgtgagcagagcggaatggtaataacgcaatgctgtttgtaaatcctcaccggaaggggcgcagctgcccggggtattcttattatccgtcagcatcataagatttgcatcggtataatttataatcatctgaggtgacggataacgaagcatattctcagaaaagaatttgatagcggatgtgtaatttttattatgcatggcatcaaatgccagatcgttaaactctgaaaacaacggattatccggcgtgatctttgcctgtctgaggctggaaattaccaattttgcatttgctgcatccggtggagagcgcagtacagccggaccggtatcagctgaagcagaaagggatacgctccacagaaataacaccgaaaataactgtttcattatgcaaaaatagccttttattgattacctattcttaagattaatcaattagtgatcttatgtaaatatctggtccgtaagtgaagtgtttttattatttttatgcgggatataccggaaaaagagaaatagcaaaataaaccgacgaaaatgaaaatatcatgtgtctgactttggtcagtcatgagtgcataaataatatataatatttgatggtatttatattgaaaaacggaataacaatacaaagccagaggtgtatgatggataattcatcaccggataatgttcagatccgggagtttgtggaacgcttaaaaacggtgacagggtcgcatttttttcattatctgaatgataagcaagttaaaaccacgtgtctgatgtgcgggcataatggcaggcaggttatagatgaaacaaactatacgacagcgcaggaccggctggataacaaacctccgcatacgttcgtcacattttattaccacactccggggattccggcagacagtataaaccattattattatcgtcttatctgtgataactgtggctttgtgactcagcacagcgccagatatgtcataaactggctggatgaagaagcactccgggaacagcacctgacggatgctgaatgggtaaatatgccggaaccggttactgcagaaccggacgaagaataactgcgcatataataccgggtgataacgcccggttttttcttttctgtattcctttgactgcgtttttaatcaccatcttcttgctttgccatcaaaatattgtgatttttaagaactttactttgccttagcggcaaggttcaatgtcatacgcagaattacctgcaggaaaaggtgaacggaggatatatggaagatggtttaatggttattgcgggactggcgcttgttgccgcagttgcaggtctggtaaagccttctcttgtggggatgaagagtcgtgttggcgcggtattgggttatcttattatttttattatttttttagtacctgcgttaatactgatgccggactgacagaataatatctgaattgttcagacattgtggagagagctttattaaatgtaaatatggtaaagttatttcttatcacattgacctttcccttagggcaacctttatgattaattccatcaaccaaatacgaaaaaggaattaatcatgaaaaaaacacttattctcactgctctgttatccggcgttatgacattcggtgccgtggcaaatccggtattattaagtggtgatatgcatgctgttaccactccggtgcagaaagagctgggtgattctatgatgcgtatgcatgatgatatggcaaaaacattatctgagcaaaatgcggatattgcatttgctgaaggtatgattgcacatcataaaggagctgttgaaatggctcaagttgaactgaaatatggttcagatccggaaatgcgtaagttagctcaggacattattgatgctcagggaccggaaataaagcagatgcaggattggcttaaaaataataagccagcaaagaaataaatgtttaataataattacggcatctctttccagaggtgccgtttcttattgtttcatttgattttatttattaaattccattcagatcgcaaaaaaaatacttcagcacgtaaaaaacacaactctggtagacaatccccttttaaagacatattaaatatcccgtcagttgataaaggttaactcaatatttgactgaattttcaatattattatcaagttaaattattttaagaaaaggatattctatgccggatccggaaattactgcattttttacaaaatatcaggagtcaaaaaaaattcctgagttttcgcgtttgcaatggctgtccgatgcggcaggacgcgcgaaacaactgtcactgacgacacatccgtttgcttttacacatccctgtgcccgcaggaatcgttatggcaaagcaagtgtggtgctggcggaggttaaaaagaaaaatgacggctttctgcggtccggcaatgtggttgtccctccggatgctgagggtaatgccgctgcactggaaatatatacgtttttgatgctgaaaatgcaggatggaaaaacattactgacacatttgtgtgaggaaagtgaaacggcaaaagaaattctgggcaatgaaaattaccgggagttgcggaccggttttttacagatattctccggagagggcgtaccggcaacaaattcaaagataaaacaggttttttcccccgtgccgggtaaagaatgtaatgcgggttatcatttactgtcagttctgacgccgtcggggttattatttgagttataccgccggattagtaaattcggtatatttccgggtcatcttgttgttattcatattggcgggtctaaaccacaaaatatttctgcacttaatatgcagaataaagggaaagcctgtttattattatccatcccgccgggagccgtcactgccggaggtcattacggtgtccattaattatctgctgctgaaaaatattcttatccggaatgccaatgcgttatccggtgcactgatagctggttttccggcagtcactgcctggctgggatttattcatgcacttgagcgaaaagtgaggaaacaagggtttccgtccgtcaggtttaattataccggtattatttgtcaccattgccatttacaactgtataccgagcccggcggggtaatgtattccgtattaaacaggcggaaaccaccggataaaaaaggcagaaacccatcactggttgaggatgtatattgtcatctcaatgtttcactgcttatttgcggcaggaatatacaggataaaaataaggagttcctctctgtggtatctgaagcaataaaaatgctgaaaattgctggtggcgatattacagattcaggtaaacaggagaccggtccttttcctgacagtaaaacgcgatggtgtgaattgcggcaatgtattgctcccggatatgtattactggagcggcgggatgtcatggtcaatgcaatgaacaacggaatggatgcgatggcggcattactgaaatataccgctgctcccggttcggtgctgatcccggtcgtcaccggatatcaggggctttccccgccgggaatagtgagaaatgccagaacagaaggcataccacaccgttttgcggaaagtgttattaccttaggggaattccggccggtggataaactgcggcatccttcgggtatgttgtggagttatcactatttacctgacgagaacctttatctgtgtcagcagggaaaacacgattagcggaaaagagaaaatgaccggactcaggaatataccgtctgttttatcattttcaaaaaaactgatcccctctgacggtgttttttccggaacatcacagcatccggattcaccggttacttctctgacaatacagacgagaactgtccgggggacatttgctttccgccggaaaaacgggggagaaaatgaaaaaatatccggacaaaaaattcatgatcctaatattcagtctgtggattactgcatgctggaagctgaacagaatgtaattatatttagcttctcactgaaaattaccggtgggctgaaatatccggctgcctgtaataatgaaatcttccgtcagcgctatcaggcgataataacggattacctggaaagagagcattgccgggagcctgcgcggcggtatgcacataatattgcctgcggacgttttttgtggcggaacctggttggcgcagagcatattgaggtggttgtggataatctcagtgcggagaaaaaacagcagtgggtatttgatgcacgaaaatacagccttcgtcattttgagcagacagataatacagccggcgacctggggagacatattgccgcagcactgagttgtgatgatggtgcattattactggctgtttcagccagagtgataaccggaaaagggcaggaaatttatcccagttgtgaatttgtgatgaataaaagaaagagggggaacagccggatactctgccatattgacggtactgcgggaatgcattcacaaaaaatcggcaatgctttacgttcagtggatacctggtatccggccttttcagatttaacggcaggggcgggcgttatcgcggctgatccctatggcgcggtcacgcatctgggagcggtattccgtccgccgggttcagggcaggatttttatacactttttgaaaaatgggtcagcggaaaaaaactcgctgaacatgaagaaaattatgtcgtgacagtgttaattcgcggcggtgttttcggaggcggggggtaaacggatgcaattttatcagacaatcacgattttaccggatgtactgatatcggcagtctttctccggcagcaaatctggcggcaacttcatctgatactggcagagaataaaaccggcgaaaacagcagcgctgttgctgttgcatttccggattactgccgcaagccacagacaccggggaaccgcctgcggttgctggccggggattatccttctctggcggaattagggctctctgtacggttagctgctttttacccgtatatccggttaagcgggatcttacctgtaccggaaaaaacgttaccggtcagttacatccgtgaacatgcaaaagggttacgccgttctcagactgcgggtgccgggcggttatttatcccggaaacgctgccgtttatctggacgaaatcgttgtcaggagacagacatcaccggccatttcctttttttatccggaaactggatgcaaaatctgccgcagaagggcggtttacctgttacggactgagtcataagagaactgaaaacgggagggtggcgacagtgcctcacttttgaggtgatttactgccataacggcagctcagaaataattatgataaaaaaataatgcactgccggaaatgcccccgcacatatgctggcaggggcggcagctgactattgcggaggaaaatcggcaggtgcgggagtagtgctgtgtgaaccgggatcaacagcaaaatgtatgtcggaggaaaaccgttttttcggtgccagctcccataccacccgcaccggaaactcaccgtattctgtcggtgtgccgtgcagaataccggttctgtcgttaaaactcaggccgatattgcgctggaaataaataccgagaatggttaccgcccggccatcgtccagcgttgcggttaccggtgaactaaacgattcggataacctggcgcggccgattttgacacggattgccggttgtccggaaggctgagtcattgttgccggcgccttactgtcaggtgagagatctggtgtaaccgctgtttttccggcggactccgggactggagccggtgctgcctgtggcggaatatcctctctcccggcagcaaacagtgccgtcagtccccaaggcttctgttctgcagattctgcctgtaacggagccggggttgtatctgcactgaatgaccagctgttatcccgcagggtatcactggttgatccggcagacgtttccggcgtctgcgggtcggtaataatagcattgccggacaccgttgcagacaggggttgtgctgattgagggagttcaccgataaccggggtatccgtatcatcggtatccaggtcgtcaaacagccagttgccgcctttcagcggatcactgagggctgcgggttccggaaacagcgacttatcactgaataccgaggcggttaacacagcattatctgcggctgttggcgcagcgggggctgccgcaggttcgttgtatacaaaggtgaattctgcggattcgtcatcagcaggtgcgataacaggctccgcagctacaggctccgcaactgcaggtgctgtggttttatcagcagcagccggagacaacggacttattgttaccggttcaggatataccgggactgactctgcgatgctgttttcagctggtggtattacaggatcggccactacaggcccggcagccacaggttcattgtatataaaggtgaagtcggaaaatttatcgtcagccgccgggacaacaggctctgctacagccggagctggttccgcaacaaccggatccgtgtgtacagacacgggtgctgtgattttatcatcagcagccggcgacaacgggtttattgctgccggttcagcatataccggggctggctctgcgttaccgttgtcagccgcctgtattacaggatcggccaccacaggtccggcaactgcaggctcgttgtatacaaacgtgaattcggtggcattgctgtcaggggaagagctcagcggttcagccactgcgggttcattaaagacaaaagtgaagtcaggctccgggtcacccggatgaaacactgccggttcagggactgacggggcatccggcagaaaggcatgctgaccaaatattgcggataaacggtcaatttccgcaaaagcctgttcttccgctgaggcggattgcaccgcagcggtggtgttatccgtgataaccggctcttccggtgcaggaggaacaataaggggttccggctcagcagcaggcgggaatacggtatgagccgtatccggcagagagacaggaatatccgccggcgcagaaagggtactgtcagcgagcggactgcccatcatcatctgcgggttattgcgttcatgttcagctctggccgccgccagtgcagcggatacttcgcggtatttcacgtcaatcaggctgctgaggacgagcagggcggcgcggatggtttcatcatcacacaaggccgtgatttctgcgctgcggacagggtgtccggcctgttcagccagcatggcacagattgtccgcttctgatcggaggttatttccattaacgtttccctctgtgactcactgattgtcacggtttttagaacggaactgcggaggcttccgctccggcgccggttacaggccgggagtgttccctgaacagcggaatgccgggaaattgttcagtaatgatactgcgaaatccggctgctgaaatatgggggaagtctgattgacgcagaatgacgcataataaaataatgacaatcttattaatccgaaattatcattattttataaataaaaagagttacccggattatgtccggcggagagttgcggaggtcagaaccggcgccagattttcaccggtgcaccagtacggttgctgtggtgtgatacagactccgccgacccggcgcacatctgtcgtgcagttaagccggtttttttcaccccgcagaacctgtctgccggtttctgtcagtgagataaccggtaacgcctgagtaccggcctttaacaacggtgtgcttcctgtgatcaggggttgcatctgtgcgaagaacatccggtcgccgagaaacggcagcggctctttttcagaaagcaggatgcgaaacagcgccggtaaagtcatcggcccctgttcactgaggatctgcagagcgagttgttctgtcagggatagcccggtgtgctgatccggtaattcccgcagcatgcggctcagtgcgccgttaaggtgaggcagttccggatgcggggtgcggacaaatgcggccagcgcaagcggagacggatcccggtaacagcgccaggcctcagtggcggtgctgatagcggcctgtgttaccgggcggcgttgctgccacagccagggcaggatctccggtgacaactgaccaagcccggtgaatttacggacacccggcagacgggacagagacaccagcgtcattcccggcggcggcgtacggagagaggataagacggcgatcaggaaaagctggtcgtaaggatctgcctcgcaccacagcacggtgccgctgcgctgcggcaggctgcgcagaatggcatcatcggcatccgcctgacggttcagttcatcatccggcacgccgaaggtatcgcggataaacgccagccgttcgcggcggaactgctcaggggaagaaagtgtcaccggacccatgcagtacggatctgtcagcgggtggaattgcccccggaatccggcaatgcgcagtgcatgggcgatatcatgcccgcagcgcagatgcagggagcggggctcatccccggcgtcaaatcccggatgctgtgcggcaaaacggatggcatcggtatgtgctttcagggcgggtcagctgtcaaaccccgtttcggtggcgattaaccactgaacagcggcaagattcagttcagcgcggggattcatctgatgcaggcgcagcagagatgcgggctcttcaccggctttgatacggcgcaggcgctgcttggcggactgacgcagacggctgagggaaatgattccgttatcgggaaaaacagacatacgatctccttatttgcccggatccgctctgacaggcaaggggggtcgtaaacagattgttcagtcagtctctcaggcaaaacggccttttccgcggatgggggcacagagcaggcccgcagctaatatacgcgctgaaacggcttatgcaatgttttttcatgatattaaacaaagattcaggcatcgttgattgtttctgaaatgaaggtcgctaagataggcattccacttaaggagaagcggcagtgcgggtaaatctaccggaggagacggcggaatgtcgtatcgcgcattttttcagcctgtaaaaaccctgacacaggcgcagcgtcaggaaatggcctcactctattttatgtattataccggcagtgacggcacacagtttttatcagatctcgatcataaacaggaagttctgtttctgatgtcaggggatgaaatggccgggttcagtaccctgcagttttatccgttccgcggacaccggattgtctattccggcgacacaattgtgcatcccgcccactggaagcaacagacgctgcacggtgcctggctgcggcgtattgcgcttttgcgcagtgaatatcccggcgaacgggtgttctggttcctgctggtgaagggcgtgcgcacttaccggtatatgagcacgctggcgcagaccttttatccgcactggaacggtaatgtcaaagaaccggaactggcacggctggcggcggaactggcaaaagataaattcggcttactctataacccggcccgcggtgtggtggaatgcccgtcggcgtttggctatctgaaccgcacaatggcaacggtcactgacgcgcagcgcagcaaaccggatgttgcgtttttcctgcacaaaaacccgcactatgtctgcggccatgaactggtctgcctgtgtgaagtctctcctgataatgtggctaaacgttatcagtcactgtttgaagaacccgatgttgagttctgctatggataatgcctggcagcatttccgtgccgggatgccgtctgttctgccgcagggctctctgcgcgaaagacagttccgctggttatccgcctgtctggccgcaaatgcggcgtgtgaatacgggcagcggtatcatttttccgctgtaacatctgtggcggactatcagcagaacgtccctctgacaacctattctgacctcagctcctttatcacccgcatgacggccggggaagaaaacctgttgtgcagtgcgccggtcacggcatttgagctgaccggcggcagtcacagcggcggcaaactgctgccttatacttctgccgggttaaccgatttccgtcttgctgtcaccggctggctgcgggatgtgacccgccgttttgatctgacctccggccatgtttactgggcgctcagcccggcagtgacacggatgacaaaaacgccctgcggtattccggtcggcggtggagatgcgctttatctgggcgcggattacctggcggcattcagtgaattatcggctgtgccgctgacactggcgcaggttgaggatgcggcagactggcagttactgactctgatttatctgctgcagtgcccggatttacgtctgatctccgtctggagcccggtatttttatttccgctgctcacggctcttgatatccggcaggctgagatttctgcactgctgcgcgacggcggggaaattgccgggcattctctgagtgctgacccggcggcgctggtacgttaccggcgttatctgcaggagcagaataccgcgctgttatggccgcagctggcgctgatcagctgctgggatcaggctgcgtccgcctcaccggcacaggcgctgatgacgcgctttcccggcgtgacacttcagggcaaagggctgctctccaccgaagcggtgatcaccgttccgtctgacagcggtgacccgcagctgagtgcagacagtaatttctatgaattccgccgggataacgggcagatatatttggcggatgaattacagcccggtgaaacatacagtgtgattgtcaccaccaacagcgggctgtaccgctatcagaccgatgatctggttctgtgtaccggccacacgccggaagggctgccgcagctgcgtttttgcgggcgagagggtatatgcagtgatttggtcggggaaaaactgaccgagccgttcgtttgtaccggtttaccgtcatcgcaggattttgctgtactggcagcggatgagcagcgctatgtgctgctgctcagcgatacctgcactgaatcacgggcacaggcatactgtgaggaaactgagcgctatctgtgcaccaatccgcagtatcactacgcccgccgtatcggacagcttaaaccgctgacattcctccgcctgcatcagccggcggagcactattttcaccggcagcttcaacggggaaagcggctgggggagattaaaatcccggcattgctgacctcgtctgactggcgtgccatgtttgagatcagggagtttctgtgatgacacagactgtttatacgccgcagcggccgctggatctggtgctgctttcaccgaaagggccgctgtaccgcaaacggggcgggattttcaaacgctcgctgcgttatcagccgctgacgctgaccaccctttccgcactggtaccgaaatccctgccggttaatatccgcctgattgatgaaagtattgaggaactgccggaggatttcacggcagatctggtcgcaatgacggtgatcacagggaatgcgccacgtgcctatgaactggcggcgcagatgcgggcgaaaaatatccccgtcgtgctcggcgggccgcatgtcacactgctgccgcaggaggcgctgcagcacgctgatacggtctgcaccggctattccgagcagagctggccgcagcttatccgtgattttatggcgggtaatatgcagcgcgagtaccgtcagggcgcggatttcacgcttgatatcccggatttgccgtttccggaacgcgaacggtttgatgcaaaacattttctcacccagggggtttttgaagcgacacgctcctgtgctcacaactgtgagttctgtgttgcaccgagtgcctgggggcgtaagcagtttcagcatccggttgagtgggtggttgaggatatccgccgttatgtggagcgcaccggcaaacggaaagtgatttttgtcgacctgaacctggtgtcggatatcggttatgccaaacggctgtttaccgcactgatcccgctgaatatccgctggtttggtttatccaccgtgctgatagctcataaccacgaactgatggagttgatggcccgcagcggctgcaaagggctgctgctggggctggaaaccgtcagtgacggcagcctgaaagatgccgggaagaaatttaacggttcggtggattataaagaactgataggcgacctgcaccggctgggaattgcgattcagggctgttttgtgtttggtctggatcacgacaccactgatgtgtttgaccgcacagtggatctggctatcgacgccgggattgatttaccgcgtttctcagtgctgacaccgttcccgggcacgccgctgtttaagcgccttgaggaagagcaacggattttaactacggactggtcgctgtatgacgcacagcatgtggtattccgcccggcgctgatgagtgcgcgtgagctggaactgggacacgaacgtgcctggaaaaaagtgtaccgttacagcagcatcgcgaagcggctgtggcaggcccgtaactttaaaccgctggcactgacggcaaacctgggttaccgcttctatgcgcatcacctgcatcagtattacacctgtgactggccggttgaacaccgtccggcgaagtcgggcagccactgatgcggctgacatttattcatccggcgatcggccaccggcgcggcgaaacctatctgcgatcctggcagatggagcctctgccggtcgcggcactgaaaggactgacaccggcggatattgaaacacggttttacgacgatcgcctggaactgatcccgtttgatgaaccggcagatctgatctctatttcagtcgaaacctacaccgcaaagcgggcctatcagatagccagtgagtaccggaagcgcggtgtgccggtgctgatgggcgggtttcacgctacgctgatgccggaagaagtgaaacgctttgcggatgtcattatcaccggagaggcggaatcagtctgggaaaccatgattgatgatttacgccacggcacactgcagcgggaatatcacggaacacagaccgatctgcgcagtatccgtgttgatcgcagcctgtttgcgggaaaacgttatctgccgatagggctggtggaaaccgggcgcggctgccgttttcactgtgaattctgcgcggtgcagtcgttctatcagcagcgttaccggcggcgcgatccggatcatgtgctgcgggaactggcgggtctcaaaggcacaaaaaatctgtttttctttgtggatgataatttcgcgggcagtctgcgggaaagccgcgagtttctgcctgcactggcgaacgccgggatccgctgggtgacccagatgagcattgatgccgcgcatgatgaggcgtttgtccgcgcgctgtcacaggcaggttgccggggcgtgctgattggctttgaatccctgaatgaagccaatctgcggcagatgaaaaaaggctttaacaccatgaaaggcggctacagtcaggcgctggctaacctgcgccgccatcatatcgccgtttacggcacatttgtgttcggctatgaccatgataccccggactcattcggcgaggcggtggcttacgcccgcgaacagagtatgtatatcgcggcattcaaccatatgacgccgtttccgggaacgccgctttatgcgcggctggcgcaggaaaaccgcctgcgctttgagcactggtggctcgatgatcactaccgttacaacgaactgccgttcagtccggcacagctgtctccggaggcagtaacgcaggggtgcctctcagcaaggaaggcattttacagttcacgctcgattcttcagcgcagctggcgtaaccggggcgatttctttatgtttcgcaactatttcccgattaactggctgcatcaccgtgaaatcagctgccgcaacggctatccgctcggtgatgagaattggcagggtaaattagcagaggttaaatgatagaggttattgacgcgacaacggagcatatcgcggatttactcaggctccttgaagagaatgccatgcagggggactgggagctggtgatgacccggcggcccggttatttttccccgcgggatgatttcggtgaagtctatccggcactggcaagagacggtgataccctggtcggcatgtgtcagctgagcatacagagcggctgggttaacggcgaagaagcgcggatgggttatctcggcagtctgcgtattgtgccgaaataccgtaatcacctgaaagtgttacaggccggattttcttatctgcgccagctgccgacaccggatcactgttataccagcattgcggagaataatttactggcccggcgcctgctggagcgtggcgtggaaggtctgccgctctaccgttttctgagcagcatgagcacgctggcgatcagcaaaagcagaggcaaagacagaggactgtggaaagtggtgccgccggaggattacaccgatgtcatccgtttctttgcacaggaatccgcttcccgtcagctggcaccggcgctgaacctgaaagcgatgcagcaaaccggtattacggtgctcggcagttatcagaacggacagctggttgcctgcggtatgctctgggatcagcgtgctttcaaacaggttattgtggccggttactccggcagaatgaagatgctgcgcccgctttacaacgcttttgccggaatgacccggcggccgcagatgccggcggcgggtgaggtggttccgcagagtttcctgtcattcctggcctgtaccgatgataccaaactgccggatctgattgaggaggcgctgttgcactgtaccaccccggttatgactgtcgggctgccgtccgggcatatctgcaccaatgatgtgattaaacgtaccggggcgtccgtttaccgcacccggatttacggcgttgatctgacggccgcaccacagtgggacggccgcattgtctggccggagatagcgctgctgtgaatatcgtgctgatctacccgaacatgggggattaccgcacgaaagatgctatgacgccattggcgataggcatcctggctgccttgtcgccggggcaccgggtcacattttatgatgaccggctggataacatcccggaatcactgcctgatgcggatctgatcgccatttcggtggaaaccttcacggcacagcgcagttatcagctggctgaccggttccgccgtcagggtaaaaccgtggtgatgggcggctgccacgtcacctttatgccggatgaagcattgcagcatgcggacagtgtgctgctcggtgatgcggaaggggcgtgggaacagatgctggcggattgtgaacagaatgcactgaaaccccgttaccggggcgcgcatgaccgcccgcttgccggttaccgtcttgaccggaccatttttgagggtaaacgctacgcgccggtatcgctggtgcagttttcgcgcggctgccggtttgcctgtgatttttgctctatccatgcattttatccggaaggtgtgcgcacccggccggttgatgagatgcgggatgagattttatctctgcctgcaaagcgttttctgatttttgtggatgacaatctctttgccggtaagcgggcgctgaatgaactgctgacgatgctcacaccactgaaacgccgctggggatgccagatcagtgtcgatatcgcccgtaatgaggagatgctggataaactggccgccgccggctgctgctttgtgctgatcggctttgaaagcctgaatgaaaccacgctgaggcggatgggaaaatcccgcagccatacggcggaggattatgccgctgtactggcggcgctgtaccggcgtggtatctgtgtctacggcacctttattttcggctatgacgaagacacgccggagaccatccgcagcacactggcgtttgcagagagtaacaaactggcgattgccaattttaacctgctgatcccgacacccggtacggcgctgtatgcccggctggaggcggaagggcggctggtttacccggcgtggtggcttgatccggatttccgctacggcgaacctgttttccggccgggcggaatgagcatcgcagaattggctgccggatgtttttatgcccgtacccgcttttaccgttatgcatctgttatccggcgtctgtgtcgttccggcagccggagcagttggcgcacgctgctggtcgcctggctttacaatattgcctcgcaccgggacatcgcccgtaagcagggaaaacgccttggagaaaaagggtgaaactgatactgattaaaccgaatatcggccgtcaggagcacagcctgtatgtggatgaggggcggatggagccgctgatgctcggtgttcttgccggtctgacgccgccggatgtggaagtggtgctgtatgacgaccggatggaagccattccttatgatgaaccggcggatctggtcgctattacggtcgaaacgtttaccgcccgccgcgcttatgagattgcggcggaatacagggctcgtgatgtgcgggtggtgatgggtgggatccacgcaacactgctgccggaggaagtggcgcagcattgtgacagtatttttaccggtgacgcggaaacccgctggacagagatgatccgtgatgcggagaaaggccgcctgaagccgcgctatgatgcgcccgccggggtgggtcaggtcgatcataatctgtgcggctgcctgccgcgccgggatatcttccggggaaaaggctatctgccgatcagcctgatgcagtttacccgcggctgtcgcttcgcctgccgtttctgtgcggtcagccgttatttcgggcggcagcactatatccgccggatcgatgaagtggtgcgggagatagaaacacagaaaccgaaatttatcttttttgtcgatgacaatatcgcgtccgaccaccgcgagctgagtgagctgtgcagtgcgctgatcccgctgaatgtgcactggataagccaggcaagtctggatatgacccgtaaccgccgtctgatgtcgctgttacagcagagcggctgctggggtaatgtgatgggatttgaatccatcaacccggacagtctgcgtgatgcacgaaaatcgccgaacatgcggacattttcacagtatcgtgaggaaatttcggtattacgggacttcgggttgcagacctgggcggcgtttaccctggggtatgaccacgatacggctgaaaccgtggaagataccgtggcattcgccctgaaaaaccgctttgcttttgctgcctataacattctgatgccgtacccgaacacaccgctgtatcagcagctggcgcaggaaaaccgcctgctgtttgacggaaaatggtggctgcatccggaataccgttttaatcaggccgcctttcagcctgcaaatatgagccctgaaacgctgactgaactgtgccacgccgcgcgcagccgttttaacagtgtaccgtcgattatccgccgtttttctgatttgcgtctgacgctgcaatccttatcacgcatggccactttctggcgttataccctgttattccgcaaagaggtgcataaaaaacaccggatgcgttttggtttaaaataagggggatgaatgaataccgatccggattctttttcccgccgggtgatcagttatctgctgtggagtattccggtcagtgtggtgtttttcacggtttacccgctgatgaatgcgtatactgccgggcgcgacagcctgtatgccctgtggtttccggctgaactgaatatcccgtttgtacccggttttatctgggtgtactgctcgttttacctgattattctgatgccggttttgtttctgccgcgccgggagcaccggcagctggcactcacctttatggtgatgacattactgggcggcgtgatcttttttctgtttccggcacagctcggctttgtacggcaggtgccggaatctccgctgtaccggacgatgtacacgacactgtttgcactggatcatccgcataatctggtgccgtcgctgcatgtggcctggtcgtgtgcggcggtgctggccattatccgccataccggacgcgggctgacactgttgtttctgttgtggctggtgctgattgtactgtctgtgctgctggttcatcagcaccatgtggcggatgtggtcaccggcctgctattggcggtaacggtttcatatatgatgaggaaataatgatgaaaaggataattatcagtgcgttaatgatattcagtttttcggtgtatgcacaacccggagaagaggacggcgctattcatgatgaactgcggcaagtgatcggcaccgtggaaaacgccatcaacagcggggattatgacaaaatgctgccggtgatgagtgaaaatctgcgtgccacgcccatcacccaggagtttatctccggcaaagcggcaataaaaccgtattttgaatcctggttcgggccggacaaattcctgaaaaaactgaatatcagttttaatgctgatgtggtgacggagttatccccggataaaacctggggtgtcgcctacggtaaagggatggaaaaatatcagctgagtgatggccggacctacgattttccgacccgctggacagcgacggttgcgcttgaagacggcgcctggaaaatccgcaccattcatatcggtaccgatttcacggataacccgctgctgaatgaaacccgcaatgccttacagggcatgatgtacggagcgggcggtctggtgattggtctgctggccggtattgtgctgttccgccgtaaaagtgcggtaaaaccggtggcagaaaccgaaaagaaataataattcaataaattataaggttatgtgagtcgtcgggtaacgggcaggcgaacgaaaagcatgcgcgtcatggatgacgcgcctgagcgtacagggatgtatttaccgcgacttttcgttttgcccgttatcagacgttgcacggactgacagaaatcaccgtctcttttatttttccggcggaaacagaaaatcaagatccgcctctgcgcccatctgcggtgcgggccgcacaccatagcgccacatagtgaaatagacacgccagaaggtcggacgcggctggtcatccaccagcgacggcagttcataccacggtgcctgcgggtgctggtggtgcgcgagatggcagtgataattcagcgccagccagcgggagaccggcagtactttcaggttccacgcgccgttcatcacatcgcggcggctccaggcgtgatccgcatattgcagggccgaccagtgcagcgcaaaagcccacaggcagagcagataaccggccgcacttaaatccagcgcccaaaacagcagcgcctgccagagaaatgcaccgagcagttcactccagatggtcagcggcggcagttttgccagttccggcacctgtgacccgaaccccagcgccggggcgattttggtgacaaacacccgtgaacggtacacacccggcgcaataaaccagagcagattaccgagcagtacgcaaaaatagtacaacccgagcagattgccgccgtacatccagatattgcgcagccagcgcggctggtctggcaggtaataatcatacagctctttatctgtccggttatttttatggtgattcagatgcgcacggcgctgcagggtaaaagaagtcggaaacgcccatgcggcaataatcccgatggtgcggttaccggcggcagtgcgggcggccacaccatgtactgcttcatgcaaaatagcgaacggcatgttattaatcagcataaaaccgatcagggcaggcagcgcataataccaggcgagatggctcactccccataaacaggccgctgccgcagtcatcgaaaaaaccagcagaatactgttgagtaaaagacgcatcagtctgttttccttgtgttattcgtcactatcgccgggttgaaaagcccggttttttcatggcgtaaccggcgggcgtacagccggaagccgagattggccgccaggcggataaaacggctgcccggacggtgtaatacccggcgcagaatggccggcagacggtatgtttcccgccaggcttcgtgcagtaaggattgcagggtttccggtgacatattttgcggctgaaaaaccacatgttcgttgtcatacaggctcaggtcctgtgtgattaagcggccgttttccgccatccgctgccacaaccgtgtacccggcagcggagtgaggacagaaaaacgcaccagatccagcccgagagacgggatctgccgtatcgtatcgcggatgctctccggggtatcttcatcaaacccgagcacaaaacagccgagggcggcaatccggttatcgcgcagccgccggatctgacggcggtattcgctgacctggttacaattcttgccggtggccgtcatggtctgctgactgaggttttccagcccgataagcagcccttcgcagccgctgtcacacatcgcccggaatacctcgtcgtcatccgtcacattgagtgtcgccagtcccgaccagcggattttcagcgggattagtgcccggaacagttccaggctgtactgccggtcagcgtacagattagggtcgaggaatatccagcgctgtctgccgctctgttttatctcgtcaatcacctctgccaccggacgtgccgtgcctttgcgtccccactgatgctgcactgaacagaattcacaggcaagcggacaaccccggtcggcaataatagtggcgatattcatgtaggcgcgggacggcagcagatcacggcgcggcaccggcatcggcagaaagccgcgctcagggcggtgctgataacgctgctgcggatgtccgtcagccatatcctgtaaaaattgcggccagatgagttcaccggcaccgatgaggacggtatcggcatgctgcgcggcttcatccggctgcaatgtgacgtgtgcgccgcccattgcggttcttgccccgcgttcgcgccagtagcggcacagtgcataggcgcggggggaagaggaggcggtggcggtgatcaccaccaggtcaaaatccccggcagtgaccggcggggaaacgccttcatcacaaagggtcagttcggcattcagatgcgggggaaccagggcggcgagggtgataagggtcagcggagcatagctgatcgccacggaaaacgcgcttttccggtagcggtaagtcctgtcaaacggcaaaatcagtaatattctcaccggtgcttcctgctccgcagctgacataaggacttttacaatggcacagtacgtccgggaacgcactgtgccggatcaaagatcaggccgcaaccacttcaagcacagagatatagcattcagtcgggataaggcggtttattttcagccctgcttcagccagcagagcctcaaactccggaatagtccgctcgccgccgccgggcagaatcgccatacagagaatacccataccgtaatgcgccgccggattggtttccggatgcacaatggattcgatgatcagcagtttactgtccggtttcatggcgttgcggcagtttttcagtacggcgagggcgttggcatcatcctgattaaaaatgacttttttcagcagatacatatccgcctgcggcacggatttaaagaaatccccgccgtccagcgaccagcgggaatcgtcacccaactgagacagatatttgtctgataccacatgcgggctgtcgaacagggtggcggtcagtgtcgggtcaccgcgtaaaatccgcagcagcagtgagccttcgccgccgccgatatcagcaatatggcacgatgacgggaagtcataagcccgggtgacaaaatagttttccatctccgacagggcggacatcccggacggaaaattatagctgtcgttgcggttgggttttgtggcctgatattcgtagaaggttttaccgaacagctttttaaagttcagctcaccgcgaacggattcattaagctgaccaatggttgaccagtaagtattgtcggtcagtgtcagaaccgcatcccgctgtgagcaggggtgatcgcggcggagaaactccgcatcaggagagagccggtaagcatcatcatctgtaccggtgaaaataccgttcagtgccagcatccgcagaatgcggcgcaggttatccggatccgagccggtgcgttctgccagtgcggtgactgagagcgggccgtcagccagatggtcggcaatattcagctctgcagcaacccgcagacaaccgggtagcgccagcccgagagtgacattcaggatacggatgacggattgctcttccgccggactcatcaaatccggttcagtataagacatagcggtaactcctttcagacatgaataacagggctggtctgagtgcctgatgcggcatacagcactctctatgttaaataaaactaaacaatagagggaggatagctcagcagcagaaaattaccgtatcgaaatatgaagtattattaattaatgataagtgaatcaaatattcattgatgaataagcctgtttcggctgatcttcaggccgcgcatcatacacagccaggcgcaggcggaaacaccaatcagcagcagccacagggtatttggcgggaaataggtcagcacaccgccggtcatcagcgggttaaaggcaccgccgagccagccgagggattgagcggaaaagtagctggatttcatgccgtcaggcgcaatgttgtcgatcagcatatattcacccggcgcataaatcagttcaccgagggtaaaaacaaaggcggctattccccagaacacaaggttgctgcctgacatcataaacccggccagtccggccataaaaaagagcgtgccgagtgtcatcagtttttgcagattgtctgtgctgatccggcggccgaccatatattgcagtgaaaccaccaccgcggcattgaccggcagcaccacaccaatcactttttctgccagtgtggtatctgccaccgtcaggacatactgagaaatacaggcggaaaacgaaccgaacaccagcgatcccagaaaggcggataatgtgaaccagagcagggctttatcatgcagcatgacagacggctgccaggcggtgctgttgctgccggaggcagaaggcggcacgctgcggacaaaacgctgaataaaaaatatcgggaatgaggcggtacaggccgcaagccagaacggcagatccgcgctgtacatcagcaggccggtgccaatcggcggcccgacggtccagcccatattgacgaaggtgtagttcagggaaaagactttggttttacgcgcaggtggcagtgtatcggcgaaataggctttcagcaccgtggcaaaaacggagtaggcgcagttaatcagtgaaaagaagacaacgaccagtgcgatattgtgagtcagcggaatagcgataaatccggcgatataaaccagaattgccatcagcatgtagcgttttttatcaaatttatccgcaatgatgccgaagccaaggctgaataatacgccggttgtcagtgcgaccgtcagtgccaccccgacctgatccaccgccatgccatactgacgactgagataaatcgccataaacgggatagtggcaccccgtccgatagtaattaagaatgaggaagcgagcagagcaatggtggaacgggtggcggcttgcatggtgacattctcagtatttttattttatttttgatattcacgtaatcaatatcatgcaaatcaggcgctgtacagcgccttccggttacggcagcacggcgtgtgcttcgatctcaatcagccattccggcagcgataatccactgacaataatccatgatgaggcaggggcatcatctgcaaatttttctttcagcacatccgcaattgccgtttgttcatcgtgtgaatccgcaccggcacggatataaatccgcagcataaccacatcagacagagaaccgccggctgccgcgagggcacgggcaatattgtccaccgattgtgcggcttgttcccgcataccgcctgcgattgtcacttcattatgatcaacaccgacctgtcctgacagaaataactgccgggtgccggttgtttccacggcctgactgaagccgtattgcagggaattaaacagtgagggcggattaatccgttttatcgtcataacagccttttcagcagtgaaataaaagaaaatgtttttttatcatagattatttcaggcgctgtaaattaactgattattaacagcatgttttattttcagtctctgttgcaggagctgaataaaggggggctcattgagtctctgagatatacagggggaatatttttatatcagaaaaggatattcaatactcagagggttggcgccggggatttttacaacaccggcttaatttttctttacttaatataagaatccagcaccttcaggacaatatccagatcaccctgacgtttttcctcatcttcctcatgaactacgtgttcaatcagatggcctttaatcacttcccgcattaatccgtttaccgcgccccggatagccgcaatctgttgcagcacggcggagcactcatgaggttcatcgagcatttttttcagtgagttgacctgcccctgaattttactggcgcggttctgaagtttctgtctgtccctgatggtatgtgacatggcaaccccgtgaaataaggtgaaaagaaagtgacgggcaaaatagtagcatcttcgtgatacaaagaggtagtgtaattatactgggggggagtatactcaattcacgctttcttcattctgaaaacagggatcacacgtcatgaccgattttgcctctttactgcagcagggaaatgcctggttttttatcccgggtgcgattgcgctcggcgccctgcacggcctggagccgggtcactcaaaaaccatgatggcggcttttattattgcggtgaaagggacggtcagacaggcagtaatgctgggactggcggcgacgttgtcgcataccctgattgtctggctgattgccctcggcgggatgtatatcagtgcccggttcacaccggaagccgtagagccgtggttacaaatggtgtcggcggtgattattctggcaaccgcgttctggatgtttatgcggacataccgaggtgaaaaaaactggctgacagaaatgcagcaggaaagccatacacacagtgatcaccatcatcatgagcacgatcatcatcacagtcatggtcacgaccatcatcaccatcatgcagagcatcaccatgaccactatgatgacgaatatcaggatgcgcatgccagagcacatgcgcatgaaatcaaaacccggtttaccggcggcaaagccaccaacagccaggtgttactgttcggcctgaccggcgggttaattccgtgtccggctgcgattactgttttgctgatctgtctgcaactgaaagcttttaccctgggggcaaccatggtgctcagttttagtatcgggctggcactgacactggtcacagtcggtgtggtaaccgcggtggggctgcgccaggtcagccgccgctggcaggggctgggtgatattgccaaaaaagcaccgtatttctcggcggcactgatagcgctggtcgggctttacatggggatccacggctatatggggctggcaaactgatatcatttgccggtgtggtcgtttgaggtgaatcaaaaagagcttgccggataacaaaatatatggcttaatatcgacattggtttggaagtacagacctatttatgtcagtccgattttaagttgttctccgtcaagcgttatccaagataccacttcatagcgaattccttctgatagttcccataagtaaaaacgtaatcaaaccgcttatatgccttatggcaacaaaatcaatttaaaggaaattcatatgtccgcaacaattaccggtactgtaaaatggtttaacgatgataaaggttttggctttatcactcctgctgacggcagcaaagacgtgttcgttcacttctctgcaatccagagcgacagcttcaaatctctggcagaaggccagcaggtttctttcaccatcgaaaatggtatgaaaggcccggctgcagctaacgtggttgctctgtaatcaccgctgtcagtaacagattttaaaaacctcactccggtgaggtttttttatgcctgcaaaacagaatcgtggcgaaaaccggcaaactatgaatataatttgctcatcatttaaggagtaagttatgtctcagaatatttatgataatccggatttctttgccggttatgccacgctcccccgctcagcagaaggactggacggcgcgccggagtgggcagccatgcaggcattgctgccgccactggccggaaaatcagtgatcgacctgggttgcgggtatggctggttctgccgctgggcaaaagagcagggcgctgcccgggtgaccggttttgatctgtcagagaaaatgctggcgaaagctgcatcgatgaccacggatccggatattgcctggttgcgcgccgatctggagacactgcagttaccggcagcacaaagtgatgtgatttacagctcgctggcactgcattatttacgtgatatcccggcactgtttgccacgctgtatcaggcgctggtcgcgggcggcagcctggttttttccgcggaacacccgatctacacagctcctgtcattcagaactggtgtacggatagtgcgggtaataaagcctggccggttaatcagtatcagcaggaaggcgtcaggatcagcaactggtttgccgacggtgtggaaaagcagcaccggaaattatccacctggataaatgcgctgattacagccggttttgaaatcactgccatgaatgagtgggggccgtcagcggcacagattgccgccaacccggcactggatgaagaaaaagaacggccgatgatctttctgctcagcgcccgcaagccggaatagtggctgacgggcggttgtgttccgcagttacagcgttaatttatgctttcttatcagcacaaacagaccggcaaccgccgcgatgataagaaaccaggcaaggtaagtatgcagcggcagggcaaggattgccgcgctgacaaaataccccgcagagacaataacacttccccagattgccccgccgagaatattcagcacaaaaaatttcagcggattaataccggcggcgccgataataacggggccgatggttcttaatccgtaagcaaaacgtattccgataataatcaggctttcacggcggtgaattatctgctgcagacgggctattttatccgcatgtttatgaatgcggggcaggatccggtttccggcaaaataaccggtaaaaaacagaacattatcactgataattccgcccagtgcggccaccagcatcactttcggataggataataactgatggtgtgcagcaatgccggataaaaatgcagcggtttctccttcgatcatggtaccgaaaaaggttgcccaatagccgtattctgtaatccactgtgtcagtaatatttccatccgccactccgtttaaaataaaccggcggagatattaatacataatcccagtatcgccatattaaaaacaaaagagacgacggattgcattaataccgcgcggcgcatcggggaagaggcgatttccacatcggcagtctgtgaggcgacggcaatcgtaaatgagaaatacataaaatcagagtaagcgggttcagccggtctgtccgggaataataaccacggtttttcctgttgcggattggtgtaataaaggtgcgcatagtgcatggtaaatccggccggtaataacagccaggaggatactaatgtggatgcggtcagaatatactggaaggctttatcattaccggtcagattaccgtgcccgccgagggcaaaaaagagcaccagtaaactgacacaacacccggccagcaggaaaaacatcaccatgcgggcactttcatcctcaattttagttagtttacggatatcttttactttcttattaatgatccgctcaaaaagaaacagcaaatacacccaggagaaggcattccagctgaggatcaggcacatcagtgcactctgtacgggcagcagggcaaaaaaagtcacaaacgcgaccagcagggagataataaaacgcggacgcgagtgaaatgcgtgccggaaaatatgagtaatgcgaataccatagcgcaacataccagtatcctgttcagaaagatgacattttattataccaaatatccggcagcaggggcggcatcactttttcggatgcgtactttttatatactgaatatccctgccatttaaagtgtctttccatgagcataacatttcttattgtcatgttttttgtcgccgtggccgccggatttatcaacgtggtatcaggcggcggtggttttctgtcgattaccgcactgctgatttccgggttaccgcctgctaacgcactggcaacaaataagatgcaggcactgggcagttcattaacatccggtatttattttttgcgtcaggggcggattgatttaaagaataataaatgggtatttattgcgacattcttcggtgccgcatccggcacgatttttgtgcagtttattgatccgacttttctgaaaaaattactgccgggattaattatcagtgtcacgctgtactttatttttgcacccgatatcactaaatccaaagaaaaacagcgtgtttcttttttcctgttttcatttatctgcggcggcggtgtcgggttttatgacggatttttaggtgccggtgccgggacattttataccatcagttatatgctgctgttaggataccggatagataaagcacaaattcactccaattttctgaacctggcctccaatacctcgtccgttatcttttttatcgcgggtggtaaaatgatgtggtcgctgggattactgatgtttgccggacaagctatcggggcgcggctgggagccggtgtggtactgagttccgggctgaaagtcataaaaccgatgattattctggtctctgccgggatcagcaccaaaatgttatttgatatgtatttttaacagggacgggacaataatgaataaagccatttttaaagccgggatgttatttctttccctttcttttttctgtgccgcacaggcagatacagccgcaggaacaaaatcacctgaagaatatgacacacttcaggccatgatcattaaaaatgaaagtcagttactgccgatccggtttgaccctttcaccgttctgacagaagtcacccgggaaaataacgtgattatcctgaattatcaggttaccggtctgccgccggaattgttcagagaagaaaaatcggtaaataaaatgcagggcattctgacagggaaatattgtcaggactctgccattatgcggttatggcaactggcgttcccgtcggggttacagcataactatttttcggacggcacccgggtgatgcagataaatattaaaccatcagattgcggggtgtaaatgatctccgtcagcgggtgatataatcgttactaccggaacatattgccataatctgttcttttatccactggtgtccgggggaattgcataatgccggattataataagctcgcaaaatatactgcggcgcggggaaaggcaccgggaataccactaaatcctgcatgttaaaaagagatgtaattcctttttccggcaatgtgataatcaggtctgtctgagaaacaatcagcggggcagccatcaggctgggtaactccaccattatccgccgtttcagttgctgtttttccagataggtatcaatagcgccttgtgaatccgcccagggacgaactacgacatgaccggcggcaagatataatgcctgtgtaagcatgttattaatttcggggtgtccccggcggactgcaacaatataattgtcggtaaagcaggttattgcttccgtttctctctgcggaaacttttgtccttcctcgaacccgagagcaaaatctactttgccggaacggatatcattaacagcattaaaattctgtgaatacaataatcttatagtgatacccggggccaggcggttaatacgggatattaatcccggcataataacggcggctgtataatcagtcgcggcaaatatgaatgtatccgtactcagagccggatcgaaggcattaatttcacgaaaacagacggagagtgtttgtaaagcggctgaaatctgcggtgctatattttcagctttggccgttggtaccatttttccgccgtgacggataaaaagcgggtcaccgagagaattccgcagacggttaagggcatgactgagtgctgacggactcagtgcgagctgatctgctgcaaggctgatattgcggtgcctgtaaacagcatcaaagaccagcagtaaattcatatccgtttttcgcagggatgaatacatagctgcctgttttcgtaatgtaaaagtaagaagattttatcagaaaaataaaaatgaatattgtgcatttttagtctgtataaaatgcagtagccgcagattaaaaaagtattaccatgttgaccaacacattttgtcaggagatatatgagatgttaacccccgtatttcgtcaggtcacagcagcagatgttgatcgctgctatgaaattgaaactgtttcttatgaaggtgatgaagcggcaacccgggaaaaaattgcattgcgtgcaaaatgctatccggaaggttttttatgtatgctggtggataactgtattgctggttttattaatgcaggttgtgctgataacgtggtgatgtctgatgaggagtttaaagaacttgtcggtcatgatcctgacgcacccaatgtggtgattatgtcagtggtggttcatccggattttcaggggaaagggtattcttccctgctgatgcgggaatttatctcccgtatgaaagcaatgaataaaaaatcggtttatctgatgtgtaaagagcagcatatcgcgctttattcacatttcggctatgagtacattaaaccttcagagtctgaccatggcggaatgacctggcatgaaatgtatatgacactctgataaaaccttattgctctcttatccgccggatctcagccaaaggcgtggtctgcacaggcattgtgctttatactgcgcgctgtaatgactcagcaacagatgattaagcaggtggtaacggcgatgaacggaacaatcacaacatggtttgaagataaaggttttgggtttatcaaagatgagaacggggataaccgttattttcatgtggttaaggtcgccaatcctgacctgattaagaaaaatgccgccgtgacatttgagcccggcaccaataataaagggctgtcagcctatgcggtaaaagtggtgccggaaagcaaatatgtttttatcgccggtgagcgtattaagctgacggccattaagtccttcgtggtttacagtgaggaagaagcggcagataccgggattgataaagagaatgcagtcctgtctgtcggtgtgctgatgaacaacatcaaaccaaaatccgccggcccggccgaaatgcgcacactcagaaaactggcaatcaccacacagcacggcaccaccctgattttctcagaagatgagatagatatcgatgaaacggtgaaaatgcttaaggtgtgaaatatatcatgaataaaaaaaccaaccctgatcggttggtttttttattgcctgaaatccggattataacaatagcttaccggtttaactctccggagtttctggaacattcatatgcccggttatcccggacaactgattccgccgtcgccggaataatcaggtaggtttctccatattgatgtgatagtaatacgtatcacagggggaattatggattttgttttaacaaaaataactcaggttgattggtgtttttttaaagcgttgtatatgaacaatgacgttatgaggttcatatcagaccttatgccggaagaggaaattaaggattcttttgagagccggttaccttcatgggatatcctgtctcatcactggttatgctttgttatccgtgatgcgggcgacaataccccgatgggactgacaggccttaaaattgtcagtgaaggcgggcgtaaaatcgcagaggtgggttacattatatcaccggaattcagcggaaaatcgttggcaacaaggtcgctgaccaggctgatatcgctgcctgaactggctccgctgaatgagttccgtgcagttgtaacgggtggcaatactgcctctgagagtgttttaacgaaaaatgacttcattcttacagaggtcattaaaaacaactatgttataggcaatgaaatgtttgacgatcatatttacacattaacccgttaattatcagactcagtagccacgccatacgcggccttttccggatgcacaaaaaaaccaaccctgacgagttggttttcttataaaaatactggtcggcatgacaggatttgaacctgcgacccccgacaccccatgacggtgcgctaccaggctgcgctacatgccgaatgttatctatactactgttttgtttggttaaagcaagacgctactgtatcagttgcgctttttttatcccgggatcagtgggtatcgataaagcgtttctgctctgtcagaacctggagtaattccgccatatccggcttggcgttgcggatcttctcattattctcatcaaagcgctgatatttgccctgtgcagtcagcagtgatgcggaatccggcttgataatcaccagattgctgttatcgccggtgaatatccggggtttacgccgcgtggtagtgaacagatcatcaccctgggtgtattctcccggcgggttgctgacgtgcagtagtctctgcatcagggttgccataatatccggatgtgcggtcagtttgctgatggtttgtgcaggggtatccggccagtgaataatcagcggcacgcgtaactggtcacggttaaatttgccgtcggtgacccagctgtcctgcaatttggccatgctgtcaccggcaccggcggtgatgacaatcaccgttttatcccattcaccacgcgcccggatatcctgaatcagtgtgcccagcgtgttatcaatatctgtcatatcaggggcggaatgaccgtccggtaacggcgtgctgagattaatcagcgcaaaccacggctgatctttgcgggtctgcttcagccagagtgaccagcggtctgccacatccgcagaggcaccggcggttccgctgttatcctgtccgtcacgcagcggcggcaggctgtaatctgccagcagggcatagcggaagagcggagaggcaaagttttctgtggagaagaacccagactgataattctgtgcactcagcgccgtcatcagtgcggacggaatgcgtccgttgagaataccgtcataataggtacctgagatgccgtaatagagcccgaactgtgcccgttccggattaatttcgctgctgtagtgctgtgtgaattgcgtgctttcctctgcaaaccggttcaggttcggcattgccttatcaatatcatcccggctcagtgaggtgagggtgataagcagtaaattgtagccgctgccgttgtctgcataggtcagtttgttgatcgggtactcaacaccctgggcagtcgggtcgccgtgcagaagcagttgctgctcataactggtgctgtcgagcaggccgtgacgctccaggaatttacgtgcggtcatcgggtaagagaccggcaggttatagcgttgcatcgtcaccgggcggtagaaattggcatccgcccagatatacataatatgagaggtaataaaggcggtgataaataccaccgcaacaggcttaccgaatttttgccggttcaggctgcgcagtttctgccagctccaggtgccgaacaacatttcgatcaggaaaataaccgggatcgcaataaagataaactgccagcgccgcgccatttccccctgttcagggttcacgactaaatcccataccaccggatttaaatgcaggcggaactgttcatagatgccgatatcaaacagcagcagtgtcagcccggccgtaccgagggcggcggataaaaagcgcagcagccgttgtgacatcaccacaaaggtgagcgggaacacaatcagcagatagagggcgaatgccaggaaactgaaatgtcccagccagctggtgatggcgtaaatgcggccaatcagcgtatccggccagtcagaaataaacaggtaacggctgctgagtgcaagactcagcagaatattaaacagggtgaaccagtgtccccagctaatcatctgggaaactttgtcaccgtatttcggacgatacgttaccatagaatttcgtcgtcagccggaatgcggtcagtgcgctttatcttcactgacggaagattgcagggcgcgggcgaaggattcagcaatatgagcgcgttgtgacggcgcaacactggtattgatgagattggtcaccatatttcctaacaccataagagaaaggtcggtcggtgtccggtttttttccagcacactgaccagctcagccagtaacttttcaacgtgttcatcactgtagcgggatgattgcggcataaacgtagatatcctgattgtacaaagctctatatcataactgatgagcggccgtatttctgctttttgcggaaaattatttcaattatggatccggttacgcagggaatacgccattttcagtatgcacgccgctgattatcctgtcttgtcacattctcctgtgattgtgacttgcgcacagattacaacggtgtttgaatacgcgcaaacgaggccgaaggagtaaaagatgagtctggatatcattcagattgcgttgcatcaattgattaaacgcgacgaacagacactggaagtagtgctgcgggacacaccactggaaaaaaccgccattgttgaggaaatgatggctgaactgcaccgggtctacagcgcgaaaagcaaagcgtacggtgtgtttaatgaagagagtgaactgtcagaggcactgcgtctgcagcggcagggcgaagaggaatttcacgcctttacccgtgcggcaaccgtccgcctgaaggatgagctggcaaaatacccgtttgcccagggcggtgtggtgttatttgcccattaccgctatctggcggtggagtatctgctggtggcggtactcgacagctgccagagcatgctggtcaatgagagcctggagcttaacagcacccattatctggatattccgcatgcggatattatcgcccgtattgacctgaccgaatgggaaaccaatccggaatccagccgttacctgaccttcctcaaaggccgtgtcggtcgcaaagtctccgatttctttatggatttcctcggtgccgctgaaggctttaatgccaaaatccagaacaaaggcctgttacaggcactggacgattactgcgaggaggctcaggcggacaaacaggagcgccagtcttaccgcaaacaggtgtttgattactgcacagagcaattacagagcggtgaagagattcagctgacagagctgtctgcggaactgccgccgctgggtgagcagagctttgcgcagtttactcaggaaaaagagtacggactggaggattcgttcccggccgatcgcagcacattacgtcagctgacaaaatttgccggcagcggcggcgggctgaccattaattttgatgcgatgttactgggtgagcggattttctgggatgcggccacagataccctgacgattaaagggacaccgccgaatctgcgggatcagttacagcgccgtggtaataaaggatagtgagagcagaaataaataacgccgcaaaagcggcgttatttactcggcgtcccgattaaagctcgataggtggcgtaattaagcgcgcaggaaatcgatgtgtgtcagttttggcttgaacggatgacgctgtacagcctgtactttcactttggtttctttaccatcgataaccaggttcagaacttcgtaaaattctgctttagcttcctggttgatcaggacgtcgtggtccagttcgatggaaacaggttcctggttgccaccataaacgatagcagggaacttgtttgcgcgacgcaggcggcggctcgcacccttaccctgctctttacgtaattcagcattgatagttaacataacttttctctttaacaagagtaaaaaaaatctttgctacaggcgacccagcagcaaagtcggtatttggcttcagcagggttacccgtggtgaagcggcgtgcattttaccgaaaatgcggacaaacggcaaacgaaacccggtataaaaccaaaaaagcagcactcagggttatgccagactgtcagatttgcggaatcgcccctgataatcaaagattttttcgcggatttgccagtagttttcttttttgcgtgagacaataaaatccgggtaacgcagcagcacctgctgacggatcacggattctgcatcctgccactgaaagggcacaccgggtgcgcgcagatgctgtgccagaaactgtttttcaaagacaaaacgctgtgccggggtggtcaggcggaaacgttcgctgacagtggtgccgtcttcatcgtaatagttgatggtcagccattcaccgcggttatcctgtccggcagaaagcgccataccgccgcagcgcaacaccagggcatctttcaggcgcagtgcggctttaagcatgtcatccgggtcactgaggacttcatcacagtggcagcagcgccgtgcggcaatatcattttccccgttacaggacgggcagagtttaaagcggaaacggaaatcgcactgatgacgggcggattcatcatccgcatcaataattccctgacagcggcgcccatagtgctcgatgatatgcccgtcgtcggtacataatccccagaacagattagcaaagccgcacaacgggcagaatacctgcaccggctggcttttgctgttgggtttgtgattgccgacttccggcatataaaggtcatgcgggtttccggcgtaatcgaggatcagacactccgtttttccgggagacaggcgcaggccgcgtccggcgatttgctggtagaggctgactgactctgtcgggcgcagaatggcaatcacatccacatgcggggcatcaaacccggtggtgagcacggaaacgttgaccagataatgcagctcacgcgctttgaaattccggataatcatttcccgctccgctgacggggtatccgcgctgaccagtgccgcttcgcccggcggcagcagtgatacaatttccgccgcatgttccacagtggcggcaaatatcatgcaaccctgtcggggggcggcatactcaataatctggcggacaatacgcggtgtgatccgcttttgttttttcacttcccgcgccagcacctgcgtgtcaaacatcccggcggcgctgaccggcacctgtgagaaatcatattgcagcaccggcatatccagccgctgcggtggtaccagatactgatggctgaccatataacgcagcggcagttcatagatacaatcgcggaagaagcattcatgatcgccgcggatcatgccatgatagtgatactgatagatccagccgctgcccagccggtacggcgtggctgtcaggccgagaatgcgcagggcagggttatttttctgcagatgctgtatcacctgctgatactggctgtcttcgctgaggctgatacgatggcactcatcaataatcagcagggaaaatttgccgtcaaagtccgccgtattacgggcgacagactgtacgctgccgaaaatgactttttgtgaagattctttttgcgataatccggctgaatagataccggcttccaggccgtaagcctgatatttactgtgattctgctccaccagctctttgacatgcgccagcaccagcacacggccgtgtgccagccgcgccagttcggcgatcaccaggctttttcccgccccggtgggcagaacaatcaccgcaggcgtggtgtgtttgcggaaatagagcagggtggcatcaacagcctcctgctgataagggcgcagggtaaacgtcacagaaactccggcggaacagacaaaatcagggcgtcagcatatcacactttgggcgcgacaattgactgcatgacggcggataaacagcggaagcgccgtcagaaaggcgctgtgatgttgacggtttgttgttataatgattactgtggttattatcaaacaaaattctttcattttatctgcttatcagccggcagtatgctgcgggcacgtcaggtttaagagacattcatgcgattagataaatttcttgcccatcagatgggtatcagccggaaccttgtggccagagagctgcgtgcggggatggtgactgtggatggtgaggtcgtgaaaaacggcgcactgaaagtcagcgcggagaacgaagtggcgtatgacggcaatgtgatgacacacgtcaccgggccgcgctactttatgctgaataaaccgcagggctatgtctgctcaacggatgacccggttaacccgactattctttattttatcgatgagccggttgcccataaactgcatgccgccggacggctcgatattgataccaccgggcttgtgctgatgacggatgacgggcagtggtcgcaccgtatcacctcaccgaaacatcattgtgagaaaacctatcgtgtcaccctggcggagccggtggcggacactaccgcagcgctgtttgagcagggtgtgatgcttaacggcgaacagcacccgaccaaaccggcaaaactcgagattatcaccccgcaggatgtgcggctgacgatttccgaagggcgctatcaccaggtcaaacgtatgtttgccgctgccggtaaccatgtggacgaactgcaccgcgagcgtatcggcggcattgtgctggatgacagcctggcgccgggggaataccgcccgctgactgatgaggaaattcagtcggttctctgaacaccttttttactgaatccaatacggagtaacaggcgtgcaagtgcaacgttcggcctatttcggcctgatttttatcctggggctgttatcgatgctgatgcctctggctatcgatatgtatctgccaagcatgccgaccattgcccgtgactttggtgtcactgagggcgatgtccagatgacactcaacagttacctgatcggtttcgccgccgggcagctggtgtacggcccgatggcggatgcgctcggccgtaagccggtgatcctcgggggaacactgattttcgccctggcttccgccgggtgtgcgatgtctcaggatatcggcacctttatcgggatgcgcggactgcacggctttgcagcggcagcggcaagtgtggtgatcaacgccctgatgcgcgatatgttcaccaaagatgaattttcccgcagtatgtcgtttgtggtgctggtaatgacagtggcaccgctgctggcaccgatcatgggcggtatgatgatgctctggttcagctggcacgcgattttctggaccatcatgattgccgcgctgatcgcggcactgctggtgctgttttttatccgcgaaaccctgccgaaagagcggcgtcagccgttccggctgcggatcatgctcggccagtttgtcacgctgttccgccagaagcgggtactgtgttatatggtggcatccggcttttcatttgccgggatgttttcgtttttatctgccgggtcattcgtttacattcagctttacgggctgacggagctggaattcggttactgcttcgcactgaatattgttttcctgtttattatgaccaccattaacagccgttatgtccgtcgtttcggtgcactgaatatgctgcgtaccgggctggtggtgcagttgctggccggatgctggctggtgctggccgcatccgccgatctcggctttgtggcgctgatgataggtgtggcctgttatgtgggaaatattgccatgatcacatcaaatgccatggcggtgattctggatgattatccgcatatggccggtaccgcctcatcactggccggtgtgctgcggtttggtatcggtgcgggtgtcggtgcggtggtagcctcatttaacatgacaacggtctggccgatggtcggtgcgatggcgctctgtattctgattgccgcctctctggtgctgtacgcacggcgttttgcctgatttcctttctctgctgccggtccgggagtttccgggccggtcatttccgcaatatcagtaatagtcgaatgattaccccggataactactcagtcgtcatttggttgatctgagtcatgaaaagttacactaatgtgaattctgtttcgcggcagaaagcaacgtataatatcgtacgcctttctcttaattatataattaactgatatttcatcatatttacaggtatacgggtcattacagcgcggaattatatccttcttcattcaatttcagctatatgatataaaataaagcagttgagaaaattaacaaaacagtatacaaatagaggcaattggattgatgatgttaacatccggcgaaaaagcacgatgtgttttattaccggatcgggagtaaatcaccggcgtttcatcatccgtgaacacagaatgttcgttaattccgaaggattgggtcggaaaatttatttcagatgattcaccggcacagtaagacaggataatagtgtgaatagtaatgcgctttccgttttttcccgcctgccacagcattaccggctttccgggcatgatgacggccgccggctagaggcgttaccggaatctttgcagagcagggaagacagcctgaccggtttaaaattactgagtcacggccaccattcaacatatgatgcactgtgcgccatccggtcgcacctggaaggattacggattgacagcctgatcctgacctgggaaggggagccgtgcctgtttttacacagtgatgatgaaagtaccgcactgtgtgccctgaaaactgcaggggcggcaattgcggaaaatatttctgcccgtttccccttctgacaggtaacaccgccgttctgtgtgacggatttttataaaatgcagacataaaaaaagcttcctgaaaaggaagctttttctttttaaataatacactgcaagggagtgaatgtattatttaattaaacggcgtccgtcgtaataacggttgttccagtatttatccgtcatgtttgagacgataacaccgtttgaagtggatgcatggacaaatttgtcattgccgacataaataccgacatggcgctgacgttttccggttttaaataacaccaggtcgccggcctgtaatttagcacgttttacgctggtgccgacagactgctgctctgcggttgaacgcggcagttccataccgaactggtcaaggaaagtctgacggacaaatgcggagcaatcaataccggagcgggtggtgccgccgaggcggtaagcaacgcctttccaactggcatactgagacatcagtttggatttaacatcggcattattaactaactgttcgaattcatcctgagacgcttgcaagataaagctgtttgtacgggtttcagattgaacttgacgggctgaatttggagatgtactgcatgctgacaatgtcgccgcgataatcaatgccggaacaatccgggtgatatatctcagaattggttgagatgtgaccatgtgtgagttttcccttgcagtccttatgtgacaaacgtcactttaaaaaaacaaaacatatcaacactaattaaatctacggtggtgcacaatatgtttattctaaaaacgtgcggaacggcacgtttaatatccatgaacaattactgaggaaaaattaatcagtcatccgtaacggcgtaattatcggtgaaattaatcaattcctaataatcggacggattgatactacataaaggtgccggaaatggcgagggaaaaaacctgttatttacaaaaccttaaatttgtcagcgaaacaatcaggatgtgatgtcaaatatgtttaactaatgtgaaattttctttgtaatatcggataaacggggcatatggcgtaccagaaaatttacacactgatcactcagcggtgtcagtaaaatccagggaaccgtgatcagtgccagtgacagcgaaccggccataatatcgctgaaccagtgtgcaccggccattatccgcggtaaagaaaatataattgtcagcaaaactgctgccgcaaaataacggaatccggcataacgccagacaaaggcggcaaaaatgatcagcatcagcccgtggtcgcccggaaaactgctttttgaggcatcttttgtaaagatcccggtgatatcgctgacacggtgaacagcgtccagttccagtgtcgggctgaggcggttaaaaggaattgcctgtccggcctgattaatcagtaccgcacttattaccatcaccacacctgccattaccagacggcgtttaccgtcgctgtcctgtttgcggaaagccgcataatagataagtcccatcagcaggagtgctgccagatcaaatgcccggttgttaataaccgcgataaatacagccagtgaatgattaccggcgagcgggtcattgaaaaaacggaaaacagcatggtcaggtaccgcccaccagccgtgatcaaccggcaggtaccaggaaagaaacagcatgataccggcgaggctgataaaaagcggaagtgtgatgcgttgtactgccatgacagaacctgatgataataaaatatttttacggaaatagtgcggaatagtctgacagaaatacggataagggtttatgcagaaaaagggaaataatatatgttatttttgtgtgaaagttgttaattccggggtggcgtctataatcataagtgaagagggtaatgtagttaataaggccgaatgtatatcataaaataaggaatttcagattatagcgctgccggtatactaaaaatacggctgtttgttatagcgcagtaaagattagtgacctattgtcgataaagaataagcgaatatttttcatcccggcggtaacggattgcctccgtgaatacttatctgaagaggtatgttatgaaaaagctacagttctttatcgctgctgcaggcttattaatgagcagttttgctccggcaactgagagtaaaggccagacagcatcgggtgtgatcatctttcatggtgcgattgttgaaggcccttgtgcaatggactttcagaccaatgacatcagttcccgctgttaccgctccgggatgaaaaaagagcggctgaatacccagactattacccgtaatacccggtcagtttctgatttgataccggccaatatgggtgatgcaaaacttcactggatggatgacagtaagctgatagcgatggttattgtcagttatctttaatgcagactgagaatcacaattaatgcattcagaggaaaccggaaaaatcgtgtgacgtatcacaccacgatatctgtttcctcttctttttttgtgtccggcgcgttataacagatacagcggtaacgttaacacgctggtcgtcagtctgacgaaacaacagtgaggtgcctgtgatgaatcatcttaaggctattttcagtggtatgttgttaagcttgtcagttatcacaccgggtgcggcagccggtgtcagtgaagggacgattctgctgtccggcagtgtggtgaatgccgcctgtgaggtcagtgtcccggcggcggaacagccgcagaacagtcagccgtcatttgaataccgttgcctgcgcaacggagagcctgccagtgtgcaggacagtatcgctgaaggcgaacttgtgcaggggcgtctgccgcagtcaatgggacgcacgtcttactcggtgctgaacgaagagcgccgggaagcgtatctgcgggtggattatttctgaaggacgggaaaagaacggcgggtcagccggtctccgcaatgtgcagaaaaccggtaacccggtaacaggcagtttttaccggctgcgggaattaatccgcgcggcccatataacggcgttccgcgatatgaatgcggattttttcaccgttactcaggtattcaggcacctgaattaccagtccggtcggcatggttgccggtttggtccgtgcactggcggatgcacccttgatgcccggggtggtttcaacgatttccatatcgacagtctgcggtaattccagcgccagcacctggccatccattgtcagcacctgcatacccggcagaccttcctcaggaataaacagcagttcttcttcgatctgatcttttttcatcggatatggcgtgaagtcttcatcatccataaagacatactcgtcaccgtcaacataagagagctgaacagcgcggcgggttaaggtaatggtttcaataatatcatcgcctttaaaacgctcttccactttctgaccggtacggacatcagtaaaacgcattttatacagggtgctggccccgcgggcacttggcgtctggacatcgatatctttgaccatcagcagcttgccgttatagctcactgcggttccgcgtttaatttcattggcttttgccataatttgtcccgttacataatgaacatcaatagtaaagcaggccttaaagcctgccgattggcgacaaaattactcgcagtttttccaatgtgcaagcccaaattatcacacccgcctgcagaaatgcagcgggtgtgatatccgggtgaaatcagcggtaaaccggcaggagatccatcatggataaaatatgtgtgacggcgttgagaagcccgaacagaatgataaagatgatcatcgcattgccgcccggcacacggtaggctgcctgcgggaagcggcggcgggtggcttttgccatcagcgccgggacaatcaccgcccagatggttgctgccagcccggcatagccgatggcatacaggaacccgttcgggtacagcactgccagaatcgccggcggaacaaaggtaaacacggcagatttcagacggccggtgccgttatccttaaatttaaagaagtctgcgatgtagtcaaacagccccagcgacacacccaggaaggaactggccagtgccatataactgaaggcattgagtaactgcaccgtggtgtcactgttgatggcggctttcatctgatttaacagcgcggtgatattgccgccttccgcgataacctgtttaaagttttcgcgcgggacgttaccctgagcggccagctgccataagatatagatcaccagtgaaatcagggagccgataagcaggctgcgtaccacggatttagcgtcattacggtaatacttcaccagacccggcacgttaccgtggaaaccgaatgaggtcagcaggaacggcagcgccaccagtgcatacggcagataacgggcttccgggtcctgcgtgttaaataataccgcggttttcacttctgtgatcatgccaccagcggacatcacaaatgcaatcaccattccgccgattaaaatggtgcacaggcggtcaacggctttggtggaaatccagacaatcactgccaccacggcggcaaagaaaattccgctcatcgccggggtgatattgagtccgcgtgctgccaggttctcctgcaacatcgaaccacccgccgagatatatgcataggtcagaatatagagcacaaaggcgatggagagcccgttaatcactgaccagccgttacccagcaaatctttggtaatggtgtgaaagctggatcctgacgggtaattgaggttcgcctcgaggatcatcagcccggaggtatacatacagaaccaggtgtaaatcagcagcagaacggagccggtaaaccagacacccgctgtcatcacagggatggaaaacatgcctgcaccgacagcggtaccggcgataatcatggcaccgcccaggacggaagggcgtttggtttgtgttattgcgtcgctgctcattaaatcctccggttactcagctccgtgtactagcttgatgatacggcggcaaaaaaaggttgtaaagcagataaactgataaatccgcgtaattgtgtgtgattgagtgataaatgagcaattgccgctccggtagtcaggtgcggcatgtaacggattattttgtcagataaaactgattggtctgccacagatgaatggcgttgcggctggcttcaaaatgcggttcgggcagattatccggagagcaccagataataccgtcaaatttatccggctcccggatcaccggcagcgtatcgctgtcatagtgtgccagcaggcagactgataccgtgtgcttgccttccgcccggtatgtttccaggttattgcacagcccgatcactttcagatcagtaagggtaatgccgatctcttcctgaatttcacggatggcacaggcttcaaaggtttcaccgggatcaacatgtcccccgaaaatggaccagtatggcgcatgtttaccgctgcgtttacccagcagcacttcacctttgctgttgacaataaccaccccggtaccgacgacgactgacattattttttccttctttttaatcagattgcgggcgctatggtacacttccgtgcgccggagtgacagcctgtctgtttttgacaatatcttcctgcaaaatgaatgattcagagcatagaatatctgcctgtctgtgttataactgaaacgattcaaaagcagctgttgtatcatgccgcacaatattactaatgattataacccgttagccaaaaataacagagggagcacccggctgatgccccgtcgagtagccacaattaccttaaatccggcctatgaccttgtggggatgtgtccgtcccttgtcccgggcgaggtgaaccgtgtcagaacggtcgggttacatcctgcgggaaaaggcattaatgtcgccaaagttctgcgcgacctcggggtggatgtaactgtcagcggctttctggggaaagataatcaggaagaatttcagcattttttcagtgaaaacgggctggcaaaccgcttccatgtgatcccggggcgcacccggatcaacgtgaaactgaccgaaaacagcggcgcggtgacggatctgaatttttccggtttccgtatcaccgaaagcgagtggcagaagtttatggccgattcactgacctggctcgggcagttcgatatggtggtggtcagcggcagcctgccggaaggcgtggatccggcgtggttcaccacctggatgagccgcctgcgtcagctgtgcccgtgcattatttttgacagcagccgtgaggcgctggtggccggtctgaaagccacgccgtggctggtgaagcccaaccgtcatgaacttgagatctgggcgggtaaaccgctgccggaactgaaagatgtgattgacgccgcccatgccctgcgggacaaaggcattgcccatgtggtgatttcgctgggacaggaaggggcgctgtgggtgaatgcctccggtgcctggcgtgcactgccgccgcattgtgaggtggtgagtactgtcggggcaggggattcaatggtcggcggcctggtatacggcctgctgatgagccagagcagcgaacacacgctgcggatggcgacagcggtgtctgcactggcagtgagtcagcccggcgtcggtgtccgtgaccgcgccgaactggcagcaatgatggcaaaaatcaaactcagcccggtggtataacccgggttatttctccagcgatttcagccaggcaatttcctgcgcccagatatccggattcacggtttccagcaccatcgggatgccgtcgaaccgcttatctttcataataaactcaaacggcgcattgccgattttaccctgaccgagactatcgtggcggtcaacgcggctggcgaactcactttttgcatcattcaggtgcatgcccttcagatattcaaacccgacaatgctttcaaaatccgcaaacgtggctttgcaggtttccggtgtccgcagatcatacccggcggcaaacgcatgacaggtatcgatacagacaccaacgcgggatttatcctccacaccctcaataatggcggccagctgctcaaagcggaacccgaggttgctgccctgtccggcggtgttttcaatcacggcaatcacaccgctggttttatccagtgcaatattaatggattctgcgatccgcgccagacaagccttttcctcaatcttattgaggtggctgccgggatggaaattcagacggtcgatcccgagctgttcgcagcgctgcaattcatcaagaaatgcctcgcgggatttttccagtgcttccgtttccggatggccgaggttaatcagatagctgtcgtggggcaggatctgcccgtggccgtagccgtattttttgcagttggccttaaaggccgcgatgacgttttccggcaggggggcagctttccactggcgctggtttttggtgaacagggcaaaagctgtggcgccgagttcatgcgcacggataaccgcctgatcaacaccaccggcggcgctgacgtgtgctccgacatatttcattggtttttctccttctttgtgccgattatggcataaggaaccggagaatgcagtgacaggatatcccggccgcacaaccgggatatcacagagagaagggcaggatcagccggtgatcagcgggataagcaggttaatcgccgcaccgccgccaatcagccagccgaacagtaccagcgccatcagcatcggtttgataccggcctggcggatagcactgacgtgagtggtcaggccgagtgccaccattgccatagccagcagaatggtatcgagcacaataatctggcggacaatgatttccgggatcagatggaaggagttaaatccggccaccagaataaagaagacggcaaaccacgggatagtgattttggatttttccttcgccgcacctccggcactgcttttctgacggctcagatactgagacaggatcagcaggaacggtgccagcatcattacgcggatcattttactgatcacggcgctgttttccgcatccgggctgatggtgtgaccaatcgccaccacctgagccacttcatgcacggaagacccggcatacaccccgaaactcatgtcggtgaacggcagccagcccagcgcggcattgagatggaacagccacgggtacaggaagatgccgatggtgccgaaaatcaccaccgttgagaccgcaacggccactttacttgccggggctttaaccaccggttcagtggccattaccgctgccgcaccgcagatactgctgcctgcaccaatcagaatgacggtttctctgtccagcccgaaccatttacggccgatatacatggcgatcaggaaagtgctggtcagcatcacggcgtcaataatcacaccgctgatcccgacatcggcaatctgctgaaatgtcagacggaagccgtacaggatgatccccgcccgtaaaaaatagtgtttggcaaaaccgaccccggcttcgcactgtggcttgatatgcgggtaaacggtattacccgcaataattcccagcagaatagccagtgtcagtgcgcccagcccgaggttgataaaccagggcatttccccgagcagcatagcggcggtggtcagaacccccgccaggacaaagcccggaagcagtctcagccacatcggttttgctgtgcagcgggctttttcagttttgatatgactttcagacataagtaactcacaaaaaggaataacgatgtgcaaagcatagcggaaagcgtaatatttttaaaattcataataattctataatcaacctaaaaatcaggttagcggtaatggcaatgttaaattataagtataatgttaatatgatgataataatcgggataaaataagggagcgctttgccatgcgcatcacactgagacagctcgaagtctttacagaagttcagaagtccggttcgacgacacaagcttcccagcagctggcgctttcacagtccgcggtgagcgcctctctgacggatctggaaaatcagctgaatgttcagctgtttgaccgggtcggtaaacggttggtgaccaatgagcacggacggctgctgtatccgaaagccattgccctgctcgagcaggccggtgaaattgaacagctgtttaaaaccgatgcgggggcattgcgttttgcggccagtaccaccatcggcaactatatgctgccggaaatgctgggggcataccgcgcagtgcatgaaaatacaccggttgaattatttatcgccaatactgaggaagtgattaaagccgtgctggagttccgcgcggatatggggcttatcgaaggggtctgccattccccggaactgattaccgagccgtggctggaagatgagctggtgattttctgcagcccggataatccactcagtcagaaaagcaatgtgactcctgatgatctgaaaaatgtggcctgggttctgcgtgagcgcggctcgggtacgcgggaagtgctggatcagatcctctttaaccgtctgccgggtttccgcgtggaaatggagctggggaattctgaggctgtcaaacacgcagtgcgtttcgggcgcggggtcagttgtctgtcgcggcgggtgattgccgaacagctgagtaacgggctgctgtcggaagtgaagattgccgggctgaccctcaaccgcactcttttccggatttatcaccgtcagaaacatatctccaacgctctcaataccttcctgacctattgccgctgatgcggcatctgtttcttctgccgccggtttccggcgggcagctgaggcaattataagccgggtgcttataatcccgcagcgattatgcaggtatcttataatgccgcatatttgctgggtacagccccgggatttcgctacaatcacgctcagtggatgaaaataactacatgaaacaggattgtaatgtctcagcaagcaaatcaaagcgcgggtgaacaaccgcagacactgcgccgtgaattaaaggcgcgccatctggcgatgatcgccatcggcggatctatcggtacggggctgtttgtcgcttccggtgccactgttgcccaggccggtcccggcggggcactgttaacctatgccattatcggcctgatggtctatttcctgatgaccagcctcggcgaactcgcggcctatatgccggtatcgggttcatttgccacttacggcgccaaatatgtggatgaaggcttcggtttcgcgctgggctggaactactggtacaactgggcggtgactatcgcggttgacctggtggcagcacagctggtgatgacctactggttcccggcggatcagatcccgggctgggtctggagtgcggcgttcctggctattatgttcctgcttaactttatctctgtaaaaggattcggtgaagcggaatactggttctccttaattaaggtcagtaccgttatcctgtttattgttgtcggcgtgatgatgatcaccggcattatgaaaggcggggaaggtgcgggctggcacaactggactgtcggagaggcaccgttcaaaggcgggtttgccgcaatgatcggggtggccatgattgtcggcttctccttccagggcactgaacttatcggtatcgctgccggtgaatccaaagatccggccaaaaatattccgaaagcagtgcgtaaggtgttctggcgtatcctgctgttctatgtgctggcgattctggtgatcagcctgattatcccgtacaccgacccgaacctgctgcgtaatgatgaaaccgatatcagcgtcagcccgttcaccctggtctttgaacgtgccggtctgctctctgcggctgcggtgatgaacgcggttatcctgacagcggtactgtctgcgggtaactccgggatgtatgcctccacccgtatgctgtacaccctggcaaaatccggcaaagcaccgaaactgtttgccaaactgtccaaaggcggtgtgccgcgtaacgcgctgattgccacgacggtgattgctgcgctctgcttcctgacatcgatgttcggtaaccagtccgtgtatctgtggctgctgaatgcctcggggatgaccggctttatcgcctggctggggattgccatcagccactaccgtttccgcagaggctatattaagcagggctatgacctgaacgatctgccgtaccgctccggtttcttcccggtcggcccgatcttcgcctttattctgtgtctgaccatcacgctcggtcagaactacgaagccttcctgcaggatcagattgactgggtgggtgtggtcgcgacctatatcggtctgccgctgttcttcgccatctggtttggttataaaattgttaagcgtactaagtttgtccgctacagcgaaatggactttccggccagccataaataaggctgtgtgacccggttttgtgacatatcacgtaaattgataaaaaacctgacgatcctggtcaggttttttttatgtttgtcgttacaggcttcgcggggatatccacgggttgaaactgtgtttatccgttaagtcagtcgttttatctgttaataatgaatatcacttacagattatctttcgatatatcgctatcacctgatgataacgaatattgtaatgaggaagataattattccgtattgataagagttcttatttgctttattgttaacgccaatttctgacagataacaggagtcggtaacgtgaaattagtatctgtagcaaaagggctgaccatgagcctggcagcaggggctgttctgatgagcagcgcagcatgggcggaaacagtggttgatgccgcagggcgtacggtggaagtaccggaaaaagtggagcgcatcctgttaggggaagggcgtatgatccacgcggtggcattgctggaaggggacaaaccactggcacgtattgccggctggcagggtgacttccgcaaactcgacccgcagtcttatgctgtctacaaagctaaattcccggaaatcgacaagatcccgctgatcggtaacacgacagaggacagcgtcagtgcagaaaaagtattaaccctcaatccggatgtggctattttcggcctggccggtcacggaccgggtaaaaacagcgagctggtcggtcagctggaaaaagccggtatcccggttgtctttgtggatttccgcaacgaaccgctgaaaaacactctgccgggtatgcgtgtgctgggtaaagtgctgcaccgcgaagaaaaagccaaagcctttgaagatttctatcagaagcagatgaagttagtcactgacgtgacagacaaaatcccggaagataaaaaaccgaccgtgtttatcgatctgcgcgccgggtctttccctgactgctgcggtactgccggtaacggtaacctcggtaactttatcgatctggcgggcggtaaaaacatcgccaaagacgttctgccgacaccactgggtaccatgaacctggagaaagtgattgcggcggatccggatatttatctggtcagcggcgcgaaagccccgggcagcaccgatgcgggtgttcagctgggtgcgcaggcaacagaagcggatgccaaagccagcctgaaagccattactgagcgtaagggcattaataccctgaccgcagtgaaagaagggcgtgactatgctatctggcacaactattataactcaccttataacgtgattgccgcgcaggcctttgccaagtggttctatccggagcagtttaaagatctggatccgaagaaaaccatggatgaaatgtacagtcagttcctggctgtcgaaccaaccggcacatactgggtcagcggtaaataattttaagtagtcagcaggtatttgaataatgagtattaccacagaagcaatgctacagacgaagccggaacaggcaggcagtgaattaagctgtgatgtgaaatcacattaccggcgtgtactgcgcaggcggttgatgtggatgtttgcggtggttgcggtaatactctgtaccgtggtgctcgatttcaccatggggccgtccgggctgacccttgatgcactctggcagaccctggtgtcgccggaaagtgtatccgcgggcacccgtgtgattgtctgggaaatacgtctgccgtatgccctgatggccgtggtggtcggcatgtctctcggtcttgccggggcagagatgcagaccatcctcaataacccgctggcgagtccgtttaccctcggcgtctccaacgccgcatcgtttggtgcggcgctggcgatagtcctcggaattggtattccgggcgtaccggatcagtggtttgtctccgcaaacgcctttatttttgccctgttttccgcgctgatgcttgacggcatcacccgctggacacgagtggcaacctccggtgtggtgttattcggtatcgcaatggtctttacctttaacgcactggtatcaatgatgcagtttatcgccacggaagacaccttacaggggctggttttctggacgatgggcagcctggcgcgcgccacctgggtgaaactgggtgtgatgacgctggcctttgccattctgctgccgatttccatgagtaactcgtggaagctgaccgcactgcgcctcggcgaagatcgcgctgtcagttttggtattaacgtgcgccgtctgcgtctcggtacgttgctgcgcatcagtattctgaccgcgctggcggtggcttttgtcggcccgattgcgtttatcggcctggtcgcgccgcacattgcccgcatgatgttcggtgaggatcaccgtttctatctgccggcgagtgcattaatcggggcgctggtattgtcgatggcatccattgcctcgaaaaacctgattccgggcgtgattattccggtcggtattgtgacatcactggtaggtgtgccgttcttcctgagcatgatcctgcgtcataaagggagcatgtaagatgggtctgaatgcaatgtctgctcagagcgggttacagattaaacacttcaatgccggttatccgaaacggaaaatcattgaagacctgaatgttgagcctctgccgcgcggtaaaattactgtgctgctcgggccgaacggcagcgggaaatcaactctgctgcgctctctggccgggctgaacaaggcggaggggcagttactgctcgacggtcatgacctgacgcggatgaattttgccgaacgcgcgaagcaggtggtttatctgccgcagacactgccagcaggggtacacctgcatgtgctggaatccgtgattgttgcacagcgggcatccggcggtgtttctgaccgcgacagtgagcaggaagtgatgtctctgctgtcacaattaggcattgaacatctggcattgcattatctggatcagttatctggcggtcagaaacaattagtcgggctggcacaatccttaatccgtcagccgacactgttattactggatgagccgttaagtgcgctggatttaaattatcagtatcacgtaatggatttggtgcgccgtgaaactcagcgccggaatattattacggtggtggttgtgcatgatattaatatcgcactgcgtcatggtgatcatatattaatgctgaaagacgggaatttaattgcggaaggggatccggaaacggttattacgccggacagcctggcaaccgtctatggtgtgcgcggccgtattgaacactgctcgcagtctgtgccgcatgttgtgattgatggtctggtgccgcgcgcggttgcgacactggcataataaaaccggtttatattacatattcttttttattctctgcggaatatatttccgcagagggtgattatctgcatgctgcatatattttgtgtgctgataatacattgttttctgtataatttatttttataaaaacaaatagccttataaaaggtaataataaaataatgacggatgcctgcaatggcagggtcattattatttaaaaaaagggatataaatccctcagagcgaatgtcgattgtccataaatatattatctcttggagaatcaaaagaatggttattttttcaaaacgaaaagtggcggtatgtgttatggcagcactcgccgctcaggttatggctgctcaggctgcaaataaagaagacgtgattgtggttaccaccgcatccggcttccagcagaaaattgaggatgctgcggcgactatctccgttgtttcacgcgaacaactggaagataaagcctaccgcgatgtgaccgatgccctgaaagatgtgccgggtgttgtggtcaccggcggcggcagctcgtcagatatcagtatccgcgggatggatccgaaatacaccatgatcctcgtggacgggaaacgggttgccagccgcgaaacgcgccctaatagtgataactccggtattgaacagggatggttgccgccgctgactgcgattgatcgcattgaagtggtgcgcggaccgatgtcttcactgtatggttcggatgccatgggcggggttatcaatattatcacgcggaaagcgcagggtgagtggcatgcgagcgtccggacagatgcaaccattaccgaacgcaaagacagcggtaacaccgggcagggcagcttctttgccgccggtccgctggtggataacctgctgagcatgaaagtgaatggccagtattcccatcgcggtgaagataatttcgcgaacggttttaaccgtcagatcatgaccagcggcggcggtacactgacattaacgccggatgagcagaacagcatcgattttgatttcaaaaaagataatcagcaccgcgattcccgtctcgggaaaagtgcctctgcgcgcagcaaagaaagcagcttcagtaagtatgagatgtcgcagtatgcgattacccatgacggtaactatgactggggcagcatgaacagctatgttcagcgtaatgaaaccaaaaacccgggccgtaatatggaatattacgacaccattgcccgtaaccagacggttatgccgctcggcgatcatatgctgagcctcggcggtcagtaccgtttcgaagagctgaaagatcagggcaataaattagccggcaataaacttgatcgctacagttgggcactgtttgcagaggatgactgggcgctgaccaatgatttcaccctgaccggtggtctgcgtatggacaaggatgaaaactttggtacgcactggacaccgcgtgtttacggcgtgtggcatctggatgagagctggacagtgaaaggtggtgtgtccaccggttaccgctcaccggatctgcgtcaggcaacggcatcctggggacaggtgaccggcggcggcagtctgaacggtgttattttcggtaacccggatctgaaaccggagaaaagtgtcaccgaagagatcagtgtgctgtggaacaatcaggataacctcaatatgagcctgaccgtctttaacactgactttaaagacaagatcacagaaatccgccgttgcggtacaggaaccaatattatctgtacggaaaaagatccggataacagagattacgattttatcagtgatcgtatcaacgtcgataaagccaatatgcgtggtgtggaagcgattatgaactggcagattgtggaatctgtggatctgacagcgaactatactttcaccgattccgaacagaagagtggtgctttcaaaggaaaagcgctgaacaaaatgccgaaacatatggctaacgcgacactgaactgggataccacgcaggatatcaaaacctggagccggattaacttccgcggcaaaacctccgattacctgtcccgcaccagtatggcaacaggtaccggttcttatgccactgtggatgtcggcggcagctatcagctgaataaagacctgaactttgtggctggtgtgtataacgtgctggatcgccgtatcaataatgaaaactacggtgccacacttgacggccgtcgttacaatatcggtctgaattataacttctgatgtaaccatcattcattattatgtgtcgaaacacggcgtccttttcagggcgtcgtgtttttttatggcaggcagagtgactggaaaatacacgaacagccggattttttaacgtttcagctataaatattcaaagtttcatcacagaaattctgccggtaaagcagtatgtaaaaaaattaccggatcagggcgaacaaagcttgaaatttatgactgaggggtgcagaatgcgccatccaaaaaaataactgatgcatttatacgcatcggtttttttttgcactaaaatattgtcaccgacaaaaaaaaggggccgataggccggataactgtttactgaattacaccggacgataaacaccggtatgaggatgcgataaatggcgcaatttttcacttttgcacctgtgccaatcggcgctggctgctgcaacgacgactacggagcacggcgctcctgctcagcactccaaaccccttcttacttcactgcctacaggcagatgcgaagtcttcccggtaacacgccatctgatagtagtatcagtatgattgtcggtgttacgggaggattcgctcatgtcggataataccgccctcgatattggcctgaaccgtacagctgccaataaccgcgtacaactcgcaaaaacacttaccctcgttcaggttgtcatgatggggcttgcgtacctgcagccgatgactatctttgatacgttcgggattgtgtccgaaattaccagcggtcatgttgcgacctcttatgctatcgcactgacagccattctttttactgcgctgagttacggaaaactggttaaacggttcccgtccgcaggctcggcgtatacttatgcccagaaatccatgagtccgcatatcggctttatggttggctggtcatcgctgctggactacctgttcatgccgatgatcaacattctgctggcaaaaatttatcttcaggcaatcttccctgactgtccgccatggattttcgttgcgggtctggttttcctgatgacattatttaacctgcgcggcatcaatgtcgtggcaaacctcaataccgggattgtactggtacaggttgctgtgatgattgtgtttgtcggtctgctggtccgtggtgtgtctgcgggtgaaggggcgggtacgctgctctccttccgtccgtttgcctccattgatgcggaactgatcccgatgataagcggggcgaccatactgtgcttctccttcttaggatttgacggtatcagctcactgtcagaagaaacaccgaatgccgggaaagtgatcccgaaagcgattttcctgaccgcactgattggtggtctgatctttatcgcggtgtcttatttcctgcagctctatttcccggatgtgtcccgtttcaacaatccggaagagtcacagcctgaaattatgtacatggtggccggtgccttcttccagtccatcattctggtgttctcctgcgtaaccgtactggcttccggtatggcggcacaggcaggggtatcccgtctgatgtatgtgatgggccgtgacggcgtgttcccggagaaattcttcggctacgtgcatccgaaatggcgtaccccggcactgaacgtgctgctggtgggtgtgctggcgctgagtgcagtctggtttgatctggttaccgcaaccgcgctgattaacttcggggcactggtggcgttcaccttcgtcaacctgtctgtgatttcacagttctacatccgcgagcgccgtaacaagacgctgggcgaccagatcaattatctgctgctgccgattatcggtgccgcgacagtgaccgtgctctggttcaacctcgatgcgaaatcgatggaactgggtctgagctggggcgcgctgggtcttatctatatgttatggctgacccgccgtttccgccgtccgatgccgcagatgccggaacagtaagtctttaagcagttatgtcgtgaaaacggcgcacagtttgattctgtgcgccgtttttttatgtgtaatcgcgtatagtaacctgctgaaagtatagaaaatgataataattaagggatgcggatgtatattgagcacagtctgatagcagactatttttatgcgggactggcactgctggtcatcgcctcttttgtggcagggtatattgattccattgccggcggtgcagggctgattctgatccccgcctttatgctgaccggtctgccgccgcatatggcgctgggacaggaaaaactggtgagctctgtcggtacgctggcggctatttctaatttcatcaaaaacaaatcggtttactggcagataattccggccgggattatttcatcattcttcggggcctgggtgggcgcgaaagcgattatatatctgccgtctgaaacgattacctatattattatctgtatgctgccgatcggcctgctggcggccttttttaaggggaagctcggcggtgcgcaacagggcagcgccgtacggaaatccgtatggctggtctttttcacctgctttattgtcggtttctatgacggctttttcgggccgggtaccggtagtatctttattatctgtctgtttctgatcaataacctcgatttactgaaatcctccgccacttcaaaaatctttaacctggcgtcgaatgttggcggactggtcgcctttattatggccggacatatcgcgtttctgctcagtatcccgatgattgccgccagtctgctcgggaatcacctcggcagtcagcatgctatcagcaccaacggagaaattgtccgtaaaatcctgatcctgacagtcgggattatgatggtgacgctgctgatcaacctgttcagttaagccggattcgtggttaatctgttaaatttgttaaaaatagtatttgtattataaataaaataaggggcataataattacttagcgaactataagtaacctgagcgggggaatgtatgatcaacagtcagcaacctgacggcgcacgtcttattcagacactgaccgatattgtcagtcacaaacacattttaacagagccgcgtaaaacggagcgataccgcaaaggtttccgttccggagagggcagcgcgctggcggtggtgttcccgggcacgctgtatgaactgtggcaggtgtttaaagccgctgttgaagctgacagaattgtgatcatgcaggcggccaataccggtctgaccgaaggctccaccccgagcggggatgattatgaccgcgaaattatcattatcagcacactgcgtctggataaaattcaggtactgacaaaacagcagcaggtggtggcactgccgggcagtaccctgtggcatctggaaaaagtcctgaaaccgctgggccgtgagccgcattccgtcattggttcttcctgtatcggggcttccgtggttggcgggatttgtaataattccggcggttctctggtgcagcgcggtcccgcttataccgaactggcgctgtacggccgcgtgaatgcggacggcagcgcagagctggttaaccatctggggattgatttgggatccacgccggaagagattctgaattgtctggaataccggcagtatcaggatgcggatattgaggacacggataaaccggcctctgaccatgattatcatcagcgtatccgtgatgtggatgcggacaccccgtcccgtttcaacgccgatgaacgccgcctgtttgaagcctccggctgtgccggtaagctggtggtgtttgcggtgcgccttgataccttcccgtctcagggagagagcaaagttttctatatcggcaccaatacgccttcggtgctggaagacatccgccgtcatattctcgcggagtttgagcatctgccggtggccggtgaatatatgcaccgcgaatgttatgacatcgcaaaagtctacggcaaagacagcttcctgatgattgataaactcggcactgaaaaaatgccgaagctgttcacaatcaaagggcggatggatgctgttttcaataaaatcccgctgctgccgaaaaatctgattgaccgcacaatgcagttattcagtcatctgtggccgaaccatctgccgcgccggatggaagagtaccgtgataaatatgagcatcacctgatgctgaaaatggccggagaggggatcgatgaagcccgccgctggctgagcactttctttgacaatgcagagggtgctttctttgagtgtgatgccaaagagggggcggatgctttcctgcaccgctttgtggccgccggtgccgccatccgctatcacgcggtcaacagcagcaaagtggaagatatcctcgcactggatattgcactgcgccgtaatgatcaggcgtggctggaagttctgccgcccgaaattgagagcaaactggtgcataaactctactacggacattttttatgccacgttttccatcaggactatattgtgaagaaaggcgtggatccgcatgcgctgaaagaggaaatgctggaaatcctcaacatgcgcggggcggaatatccggcagagcataatgtcggccatctgtataaagccaaaccacagctgaaagccttctataaagctaccgatccgaccaacaccctgaacccgggactgggcaaaaccagtaaattaaaatattggggggaagggcacgaaggatgtggctgcagtcagcatcagaagtgatctttcaggtgaacaaaaaatccggttatggctgtaaccggatttttttactcgctttccgtataaatcagtaatgttaataagggattaaattcactataatcagcttttctccctgtttactgatgattatgtttaaaagactcaaaaatgccttcggcaaagcggttccggtcaaatgccataaagcagaggtgctgcataacctcagcacggatgagcgcgcgttgattgtgtatatcctgaatgcccgtgatgaaaatgtcagtatcggcattaagcacagcagtgcggattcactgatcaccaaaggggtgctgaaagaattagggcgggatacagagagccgcacgcggctggtctctgtttgtccgaagtacagggaatccctgtgccgggtgttctataccgcgaataaagcgggatgattttaccgccggggggctccctcccggcggtctgttctgattactgcgccaggtgctgcgcgtactgcaccagcttcttcagtaattctgtcttgttcgcatcatgctgatattcctgcatcatttcaccaatctgctcaaaataacgggttaaattatcctgattaaagacctcacggcgatgggcaagccagcgctgctgctcatgttcatccagtgtgccggggaaattccgggcgcggtagcggaacagtaactccggcagacgggcatcctggtaactcagtgccagtgccggcagatttttcggatctgtttcgcggataatcgtcatagccgctttatccgaatcactgaaaaagccctgataaatcatgcgatccacatcattctgtggcggaaactcacgcggttgtgcaaaaacagccacgactttctcgcggatctccggatgctgatgcagcaactctgcattacgggcacagaggtctttatccagtccgatacgctgtgcatcctgcgggcgcagggtattttccggtgccaggatcgggcacttattgatatgcaccagtttgagcggtaccggggacgcgccttccggcagttcatcccggcgggtgtacaggtgttcgcgcagggtatctgcatccagcgtcagcagcggggtcaggtcaccggcaaggtcacacataatcacggcattgcggttatccggatgccatgccagcggggccaccaggctggtattggcacggacagccccgaacattccggagatatgcaccagcggtttcatggacggaatatcaatcagtgccgcgagtttgcgcttatcgcgcagactgaagaaataatcgaacagacgcggctgtgcaccacgcagctgttttgccatggcaatggtggcatacacatccgccatcgcatcgtgggcattttcatgggcgataccgttggcggcagtcaggtgttccagcttaaagctcggcagtccctcgtcattctccggccagtttgtaccgtccggacgcagcgcatagcaggcgcgggtgatatcgatcaggtcccagcgggaattgcggttcatccagctgtaggcatacgggtcgtaaaaattccggtagaaaatattacgggtgacttcatcatcaaaacgaatgctgttgtagccgagaatacaggtatccggctgtgtaaaggtgtcatgaatcagcttagcaaactgcgcttcattaatccctttctgcagggcttcctgcggcgtgatgccggttatcatcaccgctgcgggctgcggcagataatcatccgccggggcgcagtaggcgatcaccgggtcggcgataatattgaactcactgtctgtgcggacaccggcaaactgcgccgggcggtcaccggcaggatcctgaccgaaggtttcgtaatcgtgaaagaaaaattgtgctgaagacaccgtatagcccgttttctgataaatgatgggctacagggtagcaaatcggggaaaaaataccaatttcgccggtgaatgttccggagaacgggatagccgggtttcagcagaaaataacgggattttgtgcggaatttgcatctgctgaaacaattccgctcagaaatacgctacactgaagaaaaccgcagaaaaccggcggaattgcttgtcggcagtcatggttaacctgtattgtttaatgaatcacatttcagatatgactaagggtagaataatggacaacacaaccaagccttcctttcacaatgtcctggagttcgttcgtatgtttcgccgtaaaaacaaaatactgcgtgaaataactgacaacgaaaagaaaattcgtgataaccagaaacgtgtacttctgcttgataacctgagtgaatacatcaagccgggcatgtccattgaagatatccaggctatcattgccaatatgcgcagtgactatgaagatcgtgtggatgagtacattatcaagaatgcggatctgtcaaaagagcgccgtgaaatctccagagaactcaaagcgatgggcgatatcaaagatattaagtaatcgcacagactgaacagcagaaaccgtgaattgaatattcgcggtttttttaactgctctgaaattcttctgcccgccgttccaactcatacatataagatgttctggctttttcgtgcccgtcagggctcatgatgctgatgatttggatattgtcgtaatcaagccagtgtcttgaaaaaacaagataatgattggagtgcctgtcaatctgcgctttggtttttttccatccgggttctgatggtaaccggatatgcaatttatagacgaaagaatcgcacagtcttgaattactctcccactgaccttcattaccgaagcgatcgggtaaaacccgtgaatttttccacgtctctaaagccttagcgtaactgtttgcgatatccggcatctcgacatcagcatgaacactcactacgcaaggcatcagcgttgctcctataccggtaacttgagttttttgtgctcagctgcaatccaggcacgcacttcactgtcatccggcatacctgttaaatgcacggtattttcagggggggcactctgctcaatgagtgacaacgtatctctgaggatgaattcactctgtgccactgcccggccgaagcggagcaggtcagctttatattttgtctgttgtttcaggtcacccgggaaagttttactgagattgtcatctgtcataacaagccggatagcttctttcacacgcatatgatgtttaagtccatcggtacacagacgtttcattcgtggagtgaatgtaaaaagggcaccttttccccggttttgtctgtcctgcacgacggcattcagaagtgagcgctgacgttcattgatctgattcaggtaatcagcagcctcttcaagaggcaggaaaaccacacctccggggaggttaaatgtgagagaggcagccacaccatggtttgcactgatttccacagcagttgcaggcagagtggtgctctgagcagggaccggagcgagcgaagccataaggcttgccacgatcgccgtaacagttgtctgggttgtctttttcaccatacagtctctcctgtaacaccagagtcactgacgggcaggactctcaaaacgtcaccagtataatagaaagtaactcccgtataaagaaccatcagtttgccggtattaatgagaaataaaaaaatggctcccggggggagccattttcagttcagtgcggattatcagagcagggtttttgacggctctgatgcagcatggttggtggccgcatgaccgcctgcaccgtgcagcgcataggcttcacgggcttcacgctgatactcagtgataacaaaggcttcgccggtagttgccggagcaggggctttcgtcatcggtgaataagcatgacggccggcagcaacgacagttgtttcagtaaccggagccgcaaccggtgcggtaacaggttcagtcacaacaaccgcctcaggctctgcaatcacttccggttctgcaacaacaaccggtgcaacaggttctgtgacagcaaccgtctcagtaacaatcacgtcagtcacaacaggctcatcagcgataacgtcagccgtttcctgtacaggctcttctgccggtacagattcagtgacagtatccgcaaccggtgtttcttccggagcagtgacctgaggcgcctcagacgcgacagtcagagagaactgctctgccacaacggtggtttctgtagtttcagtcatcacctgagcaacaacagcggtttctgtaatcacagctgttgtttcggtgatttccggtgtctcagctgcgatttcctgttctgcctgtgcagcaggtgtcacaaccggatactggatccacactttaccggaagccagttcaggggagaatacagccatttccagcggaaccggagactgcgtcagctgacggtcttcacggtaacggcggcggcgctgaccactcacacgcagatgacgtggtgaacgacgggagcggcgcggcaggatgttatcgctgtgtgcctcatcaccattattttcagccgctgccggtacgtcggtatccgcaggaactgccactggtgcattatcgataacaaccggaaccggtgctgcaacagccggtttagtctgtgtttcaccatcagtgatacggacagaaccgttcagctgacggcgggtacggcgctgacgaaccggcgtcggtgcatcatcatcttccgtattgccgtcattgttcagtgcatcctgatcttcctgctgggcacgcagttttttcgcatcctgctggacacgtttttcgtcctgacggcggcgctgacgctctgcacgctgttcacggcgtaactgctgctgtgcttcgcgggcggccagctcttccggtgtcagatcttcgttcggtgtattctgattacggcctttacgcggctcattcacagtatcgcgatcgcgtttgttgcgcgattcgttatcactgcgttcactgcgctcagggcggtcagtacgctcggtacgttcgccgttgcgatcattacggtcacggcggttacggcgctgtttgttacgatcattcccgccgcggcggttgttgtcgttagtctgttttttctctttctgttcagtttcttccggtacagcaggtgcagagccgaacagttttttgatgagacggctgaagaaaccaccttcagaagccgcaggtgcctgcttgtcctgacggttatcgcgcttgctttccggtttgcgggcagcggcagtctgtgccggtaccggtgcatcggaggtgatagcaaaggcattgatagccggttgttccggtgcccggcgttcctgagtttcctcttcttcaccggcagcggattccgcttcgtatttctccggcaggcggtagctcagggtaccgatttcatcacctttacggacacggaccacacggaagtgcggggtttccatctggttgttcggcacgataatcacgctgacaccggcctgacgtgcttcaatcgcactgacagcctggcgtttttcgttcagcagataagaggcgaccggcaccggtacaatcgcgtgtacctgatgagtgttctctttcagcgcttcttcttcaatcagacgcagaatggagagcgccagtgattcgttatcacgcacagtcccggtgccgctgcatcgcggacacacatgatggcttgattcacccagtgacgggctcagacgctgacgggacatctccagcagaccaaagcgggaaatgcggccaatctgaatacgggcgcgatcctgacggacagcttcgcgcatgcggttttccacttcgcgctgatgacggaccggagtcatatcgataaagtcgataacaatcaggccgccgaggtcacgcagacgcagctgacgggcgatttcatccgccgcttccaggttggtgttaaaggcagtttcttcgatatcaccgccgcgcgttgagcgggaggagttgatatcgatagcggtcagtgcttcggtggtgtcgataacaatcgcaccgccggacggcagacggacttcgcgctggaaagcggattcaatctgcgactcaatctgatagtgactgaacagcggcacttcgccctggtacagtttaattttgctggcaaagtccgcacgaccgatagcggtgatgtgcttgcgtgccagttccagaattttcggattatcgatgaggatttcaccgatatccgggcgcaggtaatcacggaacgcacggacgataacattactttcctgatggatcaggaacggagcagggcggccttcagcaacttttttgatggcttcccagtgcttgatacggtactcgagatcccagcgcagggcatcggctgatttaccgacaccggcggtgcggacaatcagacccattccgtccgggatatccagggcagacagggcttctttcagctcggtgcggtcatccccttcgatacggcgggagatccccccggcacgcggggtattcggcatcagaaccagatagctgccggccaggctgataaaagtggtgagtgccgcgcctttattaccgcgctcttctttgtccacctgaacaatgacttcctgaccttctctcaggacatctttgatattcgggcggccggaagcgtggtaattagcagggaaatactcgcgggcaatttctttgacgggaaggaaaccgtgacgctctgcgccatagtcaacaaaagcagcttctaaactcggttcaatacgggtgattttccctttatagatgtttgcttttttttgttcgtgaccggggctttcgatatccagatcatacaagcgctgcccgtcgacaagggcaacacgcaactcttcctgctgagttgcgttgattaacattcttttcattataagttactcaatttttttcatttaattagtgcgctgcgggcaatttcgttgctaccggaaccgatgacctcgtggcttttaccgcaccgtcagcctcccggctgtcgatcgtatagaggtgcaaattgtgtcggtgaggttcagtcttgtctgaatccccgttgccggctgaaaatcacgtttatacgcgataccggcccggtaagctgcaacccgcagcccgctgattatctgaccggaaataacgtcttacgccattgctgcgttgtcatcggtcagacaaagataaaatatcanagttttgccaaaatcggcgcatgcattattccattgccggtgtggttatagcaaggtgacattgcatgtttcggtgaaaattatgcagaaatttgttaatgacgttaatccttggtctttttccggaaaaaatgggaaaatagccgcgtaaaacattgatgcacatttgccgcctgtttcaccggaaaaatgtaccggtttacggagcaacggttcagaggatagccccccgtttcatgaaaactgataatcagacagttcaatttgttgttgtgtccggcgatgaagccggccagcgtattgataattttctgctcgcgcgccttaaaggggtgccgaagagcatgatttaccgcatcatccgtaaaggggaagtgcgtgtcaataaaggccggattaagccggaatacaaaatcgcggacggggacagcatccgtatcccgccggtgcgtgtggctgagaaaaacgatgccccggtgtcggcgaaactggataaggtttctgcactcgcagagtgcgtattgtatgaagatgatcatattctggtgattaataaaccggcgggtacggcggtacacggcggcagcggtctgagtttcggtgtgattgaggcgatgcgcgcactgcgtccggaggcgcgtttcctggaactggtacaccggcttgaccgcgatacctccggtattctgctgatcgccaaaaaacgttccgtgctgcgggcactgcacgagcagctgcgtctgaaacagatgcagaaagattatctggcactggtgcgcggccagtggcaatcctcagtaaaagtggtgcaggctccgctgctgaaaaatattctccagagcggcgagcgcgtggtgaaagtcagcccggaaggcaagccgtcggaaacacggtttaaagtggaagagcggtttgactctgccacgctggtcaaagccagtccggtgaccgggcgcacacatcagatccgtgtgcacacgttgcacgcggggcatccgatcgcgtttgataaccgctacggtgatgcgcagtttgatgctcagctgaaaggaacgggtcttaaccggctgtttttacatgcggcggcacttgcctttacccatccgtccaccggtgaggcgatgcgccttcaggcaccgctggatgaaaaactgcgccattgcctgacggtactgcggtcgaaacaggcaaaataagcagagcacagaaataaagaacccgcgctgataaacgcgggttttttcttatacagaaggtattctgcggttactgcggctgtacaccgataatctttgtggtacagctctgtgcaatctcaccgatcgcctgagagtcctgttcggtcagtgcctgacctttgcggacctggtcatccagtttttccagcccgtctttgccgaatttcgccagtgcgttgtcatacacacactcacagaccgccgggactttgctgcggttctccgggtttttcaggttggtcacagcgccttttgtacagtcggcaacaaaggttgttttatccgccagtgacggggcagccagaccggcagcactgaacagcagcgttgcggcagcgatcattttcagcttcatgtcagttcctcagaatcatcagatgccccggcgtgtgtcagcgggggatccgcagtgggttgtatccggcctgaatcagtaattctgtcaggcggatcagcggtaaacctatcagtgtattagggtcatctccctgaagttttttaaataaggcgattcctaaaccttcagatttaaagcttccggcacactgatagggtgtttccgccagcagataggcacggatttcgtcatcatccagtgtacggaaatgcacacagtaaggttcacatatcgtgtgatcttccccggtggcgctgttatacaggctcagcccggtataaaaggtgatgcactgaccggaggctttgcgcagttgtgcaaaggcggcatcgtaatgatgcggcttaccggtgatttccccgtccagcacacagacctgatcagagccgataatcagactgtcagggtactgctgcgttaatgaacgggccttttcacgcgccaggcgcatgaccagcgactgtgcgtcttctgccggatgcggggtttcatccgtacccggggctgcggatacaaacgggatgccgagtttttccagcagggctttgcggtacagggaggtggaggcgagaaccagtgagatcataaatattccgaaagtcgtggtaaaaagaataaactcattctaaactatgcgccgcttattgagtgtatttttagcgggaaggcaggttaccgccctctttgctgtctatattttctttgactatatcgtcttacgaatataagatgcgcgccttatgcaaaagataaaattacctctgactattgatgcaaagcgcgccgcgcagaagcgtctggattaccgggggtgctatgcacctgagcaggttacgcggttagccgaatcggtagtcagtgtggacagcgatgttgatgttgatttgacgtttgaaatcgatccgcagcgtctgacagtcattaagggaacagcagaaactgatgtttcacttgagtgtcagcggtgtggtaatatcttcccgcttcatgtccgcgcaacgtattgtttcagcccggttgtcagcgatgaacaggctgaggcattaccggaagagtatgagccaattgacgtaaatgattttggtgagacagatttactggcaatgattgaagatgaattaattctttctctgcctgtggttccggtacatgattctgaacactgtgaagtgtccgacgcggtgaaagtctttggtgagcttcctccggaagcagaaaagccaaatccgtttgccgcattagccagtttaaagaaaagtacttaaggagtaaggtcaatggccgtacaacaaaataaaccaactcgttccaaacgtggtatgcgtcgctctcatgacgcactgtcagcaactctggtttctgttgacaaaacctctggtgaaactcatctgcgccaccatgtgaccgctgatggttactaccgtggtcgtaaggtaatcaacaagtaatctgctgctttttaagcacgttgatatcttgactaatctaaccatcgcgttagatgccatgggtggggatatcggcccccatgtcacagtgcctgcctcgctgcaggcactggcatctaatccaaagctcaccctgttgctggtcgggcaccctgattccatttctcctctgcttgcaaaccagaatgctgagctgctcagtcgtctgcgggtgatccctgcctatgagacgattgccggtgatgccaaaccttctcaggctatccgccagagcaaaggcacatccatgcgtattgcgctggaactggtgaaagagggggaggcacaggcgtgcgtcagtgccggaaacaccggggcgctgatggggctggcgaaactgatgctgaaatcgattgaaggcatcgagcgtcccgcactgatgaccgtggtgccgaatcagaagaaaggcaaaacggtgctgcttgatctgggcgcaaatgcggagtgcagcagcgagatgctggtgcagtttgctgttatgggcgcggtgatggcagaagatgtggccgggatcccgcatccgcgtgtggcattactgaacatcggcgaagaagaaaccaagggactcgacaatatccgcgaagcagccactgtgctgaaatcgataccggacatcaattatatcggctatgcagaaggcaacgaactgctgaccggtaaaaccgatgtgctggtctgtgacggcttcgcgggtaacgttaccctgaaaaccatggaaggggtgattcgtgtgatcctttctatgtttaaatcacaaaatgaaggcaaatcctcatccctgctgtacaaacttgtgaagaaagtggtgacaaaatggctgaataaacgcttcagccacctgaaccccgaccagtataacggtgcttctctgttaggattacgcggcattgtgattaagagtcacggtgcggcgaatgtaagtgcattcaacgctgccataacgcaggcggttcagactgttgaaaagcaggtgcctgaacgaatcgcatcccgtctcgctatggtattacccaagagtaactaactaatatgtatacgaaaattttaggaaccgggagctatcttcctgcacaaatccgcacaaatgctgatctggaaaaaatggtcgacacaaccgatgagtggattgttactcgtacgggtatccgtgagcgccgtctggccggtgatgatgaaaccgttgttacaatgggccaccaggcagcactgaacgcactggatatggcgggtattcctgccggtgatatcgatctgattgttgtgggcaccacttcttccacgcacggtttcccgagtgcggcctgtgaaatccagaaactgctgggcattgacagctgtatctcctttgatgtggcggcggcgtgtgccggtttcagctatgccatcagtgtggtggatcagttcattaaaaccgggatggcgaaaaaagccctggtgatcggttcggatgtgctggcgaaaacgctggatccggcagatcgcggtacggttatcctgtttggtgacggcgcaggtgcctttgtggttgaagcctcagaagagccgggcattctctccacccatttacatgcagacggccgttacggcgaccttctgacattaccgaataaagatcgcaaagacagcgaaaaaccggcgtacctgacaatggcaggtaacgaggtgttccgtgtggcggtccgtgaattagccaacgtcgttgaagaagcgctggtggcgaacaatattgataaatcagaactcgactggctggtgccgcctcaggcaaacctgcgcattatcagtgccacagcaaaaaaattaaatatgggcatggataaagtggtggttaccctggatcgtcacggcaacacctctgcagcctctgtaccgactgcattcgacgaagcggttcgtgacgggcgcatcaaacgcggtcagctgattctgattgaagccttcggcggcggttttgcctggggttctgcattaattcgtttttaatttttcaggaagctaaatcatgtctgcatatgcaatggtatttccgggacagggttctcagtcagtcggtatgctggcggacctcgcggcaaattttccggtcgttgaggcaacctttgccgaagcatccgctgaactgggctacgatttatgggcactcgttcagaacgggccggaagaagaactgaataaaacctggcagacccagcctgcactgctggcggcctctgtggccatctggcgtgtctggcaggaaaaaaacggcgccatgcctgccatgatggccggtcacagcctgggggaatactccgcgctggtgtgtgccggtgtgatggattttaaagaagctatcaaactggtggaattacgcggccgcctgatgcaggaagccgttccggccggcaccggggcaatgtatgccatcatcggtctggaaaatgatgctatcgccaaagcctgtgaagaagctgcacaggggcaggtggtatcaccggttaactttaactcgccgggccaggtggttatcgccggtgagaaagacgccgttgagcgtgccggggcattatgtaaggaagccggggcaaaacgtgcactgccgttgtcggtcagtgtgccgtcacattgtgcattaatgaagccggctgctgataaattagccgttgcgctaaaaaatatcacatttaatacaccaatcttttctgttgtgaacaatgttgatgttaagatagagacttccgccgatgcaattcgtgatgcattagtccgtcagctttataatccggtacgctggaccgaaactgttgagtttatggccgcgcagggtattgaagatctgctggaagcagggccgggtaaagtactgaccgggctgactaagcgtattgtgaaaacattaacatcatctgctgtcaatgatatgtcatcattagaaacagcacttgaaaatcgctgaggttgagatgagctttgaaggcaaaattgcccttgtcaccggtgcgagccgcggaatcggccgtgcaattgctgagaaattagcagcacgcggtgcaactgtgattggtactgcaaccagcgaaagcggtgcggctgctatcagtgaatacttaggcgcaaagggtaaaggccttgccctgaacgtgaccgatagcgcatccattgaccatgtattagaaaatattcgcgctgagtttggcgaaattgatattttggttaataatgcaggtatcacacgtgacaacttactgatgcgtatgaaggacgatgagtggcaggatatcctcgacactaacctttcatccgtattccgtctgtccaaagcggttatgcgcgccatgatgaaaaaacgttgcgggcgcatcatcaccatcggttctgttgtcggaacgatggggaacgccggacaggctaactatgcggcggcgaaagccgggctgattggtttcagtaaatcactcgcccgtgaagtcgcgtcgcgcggcattaccgtcaacgtcgttgccccgggttttatcgaaaccgatatgactcgtgcattgacagacgaccagcgtgcaggcattttatctcaggttcctgctaaccgtttgggtgatgctgaagagattgccagtgctgtagccttcttagcttctgatgaagcggcttacatcacaggcgagacattgcatgtcaatggtggcatgtacatgatttaatgtttgagctaaccatttgccgtttttgtgtaaacacacgcaaaagtgagtatttatatggttagaccagccgggattgggttgcatcttttcctgtattttataaactacgaaaaccatcgcatatagcgagttttgataggaaatttaatagtatgagcgctatcgaagaacgtgttaagaaaatcatcgttgaacaactgggtgttaaagaggaagaagtaaaaaacgaagcttcattcgttgatgacttaggcgctgattctcttgacacagttgagctggtgatggctctggaagaagagttcgacatcgaaatcccagacgaagaagcagaaaaaatcacaactgtacaggctgctattgactacgttgagaacgcaggcaagtaagcatccctcatgtccaggcggtcatccgaccgccttgtttcttttattttccccccggaggataagcgtgtctgagcgtcgtgtagtcgtgaccggacttggcatgttatctcctgtcggtaatacagtcgattcatcctggaaagctgtgtgtgccgggcagagtggtatcagcctgattgatcattttgacacctctaaccatgcgaccaaattcgcaggtatggtaaaagatttcaatcacgaagattttaatatttcgcgcaaagatgcccggaagatggatctcttcattcaatacggtattgcagccggtatccaggcaattgcggattccggaatcgaagtaacagaagccaatgcaacccgtatcggagctgcgattggttctggtattggtggtctcggactgattgaagaaaactgcagctctctggctgccggcggcccgcgtaaagtgagcccgttctttgttccctcaactatcatcaatatggttgccggacacttaagtattatgtacggcctgcgcggaccaagcatttccattgccactgcctgtacatccggcgtgcataacattggtcatgctgcccggatcatcgcttacggtgatgcggatgtgatggttgccggtggtactgaaaaagccagcacaccattaggtgttgccgggttcggtgctgcgcgtgccttatccaccaataatgacaatcctcagggcgcaagccgtccgtgggataaagatcgtgacgggtttgtgctcggtgacggtgccggtatgctggtgctggaagagtacgaacacgcgaaaaaccgcggtgcgaaaatctatgcggaactggtcggtttcgggatgagcagcgatgcttatcacatgacatcaccaccggaaaacggtgacggtgccgcactggccatggcaaacgcgattcaggatgccggtattcctgctgacagcatcggctatatcaatgcgcacggcacatccacctctgcgggtgatgtggcggaagcgaaagccgttgaaacggtatttggtgaaggaacaaacgttctggtcagttccaccaaatccatgaccggtcacctgctgggtgctgccggtgcagtggaatccattttcaccattctggcactgcgtgatcagattgtaccgccgaccatcaacctggataatcaggatgaagcggtctgcaaactcgactttgtaccgggcaaagcccgcaaagtggaaggtatggaatacgcactctgtaactctttcggcttcggcggcaccaacggttccctgattttccgtaagatctgagtctgttttctgagagaaaagcgcctgacggcgctttttttttacctgacgggtgacgctatcgcagttttgcacaaaaatcacagctgtactattatacaggtctgtccgcatactgagtgacggttaaataataaccgttaaaacaatgagttggctatgacacaacagacgcattactggatcaatggtgtaccgcagcacaccattgcgatttctgatcgcagtgtgcagtttggtgacggttgttttaccacgatgcgtattgtgaacagcaaaccgtcgctgctgtcacgccatctgaaccggctgaacagcggttgtaccgggctggggctgacgccgccggatgacgcgctgctgactcagtggataatgcaggccgcagagggtacagcggatggcgtgctgaaagtgattgtttccgccggtgagcaggggcgcggttatctgcgtgcggatgtatcgccgctggtgattctgatccgttctgcttacccggaaagctatccggcattgcaggatcgcgggttatcggtggtgaaaagcccggtgccgttgtcggtcaatccgtatctggctggtatcaaacacctgaaccggctggagcaggtgctgatccgccgttatacggcagaacagcaggccgatgaatccattgtctgtgatactgacggcattctgaccgaagggtgcagcgccaatctgttctggcgctgcggtgatgatgtgtttaccccgtcactgcgcaaatgcggcgtggccggtgtgatgcgcgcgcatatcatggatgtgctgaaaggcagccgttaccgctgttatgaaaccgaacgttttccgcaggtgctggcaaaagcggatgaagtgattatgtgcaacgcgctgatgccggtcatgccggtcaatgatatccgcgcggatgcccgtcatcactggcattatacctcccgctcactctttacctggcttttgccgcattgtccggcagcaataccctgaattaacagagttaatgactgatgaaaaaaacacggattttccttgtgacatttttggtgctgcttgcggttgcgggcggcgtggcgtactggctttatcatcaggtgaacgcattttccggacaaaaaatctctgtcactgaagagaccattttcaccattccgccgggcaccggccgtgtggcgctggagaaaaaactggcggaaagcgggattatcccggaatcacacaattatgactggctgctgcaactggagccggatctggcaaaaatcaaagccggtacttaccgcctgacgccggatatgacggtcaaaagcatgctgcaactgtttgtcagcggtaaagaggcgcaattcagtatccgttttgtggaaggcagtaaattagcggactggcagaaaattttgtcagaagcgccttacctgaaacagaccctcgcggatttaccggcagataaactgacagaaatgctcggcctgccggccggcagccatctggaagggcgtttctacccggatacctatctctatacagcgggaacggaagacacgcaaatcctgaagcgggcacatcagcagatggaaaccaaactcgcggcagcctggaagacccgtaacaccgacttaccgtatgccgatccgtatgagatgctgatcatggcctcgctgattgaaaaagagaccggtgtggacggcgaacgtaaaaaagtggcgtcggtctttatgaaccggctgaaactgaaaatgcgcctgcaaaccgacccgacggtaatttacggcatgggtgagcgttatcagggcacgatttaccgcagcgacctggcgcgggcaacgccgtataatacctatcagatcgacggcatgccgccgacgcctatcgccatgccgggcagtgcctcgctggatgcggcagccaaaccggacaccaccggttacctttactttgtcgcagacggcaaaggcggacatgtatttaccacgaatctgcgggatcacaaccgggcggttgcggattaccgtaacggattaaaaaaacaatgacaggcaaatttattgtaattgaagggcttgaaggtgccgggaaaaccacggcacgtcaggtgattgttgatacgctgcgtgaaaacggcatcactgacctggtctatacccgcgaaccgggcggcacaccgctggcagaaaaactgcgtaccctgattaaagacgggatcgacggcgaaacggtcactgataaagcggaagtactgatgttatatgccgcacgtattcagctggtggataatgttatcaaaccggcactggcgcgcggacaatgggtgatcggcgaccgccatgatctctcctctcaggcctatcagggcggcggacgcggtatcgaccgcaaactgatggagtcactgcgtgataccgtactgggggatttttatcctgacttcaccctgtatctcgatctgccgccggaaaccggcctggcgcgtgcccgcagccggggcgagctggacagaattgaacaggaatcactggatttcttccgccgcacccgggcccgttatcttgagctggctgaatccgatccgcgtattgtgaccgttgatgcttcgcagtcaatggataacgtccatcaatcaatccgtactgccgtactgaactggctggcacagcaggaagaggcgtaatgaactggtatccgtggcttaatccggtttaccgccagctggcaaccgcgtggatgtccggtcaggggcatcatgctctgctgctgtacggcatgcccggcaccggcactgatgaactggcctatgccctgacacggctgcggatgtgtcagcagccgcagggcatcaaaagctgcggggagtgccacagctgtaaactgatgctggccggcacccatccggatttttatctgttacagccggaaaagggcaaatccgctatcgggattgatgctgtgagagccgtgacagaaaaactgtatgagcacgcccagcagagtggtgccaaactggtgcatattccgcaggcagaactgctgaccgaagcagccgccaacgccttactgaaaaccctggaagagccgacagagaatacctggtttgtgttgcaaagccagggaacggagcagttgctgccgacactgcgcagccgctgttttgcttatcacctggcaccgccgtcagcggagaccggtttacagtggttacagcgcgagcatccgcagtctgatgcggtgtcgcggcagacggcactgaatctttgccacaatgccccggcggcggcactgtcactgctgaccaccaccgactggcagaaccggctgaatctgtttacccggctggcagaatctgtgcgcagcggggattttctgtcgctgttatctgaactgaatcatcaggatgcggaaaagcgcatcagctggctgaccaccctgtttatggatgcggtaaaatatcagcagaatatggcacctgcctgtctgaatcaggaccagtctgttcttattgcacaactggcagcgcattacagcagcgcacacttactgaatgcagcggaaagctggctgacctgccgccaccggctgatgatcatcaccggcgtgaatcaggaactgctgctgacagaacaattgttacaccaggaaaccctgttttctgcatcacctaatttaaaataatgagttaattatgtttttagtagattcccattgccacctcgattgccttgattatgaaaaaaagcatgaaagtgtggatgatgttatgcaaaaggccgcgcagcgagatgtgaaatacgcactggcggtagcgacaaccctgccgggttacacaaaaatgcgtgagctgattggtgagcgcccggatgtggccttttcctgtggtattcatccgctgaatctggatgagccgtatgatttcacacagctgcgtgaactggcggcggataaacgggtggtggccctcggcgaaaccgggctggattactactatcagaaagagaatgccgcgcttcagcgtgaggttttccgcgagcatatccgtatcggccgtgagctgaataaaccggtgattgtgcacacccgcgatgcccgtgaagatactctggcgattatccgcgaagaacaggccggggagtgcggcggcgtgttacactgctttaccgaagacaaagagacggcatcagcgctgctggatgaaggtttttatatctccttttccggtattgtgacgttccgcaatgcggagcagatccgcgaagccgcccgcattgtgccgctggatcgcattctggtggaaaccgattcgccgtatctggccccggtaccgtttcgcggcaaagagaaccagcccgcgtatgtgcgtgatgtggcggagtatatggctgtattaaaaggggtgagcgttgaggcgcttgctgagatcaccactgacaatttctgccgtctgtttcaggtgtctgtccggtaaatccgtacacatctgtcaggctgattaattacaggagcaggttatggccgaagaaactattttcagtaaaattattcgtcgtgaaattccgtctgatatcgtctatcaggatgacagcgtgacggcgttccgtgatatttccccgcaggcaccgacacatattctgattattcccaaccatcttattcctactgtgaatgatgtcacgccggaagatgaacaggttctgggtcatatgatcacggtcgcggccaaaatcgcacagcaggaaggtattgcggatgacggctaccgcctgatcatgaactgtaaccgccacggcggacaggaagtgttccatattcatatgcatctgctcggcggccatcatctggggccgatgctggcgaaataaccggctgacaggagaacggtgatgaaacgtcttttatgtgtgatagcgtcagtctggctgctcgccgggtgtccttcaacggcaccggtgacacctacggtgccggtgggtaccgtaacaccgccgccggataccacgccgccgccactgccgctgccgccgccggatacggtgccggttccgccgaaaatgaaaaaaatcgagtgggaacagagtattacaccgctggttaatcagatggttcacagcgacggcgtgaatcagggcagtacgctgctggtgaataaagtcggtaataaaaccaacagcagcctgcagaccagtgttgcgaccggtgcgctgatgaacaccatcggaaaaaccggggtactgaatgtgatcccggccggtgcggtcagcagtgccatgtcggtgctgggtatgggtgataacgacacactgaccctgcgcagcaaagctatcggtctggcgcgctatctgaatgccgactatgtgctgtacagtgtggtgaccggtacccgtgatgcccgtcagatggagatgcagctgatgtctgtcagcagcggtgaaatcatctggtccggtaagggcgcggtgcttgagcagtaaccgcgcgttactgttatgcctcgctgaacactttcccgcactgcctgccgccggctggacaatccgtccgctgaacgggctgacgcgggaaagtgtcagtattgaacaaaaaggtgtgtctctgattggcagagcacagaccgtgcacagtgcggatattggtgtcagccgtcagaaagaggcgcgtatcctgcaccggctgcgtgacagcggccttgccccgcgcgtggccgggttcagccacggctggctgcttttgtaccgggtggagggtgaaacactgccgccggaacggatgcagcaaccggactttatcccgcagctggcggcgctggtcagcaatctgcataatcagccgcttaccgggtatcgtctgccgctcaaagcgcaggcagaccgccactttcacctgaccgacaaacgccgccgcaccccgcagctgttgcgtatccatcgtcactttatgcgcgaagcagagcctcagccgctgaaactggcgcctgcacatatggatatccaccccggcaacattgtgacggcagcgggggagctgcatctgattgactgggaatatgccgctgataccgatatcggtctgtctctcgccacactttttcgtgccaatcactggtcattgacgttaattcacacttttctgcgttattattctgcttatcactgtccgcagcgcgtactggcgcagacctgccgctggcaggcacgggcagattatatgatggttatgtggttcgagagccgctggggacaaaccggcgacccgcagtttctgcaatacccggccgcgctgaaagccgccgccgggctcaggtaaatacaacgaggtttcatcatgggtcctgtaatgttagatgttgaagggtatgagctggacagcgaagagcgcgagatcctgcgccacccttcagtcgggggagtgattctctttacccgtaatttccatgacacggcacagctgcgtgaactgacgcgacagatccgtgaagccacccgcgacaaccgtgttgtgattgcggttgatcaggaaggcggccgcgttcagcggtttaaggaaggctttacccgcctgccggcggcacagtcttttgcacagtttaatgacctgctcaccggctctgcgctggcggaagaggcgggctggctgatggcggcggaaatgatcgccatggatattgatatcagtttcgcaccggtgctggatctggggcacggcagtgcggctatcggctcacgcgcgttccatgaagacggcgacattgcggcgcagatggcggaacgctttgtgcgcggtatgcgcagtgccgggatgtcgagtaccggtaaacacttcccgggacacggcgcggtcagtgccgattcccataaagaaacgccgcgtgatgagcgcgacccggcggtgatccgtggtaaagacatggcgattttccgtgaatttatccagcgcggcctgcttgatgcggtgatgcccgcccatgtgatctacacacagattgatgatcgtccggcgagcggttcatcctactggctgaaatcggtgctgcgccagcaactcggatttgacggggtgattttctccgatgacctgtcaatggaaggggcggcggtgatgggcggctatgcggagcgtggtcaggcatcactggatgcgggctgcgatatgatcctggtctgtaataaccgcaaaggtgctgtgactatccttgataatttgcctgttatcacggcacaacgtattgataagctgtatcatcggggtaaaggttatgatctggctgaactgcagcgcagtgagcgctggcagcaggcgaacaaaaccctatccgtattacacgaacaatggcaggagcgagcatgattatttatcttcatggatttgattcaaccagcccgggcaatcatgaaaaagtgatgcagctgaaatttgcggatccggatgtccgttttatcagttacagcacgcttcatccgcgttatgacatgaaatatctgctgactgaagtggataaagcggtaaaacagagcgaaggaccggccattgtgctgggtgtgggtctggggggcttctgggctgagcgtgtcggatatctgtgcgggatccgccaggtgatggtgaaccctaacctgttcccgtatgaaaatatggaaggcaaaatcgaccgcccggaagagtatctggatatcatgaccaagtgtatctcggatttccgcgagctgaaccggcagaactgcctggtgctgctgtcccgcaatgatgaggcgctggataaccagcgtgcgcatgacacgctgtcaccgtactatcaggttatctgggatgaagaacagacccacaaatttaaggatctgtcccgtcatctgcaggaaatcaaagggtttaaaaccgcgtttaaaaaagcctgataacaccgtctattcgtaaaacagccgcgcctgctgaaggcgcggtatttttttcccccgcaactgaagcgattcccatctcaaatctgcctttcctgtgatctttctcttacgtatctttccggtcgttgcgttatatcaataactttctggtgctgaatcagcaagataacaggcttttttcatctgcgggtgtgaaaagttaatccggtgattaaagaaagcatcagaggtaaaccaaaagtaaaatagttttgttaaatttaaaataatgtttgcatttttccgccggattacccagaatttgattatgatcaaatatggtatgaccaaattacctgttgtggtataccatggtgtgacacgattcagttttatctgatgttatctcactgtttttcctgaagagccctgagataacgttagattatttttcagaggatgttatgactacaccgaatacgaagattgtgattatcggcggtggcgcaggcgggctggaactggcaacgcaactcggccacaaattaggtaagaagaaaaaagcggaaatcactctggtcgatcgcaacagcagccacctgtggaaaccgctgttacacgaagtggcgaccggttctctggatgacggcgtggatgcactgagctacctggcgcatgcccgcaatcactatttcaattttcagctgggttcaatgaccgggctggatcgcgacagtaaaaatatcaccctggcggaaatccgtgacaacaacggtgacctgctggtgccggagcgtgagctggattatgacattctggtgatggcgctgggcagcacctccaacgatttcggcacaccggggatcaaagaaaactgtatcttcctcgacagcccgtcacaggcaaaacgcttccataatgagatgctgaacctgttcctgaaatactccgccagccacggcgaaggcgataaanccccccccagccacggcgaaggcgataaagtgaatatcgcgattgtcggcggcggggcgaccggggtggaactgtcagcagaactgtataatgctgttgagcagcttcacagctacggttttaagggtctgaatactgatgcactgaatgtgacgctggtggaagcgggtgagcgtatcctgcctgcactgccgccgaaaatcgccggtgccgcacatcaggagctcaccaaactgggtgtgcgtgtgatgacgcagaccatggtcaccagcgccgatgaatccggcctgaacaccaaagacggcgagcatatcaccgcaagtctgatggtctgggcggcgggtatcaaagcgcctgacttcctgaaagagattggcgggctggaaaccaaccgtattaatcagctggtggtcaaaccaacgctccagaccacccgtgatgacgcaattttcgctatcggtgactgctcatcctgcccgaaaaaagagggcggatttgttccgccgcgtgcgcagtcagcacatcagatggcgacccgttgctatcacaacatccttgcggtactcaatgataagccgctgaaggattatgtgtttaaagatcacggctcactggtttctctctcccggttcagtacggtcggcagcctgatgggtaacctgatgcgcggtaatatgatgattgaagggcgtatcgcccgtgtaatgtatatttcactgtatcgtatgcatcagattgcgctgcacggttatattaaaaccgggctgatgatgctggttggcggtataaaccggattatccgtccgcggctgaaattacattaattgatcttccccaaaaatgacgcctccgggcgtcattttttataataataaaccctgctgagagcagggaaatatacattgtacagatttgatataaagccaaaaaatgcattatttaaccgggattccgtatcatcactaacagataattccggtggcaatgaacaaaataaggcagatactgctctttattaattattgttgatcgttgtcagtacacacacagtcaggttgaattaataaattacagggacagaattgttgtttcatcattattatttaacttttatttagcggtgctgtgggaatatagtccggtaagattaatcgttaaaaataaaaccgggtttgctaggaatagtcctaattattgccgctggatatttatataatttgacaatgaataaaaatgaacggaaaccattatcacgaataacattcacagggcttgtgcttctgtttgttatttttgcggtaatcatttcttttgctgtgacaaagaataaacatcctgcagttgctgaggttctctcatccgaacctatcatggcaacagtgacggtgcgccatgaatactgtgacctgacaaccatgccgggtccgtacaggcgtgaactcctggatatcgtccacccgactgagcaggtctgcacgccgtatctgctgtatgaaaccctgctgcacgcaccaaaggtatacggcggcccgacataccgctcctgtacgacggcatacacctatgagcaccgtattgtcggctatgatgtcgtgtataaaatcaatgacaccgtcggtaaggtcagaatcaattataatccgggcgatgtcatgccggtggataataccgggcggctgatcattttacccggattgaatacggtgaaataaagtgtgttacagacaaaaaaaagaataccggtttatgtcataaaccggtattcaccacgttttttatttaatgtaaccggaaattaaacccagcccttctgacgaaactgctttaataccaccacaaattgctgcatctcttccggcgtgcctaatgtcaggcggctccagccggtcaccggcggaaattcacggccgaccataatatggttctctttcatccgctgctgataggtttttacatccccggtcaccttatggaagatgaaattagcctgtgagggcgcataaggcagatttaattccttcagtgcggcaaccacaatttcccgtgacacatccgttgaatgacggctgtaatcaataaacggtttatcattcagagatgccagtgcggaaaccgcgcctgctatattagtattatcgatagaattgaaattatttacctgttctgtcactgccggtacggaaataccataaccgacgcgaagcccggccagggcaaatattttcgagaaagtgcgtgtcacgataatattggattttccggcagccacccattcaaccgcacttttaaattgcggatcagacacaaattccgcatatgcctcatcaataataaaattctgctgcggcggtgcctggtttacccactgtgcgagttgtgatgccggggtgatcatagcggtcgggttattcgggttacagatatagataacggaatgaccggcaaagttatcggcaatcgcctgcatggctgtgaggtcgaaagagagatcggctttcagcggcactttgacaatatttacgcccagcggctcagcatacagttcggcataattgaatgtcggatccggcacaatcagctgcaccggctgctgttttttctgtgcatccgccaccagcatttgcacagccgcctgaatggtttccgaggaaccatttccgaggctgatgtgttccggtgtcagtgagaaatgcgcggcaatctgctcaatcagcgcttcgcgggcagcatccggatagcggaacgcgccgggaagggcgtcaataatcgcctgacgggctttcggcgacatccccagtgagttttcattgaagttcagcagcagcggattttctgcactgagcggcgctgctttaacagcgggagaaacggtatcagttgcggcatggccggtgctgaccagagaggcggcggttaatccgccgagcgcgatccctgttgatttcagaaacgaacgacgatccatagtatttaccctgttgttgtcattatattttggtaaatactaaccgaactaataatcaccttgcaaattaatattcacaataaatggatttttattcatttttaaggtgccggccgaaaccggcacctgacagagaggatgttgtacgttataccggatgagcggcaaatgcagtcagtaaatccgcgataaactcaatgcgtttggtgcggtcggtcaggtcacagataaacttcagttttgacgggccgtccagccggtactgtttcgggttattttgcaaaagcccgataagatacgccgggtcgacatggtttttctcactgaactcgacaaaaccgcctttctcctgcgcctcaatccggcggatccccaggtcctgtgcctgcaggcgcagacccgctgccgcccgcaggtgacgaccggcatccggcagcagaccgaagcggtcaatcagctcaattttcagctcggtcagttcggtatcgctgcgcgcgctggcaatccgtttgtagaaggagaggcgcatgtttacatccggcaggtaatcttccggcagcagggccggcatacgcagctccacttcggtctggctctgcgtgagatcttccagtgacggctctttgccgcttttcagggaatcaaccgcactttccagcatttccatatagagggtaaaaccgacgctggccatctggccgctctgatcttcacccagcagctcacccgcaccacggatttccaggtcatgagtggcgagggcaaatccggctcctaaatcttccagagaagcaattgcttccaggcgtttatgggcatcggtggtcatggctttcgggtgtggcgtcagcagatatgcataggcctgatggtgtgaacgcccgacacggccgcgcagctgatgcagctgtgccagcccgaaatgatcggcccgttcgatgataatggtattggcgctgggaatatcgataccggtttcaataatcgtggtgcataccagcacattaaaacgctgatggtggaaatcggtcatgacccgttccagctcgcgctcacgcatctgtccgtggccgactgccacacgggcttccggtaccagttccgcaatacggttgcgggctttttcaatattttccacatcattgtagagataatagacctggccgccgcgcagtacctcacgcagaatcgcctcccgcaccaccagctcatcatactgacggacaaaggttttcaccgccagccgtcttgccggcggggtggcaataatagaaagatcccgcatgccgctcatggccatattcagggtacgcgggatcggggtggcggtgagggtcaggatatccacattggcgcgcatcgccttgatgcgctctttatggcggacaccaaagcggtgctcttcgtccaccaccagcaggccgagatcatgccagtgcacatcactctgcaacagcttatgtgtgccgataatgatatccacttttccttctctggtatcatccagcacctgctgctgctctttggcgctgcggaaacgggacagaacttcaatccgtaccggccagttggcgaaacggtcacggaagttatcataatgctgctgcgcgagcagagtggtcggcaccagcacagcaacttgtttatggttatggacggcgaggaaggccgcccgcattgcaacctcggttttaccgaaaccgacatcaccgcacaccagtctgtccatcgccaccggctgacacatatcgctcagcacggcattaatagcctgctcctggtccggggtggtttcaaacgggaaggactggcaaaactcgcggtactgttcacgatcatgtttaaaggcaaagccgggtttgacggcccgctgtgcataaatatccagtaactgtgccgccacatcacggactttttccgctgctttctgacgcgctttgctccaggcttcgccgccgagtttatgcagcggggcgctttcatccgcgcctccggcatagcggctgatcagatgcagcgatgacaccgggacatacagtttatcttccccggcataggtgaggatcaggtattccgccttgatccctccggcttccagggtagtcaatccctgataacggccaacaccgtgctccagatgcaccaccggctgaccggggcgcagttccgcgaggttgcggatcagggtatcggtgttaattgtgcggcgggtgtcctggcggcggcgcaccactcgctcacccagcatatcgctttcgcagatcaggacacgctgacggtcgttatcaacaaagccgtgctcggcggcaccgatcatgacataaatgccgggtacggttgcatccggcagactgcggatttccgccggtttgattttgatgcgcgccagcagttcctgcacgctttcgcgccgtccctcactttccaccgagaaaatcacggcagcgtctgtgctttccaggaagcggcgcagcgggtcaagcggggatttcagctgcggattgactttcagatccggcagcgcggtatacccgaggttggtattagcagctttgcgcggcagtttgtcattattgagctgcacacgcggcagtgttttcatctgctgattgagttcttccggtgtcagccacagctgtgacggcggcagtaacggccgcatcggatccacaccccggctctcaaaacgctgttgcacatcacggcggaagcggtcggcggattcctgtaaatcctgggtcaccagcagggtgttatccggcagatagtcaaacagcggtaccagcggcgcggtgaaaaacagcggctgccagtactcgataccggcgggcagggtacctttgctgacctgcagataaacatgttccgggtcacggcccacctcaaaggtttcccgccactgactgcggaacagctcgatagcatctttatccgtcgggaattcgtgagcaggcagaagattgatcgcattcacttcatcgagggtgcgctgggtgtcgacatcaaaggtgcgcaggctgtcgatttcatcatcaaagaaatcaatccggaacggcagttcgctgcccatcggaaacagatccagcaatgcgccgcgaatggcaaactcaccgtgttccagtacctgttcaacactgcggtaaccgccctgaaccagctcttcacgcagtttatcccgcgacagcttttcccctttggccatcaccaatgcatgactggtgaggaattcaggcggacacactttctgcatcagtgtattgaccggcagaatcagtgcgcctttttccagggtcggcagacgatataacgtggataaccggttggagataatctcctgatgcggcgaaaaactgtcatacggcagggtttcccagtcggcaagggtttctgccgggagcgcggtaaactggcggatttcatcccgcagccgcagggcattctgcatatcgcgggtcaccaggatgacggggccgtcgtgttgttcaattatcgacgcggtttccaccgcacaggctgcaccggtcatttcaccgagctggcgggtgtctgcggcacgggccgggagttcatagcgtgttttcagcgacattcggttttccatcgggctgcgtgtttctgtcaggtaacaaggttctgccataccggagtggcttgtccgggcaataaaaggccgccgcgctgccggtccggaggtggtctgataccggcaacacgctgaccgtcaatgaaaaaaaactgccgcaaacgggcgggagtggttccattcatcaaccggagcctttattatccctgaacacttcgctttggcaacaggggcgttcagatttcatgtttcagtctgtctcatttttaatcggtctgcgttacatgcggggacgcggcacggatcgctttgcccgttttgtctcgctgctttccgccatcggcatcacgctgggggtgacagcacttatcaccgtgacatccgtgatgaacggttttgaacgctcattgcagcagagtatcctcgattttatgccgcaggcggtaatcaccaccggaaacggcgtgctggatccacagacacatccggtctcacagttagccgggctgcgtgatgtggtaaaaaccgccccgattgtgaccggtgatgtggtattgcagagcaccggcaatgtggggatcgcctcggtgaccggaattgatccgcagggggatgaaccgctgatggattatctggtgaatacccggccgtccgacctggcggcaggtcagtatcatgtggtggtcggcgaaggtgtggcgaaacgcatgggacttaagcgcggggatagtgtccgtatccttgtgccaaatgtgtcgcagctgacgccgatggggcgtatcccgagccagcgcctgtttactgtggcaggctttttctcctccggcagtgaatccgataacacccaggtgctgatgaatcaggaagatgcggcgcgtctgatgcgctatccggcgggtaatattaccggctggcgtctctatctgtcgcagccgttacaggtggacagcctcagtcagcagacattgccggaaggtctggtctggacagactggcgtgtgcagaaaggtgaatttttccaggcggtgcgcatggagaaaaatatgatggggctgctgctcagcctgattatcgctgtggccgcgtttaatatcattacctcgctggccttgctggtgatggaaaaacagaccgaagtggccatcctgaaaaccctgggaatgacacgcggcaaaattatgctgatctttatgattcagggcgcgggggcggggatcctcggctcggtgatcggcgttctgctgggcacgctgctttcgtcacaactgaatattctgatgccgctgctggggctgatcccgaaaggaatcgctctgccgacggtcattgagccgctgcgcgtcatcactatcggcgcggctgccatgcttatctctttattatctacactctggcctgcgtggcgggcggcagcggtacaacccgcggaggctttacgttatgagtgagttattactggcatgtcgtcagttatgcaaatcctatcatgagggcacagtggaaactgatgtcctgaaacaggtcaattttgaactccggcgcggggatatgctggcgatagtcggcagctccggttcagggaaaagtacgttgctgcatctgctcggcgggctggattccccgacctccggtgaagtgattttcaacggtacggcactttccgccatgagccagaacgccctgtcggcgctgcgtaatcaggaaatgggctttatttatcagttccaccatctgttgcccgattttacggcggcggaaaacgtggcgatgccgctgctgatcggtggtgtggcgcgggataaggcactggcacaggcgggagaaatgctggagcgtgttggtgtggcagcgcgcgcgcatcatcgtccgtctgagctctccggcggggaacgtcagcgggtggcgattgcccgtgcgctggtgaataaaccgtcactggtcctggcggatgaaccaaccggtaacctggatcagcgcaatgcgcagagcatttttgatttgttatccgaactgaataaaaccctcggcaccgccttcctggtggttacccatgacctcgccctggcggcgaaaatggggcggcagatggaaatgcgtgacggtattctgaatgcacagccggagacggcgctatgaatgcactaccgctgtcattactgactgcgctgcgtttcagcaaaggacggaaacgggcgggaatggtctcgctgatttccgtcatttccactctggggatcacgctcggggtggcggtactgattatcgggctgagtgccatgaacggcttcgagcgcgagctggaaaaccgggtgctttccgtggtgccgcaggggcagatctccactgttgagcagccgtttgatacctgggcgcagagcctgctgcggatcaaaaataccccgggtgtggtggcagccagcccgtatattgaatttaccgggctggcagaaaaaggcagtaaattacaggccatgcaactaatgggtgtggatccggtcactcagaaattggtgagcggattgccggagtttgtggcggataatgcatgggcggattttcaggccgggaaaaatcagataatccttggtgacggcgcggcaaaatccctcggtgttgcgcagggtgactggctcaccatcatgatcccgaatcacgacagcacggagcgcctgttacagccgaaacgcatccgtttgcaggtcgcggggattttccgcttaagcggcatgctggatcaccggctggcgctgctgccgctggaagatgcacagcagtatctggattacggtgagggtgtcaccgggatcgaaatccgcacggataatgttttcaacgccaatgacgtggtgctgcgggcggcggaagccagccgtgaacatgtcttctataaaagctggatcaacgaatacggctatatgtacagcgacattcagttagtgcgcagtattatgtatcttgccatgattctggtgattggtgtggcgtgcttcaatatcgtttccaccctgattattgccgtgaaagataagagcggggatatcgccattttgcgcacccttggtgcgaaagacagcctgatccgcgccattttcctctggtacgggctgctgaccggcatggtcggctgtatcagcggggcggttctcggcacactggcggccctgaatctgacaccgcttatccgtggcattgaattccttatcgggcacaaactgctgtccggtgatgtctattttattgattttctgccgtcggagctgcggctgacagacctgctgtatgtgatcttaaccaccattgtgctgagcctgctggcaagctggtatccggcgagacgcgcctgccgccttgaaccggcacgtattctgagcgggcagtaatgcccgcaggaattgtaatgattttttgaatccgaagcgcggatgcattaccctgaacggagacagtgatgaacaaaggccggattatgcgcagaacgcaccgattaagaaagttacgcaaacagcggcggatcctgcgccagcgttttcacttacgctttttctatcgcgataaatggatggccggaaaaatggatcagtttaaacctaaaattgttgtgctgaccggcgcgggtatctccgccgagtccgggatccgcacgttccgttcggaagacgggctgtgggaagagcacaacatcgaagatgtggcgacgccggaaggctatgcccgcaatccgcgtctggtgcagcagttttacaatgaccgccgccgccagttacagtcccctgacgtgcagccgaacccggcacatctcgcactggcggagctggaacaggtgctgggggataacttcctgctggtcacccagaatattgataacctgcatgaacgggccggcagtcagcggattattcatatgcatggcgaactgctgaaaatccgctgtgcgatgtccggacaggttcagttgtgcaccggtgacctgtcagcggatgagcgctgccactgttgtcagttcccgtcaccgctgcgcccgcatattgtctggttcggtgaaatgccgttcggcatggatgaaatctatcaggcactgaatgatgcggatatcttcatcgccatcggtacctccgggcatgtctatccggcggccgggtttgtccatgaggctcggctgtgcggggcacatacagtggaactcaatctggaaccgagtaaggtgcagagtgagtttgaggagtgtcactacggtccggccgggcaggtggtaccggagtatgtccgtcagttgctggcgcagattaacaacactaaatctgatttgacgcaataactcaatttatgtttccccgataataagaaatcaatgttattgggggaacacatggataagttattagagcgctttttcggttatgtctcttttgacacgcagtcgaagccgtcagccaagctgacaccaagcagcgacggtcagttaaggctggcgcgtgctctggaaaaagagctgaaaacgctggggttatcagatgtctcgctggatgataacggctgcgtgatggcaacgttaccggcgaatgttgactggccggtaccggttatcggttttatttctcaccttgatacctcaccggatttctccgggcgtaatgtgaatcctcaggttctggaaaattaccgtggtggtgatatcgcactcggcatcggcgatgaagtgctgtcgccggtaatgttcccggtgctgcacaccatgctgggtaaaaccctgattatgaccgacggtaaaaccctgctgggtgcggatgacaaagccggtatcgcagaaatcatcactgccatggtacgtctgaaaaacagtgatattccgcacggtgatatccgcattgccttcacgccggatgaagaaatcggccgtggcgcgcagtatgtggatctgaaaaaattcggtgcgcagtgggcttataccgttgatggcggtggtgtcggtgagctggaatatgaaaacttcaatgcggcggcagttgccatccgtattgagggcaataacgtgcatccgggcagtgccaaaggtgtgatggtgaacgcgctgtcactggcaacccgcatccacagcgaattaccgccggaagaaacgccggaaaataccgaagggtatgaaggtttctatcatctgcaaagcatcaaaggcacggttgaacgcgcggaaatgaactatatcatccgtgattttgaccgtaacaattttgaaaaacgcaaaagcaatatgattgcgattgccgagaaagtcggtaaaggtctgcatccggactgctatatcgagctgacgattgatgacagctattacaatatgcgcgaccatgtggtgaaacacccgcatgtgattgaactggccaaacaggcaatgattgactgcgatattgaaccggatatcaaacctatccgtggtggtactgacggtgcgcaactctcttaccgtggtcttccgtgccctaacctgtttaccggcggttataacttccacagtaaacacgaatttatttcactggaaggcatggaacaggcagtttccgtgattatgcggattgcagaattaaccgcactggatatgaagaaataaataattcacatatcaattaaatattataaaggccatcttgcataagatggcttttttattaaataaactgacttaaataaacagtaagattcttatgttgatgtgattttttatcactcactgattaatctttgttttgtgtttgtttatctcctgctggtatagtcattcgcttgtcaatatttagtgcatgattatatctgttcagataatacatatcataagaaacatatatttgttgaatatttaaaaggtaattgttatgtctttatttaaaagaaagttaattatttcatccttgcttttattttcctttaatacattttctgcggatgatgatgttaatgaaatagctccggaaatcgacgtcgctgaggctaaaaaaataacagggaatatcaaatttacagggaaaatcactgactcaagctgtgatattacacaagaagataaagatgtttatctgggcgagcattcagtcgctaaactgaaaaaaaatgatgacagaacggaagaaaaagcctttgatatttctctgattaactgttcattagcaatgacatcgctgaaaatcaaaatggagggcacggcgcatgcagacaatgcaacgctgtatgcattggatgccaatgaaaaaagtgccggaaaagtagggatcagcattgcgactgctgaagggcagcaggtaacgccggcaggtggctatcgtgatattctgctaaaggccgattcccgtgattatactctgaattataccgcagcgtatcaggctaccggcctggcaacaccgggtgaaggtaatgcaacggtgaattacactgtttcttatgagtaacatttaataccggcggcaacaggtgttgccgccccggataaacagcatcatgaaaatcggttttacttttcttattattacttttctgacaatgagtcaggcgattgctgccgtggttgtcggcggcacccggtttatttatccgcaggataaaaaaatgatcacaattcctgttgataatacggataaaaaatcagcctatttaattcagagctgggttgaaaaagaagatggcatgacgaaaagtaaggactttattctcacgccggttatttttcagctggatgcaggaaaaaaaggaattttgcgtgtcatgctgaaaaaaacagaatttccggatgacagagagtcattactctggctgaatataaaaggcattccggaaacagatgaaaacagagaaaataaacttcagattgttattaattcaaagtttaaattattctatcgccctgcaggattaactgagcctgattataataaactgaggtatgaacgaaaaggaaacagaataaaaatcattaatgactcaccttttcatatcaccgtcagaaatattttggttaataataaggaatatactgtttcggagatgatagttcccttcgaatcattaactgtaccggtaacaactattcatagtaatgacgaaataaccataagctacatctccgattttggcgggattttttctaaacctgttgtttttgataaataatattattatgcaattgaaaacaccttatttttttcttctggcagtggtgatcgtttttcctccggtaaccgtttttgctgcaccttattttaatccggcggcgcttggtctggacgaagatgatccggtgatggatcctgcacagtttcagtatttgcgggaacggcaatttcaggaagaaggccgttacttcgtggctgtaactgtcaatcagcaggcagtcagtggtcagtggctggagtttcgttatcatccgcagcaaaaaagattgctgccatgggtgaaccgcaggcaatggctgatatggggattacggccggatgcatcgccggcatttgcagaaacagaaaatacagcgccggttgcggatattactgcgctggtcagcggggtctcgctgagttttgactccgcgcggcagtcgctggatattactatcccgcaacgtttttttctgacagaagcacagcgggccgcagatgcttcgttatgggaaccgggtattactgcatttatgctcaattatgattatcgcttttcgcgggacagtaacagcttcagtcagcgtaccggacatactcttttgctgcaaagtggtgttaatgcgggggactggcggttgcggcatcacagcagggcggaacaccgtgagggtaaactgacatggcagtcagagcggttgtggatgtaccgtgccattgcttcccggcgcagcgagttacagctgggggaattgttcagcggggatgtgctgtttgacagccgagcgttcagggggatccggctggcttcacaaagtgatatgtatccgctgaatcagcagggttatgcaccggttatccgcggaataaccggtcagagtgcagaactgactatcaggcagcagggaatgactatccgccgtgaaacattacctgccggtgaatttgttattgatgatctgaatacgtcttttcagggaacagaactggatgtcaccattgaggaggcggacggcactgtacagcgttttacacagcacggaacctcagttccggttatgcagcgggagggccggctcagctacacgctggatacaggaaaatacagaggaaacagaaataataacaaagacctgtttgtgaaaagtacggcagcatacggcattaattcagtcctcacactgtacggtggcggctatgcagcacaacacgctctgagcagcggtgtgggggcaggtgtcaatatgggagcagcaggcggggtgtccgctgatattctgatgcggcatacaacagcaacgcagcatccgcgttaccggctgaattatcagaaattttttccgctggccggaacattggtgaatacaggggctgcacatgagcaacaatccaggcaatggcaggtccggttgctgcaaccgctgccgggggataacggtacgctgtcggcaggctatcactataaccgcacaggccatgacgggcgcggataccgggcgatgattaacagggatgccggctattccggtcacatcggccgggtacattacggagtgaatgcacaataccgtacaggcgggcattttcggaaggcagataaacgggtgtctgttgcgttgtcggtgccgctggattttgccggacaacaagcccgcagtcattttcattaccaccagcgggcaggaaaggcttctctgcaaacatccgtgaatggtttgctcggagatgaacaacgtctcgggtattcagttacacacagttatcagcagcagggggctgcacattaccgcggggcggagctgcgctggcgtcacgacctggccgatatccggggacgtattaatcacagtcagggacacaataccctgaacggggatatacagggcgggctgattattcacggtgacggtatcacattgtcacgtccgctgggtgaaaccaacgggctggcagataccggcggtaccggggggatccgtgtggcctcaagggcagcggcgcagactgacagtgcggggttcagtgttattccgcaactgagtcattatcatcagaatgttatccgtatcgaccccgaaaccctgccggataatgcggatgcggatgatccggtcgtacaggtgatcccgtcaaaaggagcgctggtgccggttcgttttgcagtgaataccggttatcgcgtgatttatgcactgcggactgcacaaggcccggtaccgttcgccgcacgggtgaaggtgaaaaaagcagatgacagcagcgtcagcggtattaccggtgaggacggggaagtgtatctcagcgggttaccggctcaggggcatttacaggctgtctgggggaaaggaatgcatgagcagtgcggggcggattttactgtcccggaagatcagcagggactgataactctccctctgatatgccggtaaaggagaagcaatgtttactcagatcagagcactatgccgggcagtttttttcctgtggctgacagccggatatattccggccgctccggccggggaaacctgtgcacttatcacaccggaaacgactctccgcataccagccggctatatcatggctgcgtataatgtaccggttggcggtattatcggggagacaatattttcggatagtattgatgtctctcagtgccggatcgacagcggcagagagattgaatttgtgctggttggcggaatgccgggtaacagaacacaaaatgcgtcgggacacactatctatgaactctccggtggtatcggctacagcctgggggcggtggcggagcatccggaatgcatgaaatcgtcgcgctatgtggacggtcgtgattcacctgacaacaacacggccaataaacgactgtgtacgatcagcagcggaatggatccgtctcagccatatcgggtacgggcagcggtgacactctataaactggaacctgaaatagctgttcaccatccgggaggctatctgggtgaaattgctatgcgtgtgggcgggcactgggctgcgggattgtatagtatgccggaaaccaaaatctatctggacggatttactgtccggcaacattcctgtgatcttgatccacaaacagaaacagatgtggatttaggtgtcgtatcgcggactgatttcagcggcaaagggtctgttgcccccggaagcatccgcaacctgactatagcactgcaatgcagccatgtgacaacggcggatatccggttaaccggtaatgtatttaccgccagaaacagccccggaacactgaagttacagcggagaaacggcagtgcatcaggtgtgggggtcagactgacaaataaggggcagccggtcactttcggagagccacttttatttgatgaaatcacgactcagcgggccgtattgcggttacaggccgcctttatacagacgagggatagtattgagccgggtacggcggaagcaattctgaattacaccattcgttaccagtaaaaaaacgccgcataataatgcggcgtttctatctgaacaatgaatgcaattttattgctgattaatcatcaaaataccagtaaccgttattaatcagcactgtcagcagggtcacaaattccggatcactgaaggcatcccccagcatttcggcagtgatttcatcatactggcagagcacatccgctgcttcaatatgcggggttttcagggcttcgccgttaacgaaacaggtatcaccgacacgcagtacccgcagtccattgaggcggaacagggattccccctgtgacagtagttcctgtatttcatccgggctgtatgccggctccggcggtgccagatcccgctcatggcgggactgggaaataaattcaccgaaccacttgcggaacacatccggctggtcgagcagatcctgcatcataccatgcagcttggtcagttcgccctgctgaatcagcgccggattatcacggaacgccagatccgggtcactgtagcggtaactgccgagttcattggcaatcacatagtcggcaaagccgctgaacagctcgcgggcgttcggggcgcggaaaccgacagaatagttcagtgattcctcaatggcatagccttcgtgcgggaatcccggcggaatatagaggatatcgcccggcaccatttcatcatcaataatggcatcaaacggatccacctgtaacagatccggatgcggcgcgtgctgtttcatcgggattttttccccgacacgccagcggcggcgtccctggccctgaataataaacacatcatactgatccagatgcggacccacaccgccacccggaacagaataggaaatcatcaggtcatccatccgccagtcagacaggcagcggaacggcttcatcagtgcggcagacggaaaatgccagtgatcaacggcctgaaccaggatagaccagtctttctcgcccagcccgtcaaactcctgaaacggcccgtggcgcacatcccattttccgctgaaacgggtgacgatacggctgtcgatttcatcttccatggccagccccgccagttcatccggggaaatggtgtcgcggaaattgcggaaaccgcctttgatcagtaacggacgtttttgccagtggctttccataaaggtctgccagtctatattcagttcataatccatgtgttcgtcctcaataaacgccgtgatcaggcagatgaagggagtataacggaaaaagacatattatattcatgcatatatttataacttgccggcaacaacagactgactctcagtctgtgtcttcgtcgtgaacagtctgacgccggaatgtcacagtaatacgggcaccgccaagcgggctttcagtgacaaccgcgccgccgtcatactgctccagaatgtcggtgacaatcgccagccccagcccctgacccggccgcagggtatcaacccgctgaccgcggctgaaaatcagttcccgcttttcttccggcacacccggaccatcatcatcgacaatcagaataaccgcatcatgctgccactgcgccgtcacctcgacaaactccagacagtatttgcaggcattttccataatgttgcccatgacttccataaagtcattctgctgtcccagccaggtgatatccggcggaatatcaacggtaatatccacgcccttgcgctgatacacttttgacagcgcactggcgagactgtcaatcagcgccggaacggagaaaatgtcccgcatcagcacggtattatcaccgccgatactggcgcggtgcagataataaccgacctgctgggaaatccgtccgatctgctcaagcatgaccggttcggcggtttcaatggtcatatctttgccgccgcgcagtgagcgcagggtactctgcagcactgccagcggggttttcaggctgtgggtcagatcagaaagcgtgcgctgataacgggtatagcgctcccgctcactgtgcagcagcagattcaggttacgcaccagcccgcgaagttcgctgggcggggtttcatccaaatcttcccgctcgcctttttcaagggcgctgatctgcccgctgagggcattaatcggccgcaggctccagtgtgccgccagccagatcagcggtgtgagcagaaacaggttggcgagtaccacgtaaccgaaccattcccagacacggaaggtcttctgcagattttgcgggatggtatccaccaccactatcgtcagcggtggcagggtatctgttttgccataacggctgacagacacggagtggatcatccgcccgtcgtgatcatcatccaggtcattaatccggatatcttccgtggcaaagagcggggtattgaccagcagggatttggtggcttccagcgaggtattcagatcatacagcccctctttggtcagccatttggccggaatggctctctccagcgcgtcaatatgatattgccgccagagcagattctgattgtcatcataaatcagcaccacagacggggcattcagggagaaattcggcggaaaacggatattgagttttccgtcatcccactgcgacaggctgtaaaacagattgctctggctgcgcagcatggtgtaggtggttttatcaaagctgaccaggtaaccgaccagcgccacggcgccgtaagagagcgtcatggcgaggatcacggcaaacgttgccagtaaaaaccgggtccgcagagagaaagggcgcgttgtccgcctggtcatgcgcaatacctcagtggcttaagccgtgtctgttatttcccggcgtcgaaacggtagccctgtccgcggacagtgacgatggcatcaatatcggtaaatgcctggattttcttgcgcagacggcccatcagcacatcaatggtgtggctttcacgcagttcggcatccggatagagctggcgcatcagggaatctttactgacgactttaccattattccgcatcagtgtttcaataatggtgtattcaaatgcagtcagtttgacggcgttaccatcaacgaggaactctttgcgggagagatcgataacaaaaatgcccagttccagtgtctgggaggcgaggccgctgttacggcgcatcagtgcctgcatacgggcgacaatctcttccagctggaaaggcttggttacataatcatccgccccggcattcagcgcggcgactttttcctgccagctttcacgggcggtcagcaccataatcgggattttgacctgctgctgacgccagcgggcaatcatcaccatgccgtcctcgccgggcagaccgaggtcaaccaccgctatatcaggctgactttcctgaagaaaataatctgcttcttttgaatcttccgccgcatcaacctgatggccgagctcgcggatctgaaccgtcagatgatgacggagtaaattgttatcttccacgatgagcacgcgcatacataattccttacaaagacagatatcccaacaggaaacgatgtgaattgtaacagtttacatgaaggatagggaacttgtacgccaaataatacgcgcgatatgcgtttaatcataaaaaaaagaggcagatatcctctgcctctgtgtgattaattatcagtaagttaataattacaactcatctgccagacggatggcgtccccgagatagttttgcggggtcagggttttcagccgggctttttctgcgtcaggcagctccagtccgtcgataaagacctgcatcgcctgagcatcaacacgcttgccgcgggtcagctctttgagtttttcatacggtttttcgataccgtagcggcgcatcacggtctgaatcggctctgccagtacttcccagttttgatccagctcatcacgcagatgtttttcgttcacttccagcttgctcagacctttttgcgtggactgataagcaatcagcgagtaaccgatccccacacccaggttacgcagcacagtggagtccgtcaggtcgcgctgccagcgggataccggcagtttggttgccaggtggccgagcaccgcgttagccagacccaggttaccttctgagttttcaaaatcaatcgggttgactttgtgcggcatggtggatgaaccgatttcaccggcaattgttttctgtttaaagtgattgagggcaatgtaaccccagatatcacggtcgaaatcgatcagaatggtgttaaagcgcgccacgcagtcaaaaaactcggcgatataatcgtgcggctcaatctgcgtggtgtacgggttccactgaatacccagcgaggtcacaaagtcgccgctgaatttatgccagtcaatatccggataggcagacaagtgcgcgttatagttaccgaccgcgccgttgattttgccgaggatttcggtctgctgtaactggcggtactggcgctccatccggtaagcgacgttggcaaactctttaccgacggtgctcggggttgcaggctgcccgtgggtacgggagagcagcggcaggtcgcggtaatccgccgccatagcacggacagtatcgatcatctggcgccatgccggcagcagcacggtttcacgggcggtgctgagcatcagggcgtgagagaggttattgatatcttcggatgtgcaggcgaaatggataaattcagacaccgcgtgcagggcaggcacggcttcggctttttctttgaggaagtactccaccgctttcacatcgtggttggtggtacgctcaatttctttgatccgcattgcgtctttttcgccgaaattcgcgacaattgcatccaggtaagcgattgcgtcatcatcaaaagccggaacttcggggatgtctgcacacgccgccagtttttgtaaccaacgcacttcgacctgtacacggaatttcagtaaaccgtattcactgaaaatatcgcgcagtgcgcgtgttttgtcaccataacggccatcgacaggggaaacggcggtaagtgaggataattccattggttgcaactcccggtaattttagtgttgagcgagaagatatttagcggtgtccaccaggcgtgaacgggaaaacagcaactgtaaacggttgccgccgacctggcgccagagcacggcgctgcggatcccgctcagtaacagcgagcggactttagcctgaatcagggtgttacgcaggatttccggcgagccggtcacctggatgcgcgggccgaggccgctgatgttgtccacatagataccggcgatggtattgagcatcgcttcctgtgacaggccaaaatggtcgcgctggtgttcaagattatcaatacggcggccgagttcatccatcgcgcccggcgctttgttcaggcggcgctccagcagcatcacacccagcatatagcgggtcagctcggcattcagcccctgagagccggtcatattgaacatcccggcgaacgcggacaggccggtatgcaggttctgcacattgtcgccgtagacattcaggacagaggacggattattattgatgatactgttgatcatcacatcaaccgcatcattatctgtctggccttcatgcgccagctgctgcaccaggcgcgcggcctggcagatcccggccagggcgagggttatgtcttcgtaatttttagccataatcactccgtaatacgcgcttcaatgactccgccgcccaggcagacttcatcctgataaaagacagcggactgacccggtgtgactgcagcaaccggattatcaaaccggacactgattttgtcatcaccgagcggggtgacagtacagggaatatcttcctgacggtaacgggttttcaccacacagcgcattggttgcgtcagcggctcccgcgatacccagtccagttgctgcgcgataagcccggcagacatcagacgcgggtgttcatggccctgtgcgacaatcagaatattgttttcaacatccttatcgacaacataccacggctcgtcggaaccttcacgggttccgccgattttcagcccttttcgctggccgagggtatggtacatcagcccgtcatgctgaccgatttcctgaccatcaaccgtcataatcgggcccggtttggcgggcagataacgggcgaggaaatcacggaacttgcgctcaccgataaagcagatcccggtggaatcttttttcttcgcggtgataagccctaattgctccgcaatccggcggacttccggtttttccagttccccgacagggaacaggctctgtgccacctggtcgtgactcagtgtatacaggaaatagctctgatctttattgctgtccaggccgcgcagtaattgtgtggtaccgtcgatatcacggcggcgcacataatgcccggtggcgatataatcagccccgagatcttctgcggcatattccaggaacgctttgaatttgatctctttattgcacagaatatccgggttcggcgtgcgtcccgctttatattcctccagaaaatgctcgaacacattatcccagtattccgccgcgaagttgatggtcagcagttcaatgccgagtttatcgcagacggcctgtgcatccgccaggtcggcggcggcggagcagtattcggtatcatcgtcctcttcccagttcttcataaacagcccggtcacctgataaccctgctgttgcagtaaataggctgagacggaggaatccacaccgccggacattccgacgatgacttttttctggctgttatctgacatggctgatctcgcggcgattcggtctgctccgcaacagtgacgcgaagaagaaccggggaaaaaaacaagcgccgtactttaccatgatacgcacagcggcgcatcactcaggtgcgggatcggcactttttttgcaaagtattttccgtagtcttttccccgcaatgcattacggggaaaccggttccccgaacgcgtccccgaacgttcccagcagcgagagcggcagcggttcggcggcaaaccaggcaaacatactttcttttaccagcggggagcgcaggatcgggctgtgaataatctcatccgcactgacccagtggcagcggtcgatatcgctgtcctgcgggtgtgtctcacattcactctccagcagcactcggaacagaaaacggataaatggtgtaccgtccggtgcaacccactgatgaattttcagcagggcatcggggacggcgcggatcccggtttcttcatacagttcgcgctctgcggcggcaagcagtgtttctccggcttccagatgtccggcgggctgattccaggtggctttgccgttaacggtctcttccaccaccagaaatttttcaccggcgctgaccaggcaggccactgtcacatgaggtctgaatatcattcacttctctccattcgccgggggcaagggtatcaagggcaaaatcaccaatccgcacgcggatcagacgcagggtcgggtggccggtatgggcagtcatccggcgcacctggcggttacggccttcccgcagtgttaatttcagccagctgaccggcaccgatttccgctcgcggataggcggattacgcggccacagccactccggctcatccaccagctcagcaccggcagggcgggtcgggccatcattcagggtgataccattacgcaactgattcagtgcgttttcgtccggcacaccttccacctgagcataatacactttcggggctttgttctccggctgtgtcagcgatgcctgcaatgcgccgtcgttggtcaggataagtaacccttcgctgtcgcgatccagccgcccggcggcatacacatctgtaaccggaatgtaatctttcagcgtgctgcgcccggcttcatcggtaaactgcggcagtacatcaaacggtttattgaacagaataatttttcgcggaccgcgcggccggggtttgcgggccgctttctgacgcggatgagcgcctgccggacgggattgcggctttcgggagatgcgggagttcgtggttttaccggtcattatcttttttttacataaaaatgagacttacattatagcttaaaacagttaggatttgcgtgatgcgattattcaagtagtattgacagggccattacaaaaaattaacaaagcattgcgcttacataaaggagaggttgatggaaagcaaagtagttgttccggcgaaaggcgctaaaattaccattgacgcaaaaggcaaattaatcgttccggacaatccggttatcccgtttattgaaggggacggaatcggggctgatgtaacgcctgtaatgattaaagttgttgatgccgctgtaaaaaaagcctacggcggtaagcgtgaaatctcctggatggaaatctacaccggtgagaaatccacaaaactgtatggcagtgatgtctggctgccggatgaaaccctcgattttatccgtgactaccgcgtggctatcaaaggccccctgaccaccccggtcggcggcggtatccgctccctgaacgtggcactgcgccagattctggatctgtatgtttgtctgcgtccggtgcgttattatgccggtacaccaagcccggtaaaacagcctgaactgactgacatggtgattttccgtgaaaacgcggaagacatctacgccggtatcgagtggaaagccggttctgcggaagcagacaaagtgatcaagttcctgcaggacgaaatgggcgtgaccaaaatccgcttcccgcaggattgtggtatcggtatcaaaccgtgctctgaagaagggacaaaacgtctggtccgcgcagcgattaactacgccattgataacgaccgtgattccgtcaccctggttcataaaggcaacattatgaagttcaccgaaggtgccttcaaagactggggatatgaactggcacgcgaagagttcggcggcgagttactggacggcggcccgtggttaagcctgaaaaacccgaaaaccggcaaacagatcattatcaaagacgtgatcgcggatgcattcctgcagcaaatcctgctgcgtccggcagaatatgacgttatcgcctgtatgaacctcaacggcgactatatttctgacgcccttgcggcacaggtcggtggtatcggtattgcaccgggcgcgaacatcggtgatgaatgcgcactgttcgaagccacccacggcaccgcaccaaaatacgccggtcaggacaaagtcaacccgggctcagaaatcctctccgccgagatgatgctgcgccacatgggctggtttnnnnnnnnnnnnnnnnnnnnnnnnnnnnnnnnnnnnnnnnnnnnnnnnnnnnnnnnnnnnnnnncgctaagctcctgaaatgctcagagtttggtgacgcaatcatcaaacacatgtagttaagtttacagtgaaatagttaacgggaacttattagttcccgttttttattattcagtctgaaacggttatcaaaaagtttgcaaaatgatttagcaaaacggtatgaaatttgtacagattgtggatggtttcaggttcaaatgtgtggagtttttaagtaatgctgggggatatatcctttaaaaaactacgaattttttatcatcgcctaaatatttagaatcaatattcatgtgtgttagaaaaaatgaacctttttactcaccttcttaagtgtatccaagaagtaatacgtacctcactatacatttcctttaaaataagataatttagagggttttctgagcagatacataacaatttcctaacaccatgcatatttcacaccatttcccaatgattaaataagacattatcttataatcatttagataatgatttcagttataaaagcaaatcatcttattaagataaaccatcattgtgattactacaaatatagttttttatttatataattcattggaagataatatattgatataagaagtttcataaagtgattagcaagtaaaatagatattaaccttaaaatatttgcatttctattttgaataggctaactggattaaaagtagttccaaaatcccttaagaaattggaactataaaggaattcactccagttttaaaatttcagaaaaactattgattgtataatcaggttcaatttttgaaaatgatttctttagctgctcttctctttcaacatcaatatcagtccagtgtgttattttaactaaaattttccataactcgggagggaactggcgaccatagcaagcccaaacggctttcattccaatagactttgccattgatatatctttggtaatagaatcaccaacatatacggcatctttaatatcaacattttcagtgaaacagatatgttccagaagtttaggattaggctttgactctgaattagataatcttatgataaaatcatcttttactggaattatttttgcttttttgggatcaggatggaggttatgagtatcttcgagtgtatataggtgttcaaaaaaatcaattatatctagcttataaagacgatataaagaattaaattccagggactctgtgtgcccaactattttaacaccgcgctctcttaatgtttttaaagtatttctgacagtaggatataatttcaatgtctgattacgctttgaactaaatgctgaaaataccttggtgagttttttttgcaagaaaattttatcatttgttccaaaataagaaataacagatggcaactctaaagtagcaaacggtttttcagtgttgccaaatttctgatggatgagtttatattcagataaaagtctatctaaaggaatatttatctctttggatagttcttcagccatggcactaaatgactgggagtaaaaacttacccaatcatacagagtattatccaaatcagtgataagtaatttcatgataaaccttcaacaatatagtccgcttctcttttttctccactctgtttattaagcttgaaaaagttaaaagttagcttttcaccagagaaatctaatatacatgcatagttagcacaatcttgacttggcaattccgaactaacaactcctgagcttcctaaggaaacaatttggaatgtatgttcaaaatttgaactagacaccggttctagtggagatgatttttttgttattgtaatacagctgcttctatgcatgtggccatgcagaacataatcaattttatgccttactacccaacgtaaaaatctttctgcatctagtgttacgctatatcttgaatccagataagcatcttcgacctcattaatagaagtcaggtgatggtggagcatggcaattcttatgactcctctttttttagatatgtattctccatttttccttatccatcccatagattctgcaacattattgagttgttgctcaccaatgaatcctatgcccaaaaatgaatcttttacttgttgtaaaatgcatgaatttatggcggccacttcaacgatcttgtgtccccccaataaaaactttcttccttgagatagatcctcttcaggcttcctttgaaaaatatctcgataaaaatctatataattatctttactctttttatagtattgttctacaagagttgtcgatggattatcagtttcttgaatacccataatttcaagataatcatctttagaaaccaagcctacatcatggtttcctggacaaataactatatcatcagctgtaagactcaaagaagaactaacatctttaataaattttgcagcttgcttaaatcccttgatctgtgattgccaagttaaatcacccgaaatagctaggccggcacatttattcccattcccatatttatcagctaactctaccacacaagaagataagcatttttgttgactattatcctgcattggaaatgcatgctttccatttccatcatcgaaatgaatatccgaaagccagattatgaactccccatttttttgactgtatttttgattgaaattataaggaatataatgggatgctaatgattcatgctgaaaatcatcatctagtgcagttctaattttccaaattgttctatcttgttcttttaattcagttacagaaaacacgactttattgaaaagttgttcatctaaatcctttgagccagaaaacaatgaatcaaatgaggtgtaggtgaatttcttgagaatatcactatcagaaatattttcaatattagaaattttcaaccatcctaacaactcatcctcatgataatattttggcgttttattgccattctcgggagctttcttttttatatccccagcggcagaagaacaaacctcttttaactcagcactatagaacttaagttgccctgagtcaaaaaagtatatttttgtagagtgctctgcagcaatacttagttctcttgatgggaagacttctccagatttagcccaccatccccaccaaacatacccctcccgagcagcaattgtattgtgctgttcaatggtaaatccgtcacttttccctagatcacggaacctaaagatgtaagtttcactcatttacttcatcctcaaatgaaatggcgttacgatgctttcgttttatcagtaaacgatagtgaattcaaatattaagcttgatttttttgagattaagggaagagttcttctcacaatcttcgtgcactaagcttctatccaacatagcctatacttgttggcatgcagtttttaagtttttcccatattccgtactcggttcagacgatacccgcttataactgggaacagtttcacaaatttagagggagtggacaggttagtcagcactaatcgaacacataaaagcatgaagaattcttcatcagcgtgttatctaaagtaaccggaaattcgaaacaaaattgtttcatgtaaggggaagaggaaaaatggaattcaggaaataaattttttacaaaatataaaattttcttttgcattaatggtaatggatacgtaacatggttcataattaaacactgtaattaagattatattttttcacataagagcagaggtttttatgtctttaaattatattgatttagatgattcaactaaaaaattcatgcttaaggaaattaaatttgatcaagaaaacaatagtttttatttgagtatttttcttactgctcaaggtaaagcggtgtggccatctttattagaagaagcatcacaacacgatgatgcatggcttgagcgagaaattttaaatagagggttattagctacccattatctccgaaaaaagcctaatagcactgagatgattcaagctaaaatcccttataccgcggctcaaactttagctgaaggggaatttaatcgtttatatgcccgaggcttgagttcgcgagcaaaagcagaagggattgaatttgttgaagcttaccgagcaagacactcagaaaaccctcgtcctggatctcaagctataatcgggaaaaagttccgacctgaagaaatccttgaggatttacgtaataacccaggcgtagatacggcattaggtgttcctcctggccctaactctggcataacaattaaacttgttaagtaagaaatagtgcgaggcactttcggaattttgatccttaagtgcctttatgatgactggctcccattgattaacgcatcctgatgttaaaaggtttacttctgacacaagcctgacggtagcctataagctagatatacgagtttaactatgggccaacaaaatatcagatcaacaccattatccaatctttgccacgatcatcatgatacttatcggtttgccgctggcttttatggcccagcaggtttttggtattaactccctgttcccggtataaacgctctgacaatgaccgcatttcgtgaaatgttgcaggcgtaccttctccccaatcgatgtcggttttatctctggcttttttaaagttggtggtcagggtatttgcggttacctggccgccgggctgtgactgtgatgtgtttcgtgtgtagtggactaaatatttactgacatacagatctcggcatccggcaatcacatcccgcaggctgatattgagtgcctgacaccggagggagaggggaatagcaagcctcgttccggttttttgctggatcacatgcagatggtcatcccatatatcacggaacttcatttctgaaatatctccgaggcgctgtccggtaacaacagccagcaacatggcgttcccgagatatttatggtccttgcaggcgatatcataaattttctgccattcttccagactaagtcgttgccgggtgacctttcgccgtggttgctttgtagcgagagctgggttatatcctggcggaacttcaccggcatgctgcgcttctttgaatacatcgattaatacagaacggacaacctgagccatccggtgctgaccactgaccttatactgctccagaatatcggcaatatcgcgggcatcgactgccggtaatggtttttgtgacaacgcatgacgcatcagtgcaacaggtttctgtttttgtttaaaggtattctgttttatttcaccgtctgccagacgctccgcctggattatctggtaccgttccagccaggtattaaccgtgatttctttgccttttattttcgccatccgatcactgatcgccattacctgacggcttcgctgttcagccagtcgcagattagcctcaaccgcaattattttggcctcttcctcgttgtcaccgagataatggaatttcccggtgacgggatgtctgtagcgccagtacaccttgctggttttcctgctgaaaaacgggtacaggttggggatagtgatattatttttacggggtctggcagccatcagttaaaatcctttgtagcctgggattatcacttttgctgatcaccggtgagattaaattaccaacaagttcagcatcttctctcacgcgccaaataccaccttctttctgtgccggtgggaaaaacagaccacatcgggcgtaccgctgtaatgttcccagtttaggcgggcggctcctgtaccggttttctgcccattcatccaaagttaacattttcatagtcacactctgcacatcaccgtatacgattaagactgttcagatataagaagagcgtagcttcagtgaatatttctttttttaatagtgtcttttattgctttttttatagcctctgtagtcgtcccttcgctggcaatatgttcaccgattttttctaaaaaagaggctatataaggtgcattttcaggtatgttgaattccttacttacctcaacattaatgcagggcgcttcatttaaagtcactgtaatattaattttaacacttggcttatcctgttctgacatgatgtatatcctctttaaaataaagattatatattttattaaactaatttattctctggtgcgggcagtaaaaatactgtcggttaaagcggcataaaataattaatctttgaatttaccggtataggttttgaatatcggtttttaaacacaccggtatctaacccggagagaaactccgggacattgatcatacggttattctcgctcatcgcgtttttcctttcgttgtctcttcacacaaagataagtccaccggcggtcaggcaaggtatctatccggcaggacgatttacaccggtggacttatgtttgtaaaaagtggcggccgagtggtggactgcaccgtgttatgcacggccgctaatgatgctgcatcgttattgttatggggtcgtctctcttcacaatattcgggcccggttgtttaaccacctcgggcggcggtggtatcttggtgttctcacacaaccaagagaatagtttttatggccgcttttgatcgcaatcttcaacttaaaattctggaacttgcagtagaggaatatccggagcaaataaactcaatacctttagagttatcttctctggatgataaaactctattacaaaatattgcttacctcagagatgaggggttaatcctgggcggaatcgaggaatcatttgatggtattgaaccagcattagatctcatttctgccacgaatgatgctgttaatttacttagtgatgaaggcagcatctccgcctctttaaaaattgttactgtgaaattgcatgatgaaactttatctgcactgcgtgagttcattgcccagaacgttcctgacccagaagaaaggaaagggtatttgcagcgcttaaaagagcttcccgctgacgccacaaaacacatcgtgcttcaactattgggtaaggggctgaatcagataccggacgcaattcagtggctacaaacagtgctccgttcttaacaaactcgctttcttcatggtgtttttcaaacttcacccaaccgacagtttcatgtaactctaaccaaaaatcatcatgggtattgtcggttgacagcgttaatgcgttcttatggaaaaccaaggagtaaattcttagtttccgcggatcgcttgcaacattgtccacgtctatctccccacactaattgatactcttcacacagttattcagatacgcagctgttactgcggatttactgttaaagcacagaagtcttcccatctggcgatgtcttcatcgaggcgggccatagtgcgctcgtggtcacgtatctctctttggcgctcagcacggagtgattgcagtttttgaagcgcccgggctttttcagtaatccacgctgcaacttcgtctgctgacatgctgttggtggtgatgattggttcttggttcatattggcctcatgtaaaaaatggtacctcttacatgaaacaaaaagtaccttaagttacatctgaggtcaatagttagtgtaaaaaaagttacattactgcatagataaggcaaatgggggagtaataaatcagatgttttgaataacctgaataaccctgccaatgattcgacagttaccattgactactatcggtttgaaattggggttcagcggaatcaggtaggtatagggagcatcccagactagttttttgattgtggcatctgatgtgccatcgagtattgcaacaacaatttttccatatagatcttctatacttccaaattgtgtttcaacaatgactgttgagccttcagggattgttggtgatccatttgggtttgtcattgaatcacccttaacatcaaggccaaacgcactttcagatacccgggcggttgtgttaacccagcgaagtacatcatcaatagttgctgatgcgtatgttgatgtccagtcaccggcttgtacggcagatataacagggatttgtttgacagcaatggtttttcttgcagataccagttcagtcgaaagtggttcatttccgccaaatagtaaccattcaggagagacatccagtgatttagccagcatgtgaaggttttcaccatctggttttgtgacacctgtctcccattttgtaacggatacgcgtgagaccccgagcatttttgccagggattgttgcgtcatattgagttgcgtacgacgagctttgatgcgttcgttcatttccgttttcatgtaaccaatgttacatcacaatggtgtgaaatgtgtttgcatgtaattgtaccttttgttacctttcttgcattcaaaggtctgaggagtcgtacaaatgttgaagagagatgttcttcattttttcggcggagtaaaaaaaacagccgcagctcttaatatcagtcatccggcagtttgccgctggaagaaaactattcccgaaaaacaagcgttaattattgagcgaattacaaatggaggacttaagtacaaccctgcactttatcagcatagcagcacggaaaagcacggttaactacaactcaatctgaaagtgagtaggcaatgaaaaaccaatccctgaaagaagttgtaagagagatgtgcagtctggtccccggcggacgtgatgcaatggccggttcccttggtttgtctctgacgtcattcaataaccggttttatgagaaaaacggctgccggttctttgatcatcatgacctgatggtgatgcaggaagtctccggaactgtgctgtatgccgaatatgttgcggcggagtccggaatgctgctggtggacagcccgaaaaaaagtgaaatcggccgtactgacttatacgaaaagagcgtcagggcatccgttatgcgcggggctgtggacctgtgtatcagtaaggctattgaggacggagaaataaccacaggagaagcggatgcaatacggactgcacactacagagacatgcaggccagaacagatgaggttgaatccacgattattttatttacccggactcagaaagggtgaagccgggagtatacggctcccggcttcgatcgcgccatatcaattgtgtgaagagataaacgcatgagcagattaactcattcaataccggaaaggcaattcaaatgcattgttaccggcagtgaaccacttcgttatgtggaaagcataccgggtggcggcacagccgacaactaccggaaaaaaccggaagtggtagaccggcaaaaggtggaggccagctggtcgcagttttattaccgcagcggaggtcagaatgcctgaagaaacagctgacaatctgaaccggtattacaccgataagcggggacggaaagtccgtgttatccggtatgaccgggaaaacagccgggtgattttcatgcgtgacggttatgagcacccgtgctttgaaccgctgaaaatctttcaggaacggtatgcacgctgtccggatgaggtgaaaccatgagcatgattttaactgcacgggctttacagataaaaacaggcaacccgctgcgaaaactggtactggtcaaactggcggacaatgccaacgaccagggggaatcatggccgtctgtgccgtacattgctgagcagtgtgaaatatctgaacgctcagtgcagaaccacatcaatgccctggtgaaaatggggctggttcgtgttgagtcacgaaaatcggccaacggtctgaaccagtcaaatatttatcatctgtgcctgaatgctaccgctgtgagtggtgaatctcctgcaccctgtggtgtaaatcctgcgggggtgagtggtgcaaatggttcccggactggtgcagcagatgcaccgggtggtgcaaatggttccggtagtggtgcaggagctgcacccggaatcagtcatgatccaatcatagatccagataataaaaatattaatcctgttcgcggaaaagccaaaagcaaaaccgtgatgccggaaaactttgctccgacaccagaacacattgagcaggccaaagccgccggtctggacattcaggacgagtttcagaagttcagcgattaccacgccagcaagggtacgcagtatgtctgctggaactccggtttcagatactggctgaatacggccgccggatttaaacgctctgcggactcaaagaacatcgacaccaccgagtgcgatgaagtcttcagaaaaatgttctcatcctccgactggaagccagaaaaccgcgtacaggagctggtcgcaaaacacaaatcctacattgggcggatgaatgaaattgccggacgagcagcattccgcgggtactggaaacaggccacagagcaggccgcaaaagaacgggaggctgcgtgatgatgctttacacccgaattgcggcagaggaaccggccggaactgaaatcacttccgggtacatcatggagaaatacggcgtatcacgcagtatcagccagtcagctgtaagggttttagcgaagattgaagctgtcacgccgacccggtggcgggggaatgaccggatggctttccggatattgccggatgcacaggagaaagtccgcgaatatgaggaactggtggcagcctgtcggcggggagtaaaaaaggtccgctgtacggacccggtaccggaagagagccgggccactctcaccgaacgggaatttgtatccgtctataaccggttgtttacggccttcacggcaaaacagcgggaactgagaagaaaaaacggtctggcgatatgaggcgcagtatacggctgcgcttaatgagcggagagataaacgatgagcaatctgattattgttgacggtattaatgtgcgccgggacatggccggtcgctattgcctgaatgatttacaccgtgccgccgggggtgaagagcgccataagccatctaactttatgcggatggaatcaacacaggcattgtgttcagaaatcgaccgatgctcagatatgagcatcgcctctgtaaacaccattcgcggcggtacggagcaggggacatatgttgcccgtgaggttgtttatgcctatgccatgtggataagcccgctgttcaacctgaaagtaatccgtacattcgatgcggtggccggaacacagcaggcggtacagctggccgataaggtacaggcaggcgctatcctgctggagtctatggcgaaaacgctgaatctgtcgaattcctcaaaactgggcgggtatcagaaactgcaaaaaatggctggtcttccgggtctggctccctcctatgctattgatgcaccggcgggggcgggagatggctccagccgaccgacaacctctctgactacgctgctgaaaaatcacaatgccgcattgtctgcgaccagagcatacaaacgtcttgctgaactggggattgtcgaacagaaagcccgtccgggttcgaagggaacacaaaaactgttctggtctgtcacatcaagggggcttctgtacggcaaaaatatcacatccccggcgaatccgagggaaacgcagccgcatttctttgagagcaaatcagcggaactgctggcactgatgatgaccccggcggtggcctgatgaattatctgttaaccggctttgttcagaaagatacccggatcctgatgtttaatcccggtgctgagatttgcaacttccggaacggtgcccgttatgttgtcagtgcggctccccgttcaatggatggcattccgtccggccgcgttccggcagatgcacagccgctgctgacagatgagcgggtactgcgtttcctggacaatcccgccgtgataaaagctgccggtggtttacagggatttcgtcattacgtttcatcagtaaatcattgccagattgacgatgaagcagatccgtatcatcaccatgaactgaccatgacacgctacaaagacggttttatccggacgtgctggcaccatgacaacatcttccgggaggggaatatccaccagcagcaggcggatgaaatactgttgcgtaaccaacgggcatttgtggcacgcagtatctttaccgacctgcggctgcccggcggccatcttttgaatccttccgatttgttcacctggtctgtgatgcatcgtgtcagtgagcatcttccggccttcatctgttcttacattctgatgcagtcaccggaagaagagataaccggcaccatgacggagcattccattgttcaccggacgcgctcacacagccggattgttcaggacatcgttgagcagataaaaccggttgttgctactgatatagagccggagccaccagccagttttatgcggatcccgaagttaaagcgctgggagtgtccgaagtacctgcaatgggtgaagagtcagccgtgctgcgtatgtggtcagcaggcagacgacccgcatcacatcatcggtcacggcaccggcggtaccggcacaaagacacacgacagcttcaccattccgctgtgtcgggttcaccacgacgaattacaccgcgacccggcagtatgggaagcaaagcacggcagccagttggagctgttatttaagtttatgaaccggtcatacgggatcggtgtttttggttaatgcgctgtaaggagtgcggagagataaacgatgagcaatattcagatgatattagaacgctggggggcatgggttgcggataacccggaatctgtaacctggtcatcaattgccgccgggtttaaagggcttatccccgtaaaggttaagagtcgtcagcaatgtactgataatgatgcactggtgatatccggcattatggc

SEQ ID NO: 27 - DNA, 63190 bp, unknown
  Altogen 322075 strain
  misc_feature (368)..(368): n is a, c, g, or t
caaccgggttatatgttttaaacgggttaaagtgtggtggctgctgcattattcggataatcccgccagcggcgggaaagcaataaaaagagcactgtgaccgaatacggattaggtaatgagcctgtcgtattccaatgctcttatcattgcgggcaagaaaaaaggccacacatggcgacctttggaatttgttttatgtcacataagtggaatttcagtatggacgataaaattgagtaaacataaaattaaatagtatgtagtttcatacattaccttgttacatatgctttttcgccggttgctactcaccggctttttttgtacctgtgacccgtcctgaataaccgaacatgtgaactatntccggctttttttgtacccgaaattggtggctgatttagctcagccgagctgctccgcgctaccagagcctcatagcaagtattcagccgactggaatagccgaaaatatgaatcactctcaaaacaccagagtgttatttttaatatcacaacccataacgcaatcttaatgattgagggtagggattaaaatacctttgttgattcagataattatcagggtactcagataaatagtgcgttattaatgtcaatggcgccaataaaggctgtattccctggcgatattctaaaattaatttacttaatgcctgtctttggtttgatgttaaatagcgtttaaaataaccttggatatgcataagcacattagtgtgattgcgtcgtgttgcttgattttgcaatagtttcatgaagttatttcgatactctataaaaaacgattctattgaattccattctttgttattagcaacgagacgacctaattctctataaagaggctgagagtgtgcaagtaaaaggagtttgtatcgagcatgaaaatccattaatgagcgacgatttaatgatttttgctttagttcattcagttcatgaagagcaaatactcgtataataaaattttcccgaatatgcgggtcacttaacctgccatcttcctcaaccggcaaccacggcatcgcttttactaattgctcagtaaaaaggccgatcccagactttttattaccattacctacagaatcatatacccgaactctttccaaaccacaactaggtgagtttttacaaacaatataaccggataaattaatagttttactcagatattcagtagagaaatccaccattttttgagttaaatcaccttctcgtccatcactgaatttgagtataacgtttttttcttcagacttaaccaacctcaatgcaggtctgggtgcaggcaaaccaatagccatctcagggcatgcggattggtattcgaaataatctgataactcatcaactgcaaagtgaaagcgcctatgtccaccatcaaatctaacactatcacccaataagcaagcactaatacctacaggaatttttttatcagaagtattattcatataaccagatgtaggtaaaaaattcatttttgtcaccttatacgaaatcaattataaaacaacgttgatatatagtaattgaactcatattagtaacattactctttatttgctagttttataaataacgactctacactctgataaatcagataaaaagccccaccgaagtgaggcctgcactactgtttcggtactttaatccacgtttaatcacactatagtagcgcactacagatatagtgttttcacgtgaaactttcaagaccgtgcaataaaactcccgcatcagtgaggtttcaattgatatgcaatatgacacgggattcattcttatcacaataatgctatttcaaccttagtctgctcaaagcgttccgcttccatctccgcccagaacgcgacgattgtgcttcagagcggctttcaatgtcgcccctgaacccataaaaaaatcagcaaccatatcgccttcgtggctgccggcttttatgatgtgttccatcattgcggcctgtttttcatctggggttgaccagcgttaaaagcagcccttatctattttcaggcaacaaaaaacccagcgcattggctgggttagttggtacagttacaaaaacggcaacttaccctgaaatagtggctcattgattcaaagaagtcaacacgtttttgttatttcgcttcatgatcttttctttttccctgtttttaaatgcatctaccagcggttggtataataaatactcagccgcttttagaattttatccacctcccggcggcatgtagacaacgacggtttgcgggaacgtaacatgccgtttctgcgcaccatgacgcggggcgcacagaccttatgatgctgccgggcaatttcacgatcagaggcacaaaagacataccgggccaacagcattttaaacgcctcacggtccaaatgataaaggtgatcaaccaccccttgtatcaacattccatcttcatcactgcaggtcggtctatccgggtagctgcgtggctcaactgtagccataaattcagctatcatgctgctttgccgtttcaccagccgaccgctgtacacccacgccccgaatcttgccagccaattctgtaaccaagcctcgcgctctttgtccagcgataaaccatctgaaatattcattacacccggcataaacgcagctccttaacttcctgttttacctgcttcagcaattcacgttcgctgccgtggatctgctgccatgtttccggcgctgcatggaatcccgttgtgtagcatgcccggtggtgctgcggacacaacgggagtacagaataatgatccgcccgttgccccataccctgtccgttgcgcacatgatgcaattccgcacgagatgccccgtaccccatgttacggcagcagatacagccgagttcggctacatccgacagccattgctgttctgctttggtctttgatttggtcattggtcttgcctctcaggtaaaatctaataactgtgctgccgcgttctcagcggcctgttgcgtggaaaaattgcggtacagaatgaagttccacagcacatctagtgtggatttatagagttcgccaaattgcaggtcatccattttggcaaagctgattgatttcgcgacacggcgcaggctgccgtcaggcatttcgtaggtgtcgtactggccggattgttcaatggcccaggatcggaaagcgtcaaaggattttgtcgcggtaatattttgcgcgcgcttttgtgctacatcatcgagatagacgtcagccgctgactgcagggcatcgtcattgtccgtgtaatacgataggaatttcacatacccgcgaaccagttctttttcttccggcgaaatggtaccgccgaccggctcccaatattcataaccgaggttcaggagtgcgaaatatttacgatgaaatcgtgggttacgtgcttttttgaagtctgctgacagtacatcaccgcacttaacttttgaatgcaggtaatcccttgctgccggatttgcaggcgcaagagtatcgttggggagtttgataaagctatactgtgccatggtgttctccagtgacacagcgggtattcagggtgccggttgttcatgccgacaaccaataatacattaataaaaaaatatttatagctatatttttatttccctaagaatgtcatctcaatactctttacaaaaaattcagccgaaataaaaaatcattcatacatagttaacctttatgatgaaacttacctacattacatctcccctctccacaaagtaattagtcattaataaaatatcttatataatcaccaattattaaaatccatttcaattacttccttttaaatatatagcgacaagtaccgctgctacagtaaaagcaaccagaactactcgctctccatttctaataaatttttttatatatgttgacctatatctaaaatcattaaaaataagatattgcctgtaaaaataatgagtaaattttgccgctgaatgctgagatgtgcatacacagtacttaaaaaatattgaaaaatgcttgattataacggcttcatttatttgatatggattagtatatttcccgataattatttcattttcatcaaatttaccaagatcagattcataaggcgatacaaacacgataacctcaccagacggcccttgagaataccacaactgtgcatttctttcgcgagctatcataacgtctgtctcatctttgttaggaataaacagatctaaaagcctatttcctgtataaatatgaatagaattaatatattgataacttaataatctcctacgctccattaagtgattatcggatttacttaggtatagattacctaatttactttcagataatgtatcaatttttattttttttaattcagtttcaatacgttcagccatgaatatccaattgacacgttttatccgtgcataaatttgatccctttctatttccttagctgccttctttaatgacatcattatatttccccatatattcgaacttgtaagtcgtcaacatttagtataaaaaacacactaccattaactagaaaaaaactgcaaaccatttaaattattataatatttacttttaatcaatatatcttagttttaatttatgcctccccatagtattccaacatttagatcaccactaaaacaacatgttgccaccggcagctttttactgcatttcctgcaagcctttttattcagttcctcaatctctaacttcagcttccgatcatcaattctgattaatgttgtcaaaagttcgttaagctcataagactctcagataaaccgccaccacgcacaattatgctgcagcattttcagttcctgttcctgttcctgttcctgttcatccactaacagctcaggtttaacgatgctggtattattttatcatgctgactgtacaattttcctttatttcattgtttttccttacattatataaatacagccctactttcccagtaattaatacaactgatacacaagtagctcatcagtgatactacggatattagagtattttttacaaccataatattgcttttataaaaaatgatttcggctataatggctataatattttttaaaaaatgagggttattatggcaaggcaaccagttaacaaagatacatacgcatataaacaggatgatttaaaatctgcatttgcattagctgttaagaatataattaatttcggagatacagatatatttccattcccttatgaaacaagaatgtttgatgatatatttaaggaactattagattctcttgaagaaacacataaagactttaataacaaaataaatgaatgccctccggtaaatattagtacttgctctactgttggctataatggataccgatgggcaacactaatagacccatattggaatgcttactttttaggaataacacttcttctcgcatcaaaaatagaaattgatagagtaaatgcaaatcatgtatattcgtatagattttcaccagattataaaactggatctttattcgacaaaaatatcaattattgtataaaaattttatgatggccataataaaaacacaacctgatacctcctttatggtacatgtataaactgatacggtactttttttcgggtccggcatgcggggatagttatcacgcacgagagattcgcacgtaacaggtctttgattatcatggtctttgcctctgttggtcttaaaatgccttgtcggcgtaacggcgtctcttaggagcctccgcctgttgctgcatacggcttacttctgctgctgaaatctggtcggttggcagatagtggccgtttttaaattcctgatacacagttccggtttctccgtgccggttcttctcgatgatgatctccgcatagttttttgccgggctgttcgggttataaaccacgtcccggtaggtgaggaagatataatctgcgtcctgttccagactgccggaatcacgcaaatccgcagccaccggacggcgctggttcagtggtcgcttatccacgtcacgggataactgactcagagccactaccggtgtgtgaatatgtttagccaggcctttcataccagccgatatcgcagctatcgccaggtcgttacgttctgctttaggctttttaatcagcccgaggtagtcgatgaaaatgccttttgtggccggatatttgcgcttatggcgctcactgatggcgcatatctgatcaatggtcagattactggcatcgataatgtgaatatcccggtcaatcagatgtgcgattgctgaactgatccgcgcccagctctcgtcgtccaaatcgcagttacgcattttggaaaccggcaactgcgcagccccggcaatcatacgctcggcgatctgcatgttcgccatttccatggagaacatcagcacagagtcaccagcggttgtcattttttccatcatcgtgagtgccagttcagttttacccatgcccggccggccgccgataaaaatcaggtccgtagggttaaaaccaccgattttatcgtccagtgcttcgataccggtccggatcatcatgccgctgccctcgccacggttccgcttctccagcacatcaacatagccgtcaatcagttcgttgaggtgaaccggtaccaggctttctttctcgctggtgatcagggtgaactcgctgctgaacttctgaattacgctttcggcctggtcatgagtggccgcatcagtaatttctttctgaaatttatttatcagcgctgtaattttacgaacagccgcatagttcctgactttttcggcataccctttcaggtttgcgtatgagatggtttttctggtgagctccatgatatgagcaaaatcaccatttcccccgagagcatccgcgataaataccggatcgataatcgcactcgtcagtgcctgtttttttatttcccggtacaccctggaaaagtacccgacactgaaagcgtcatcaggcagtgttgccagaacgtcataggcatcctgagtggcaccaccggccagcaaaccaccaatgacagcggcttctaattcctgctcactaaacataatcaattactccggtagcttggccagttgaacgacagcactgcgccaccttccagcatgcggtcaataactcgttcacccagcagcggtgccagttcgttcagcggcaggttgctgatcatgatagtcggcagcatgtcctcataccggtcgttaatcacttcaaacaaaatattgcgctctgagtcagttccgtactgcaccccgatttcgtcgataatcagcagacccggctcgcagtatttttccaatacgtcgagctcgctgtattctgcatcgccagcccatgtacggcgaaaagcccggatgatacgcgccgctgtggtgataaataccgattccttcgcctcagtggcaacctgacgggcgattgatactgcgaggtgtgttttcccggttcctggtgttccgcacaaaataagtccctctccggcggtttttcgggatagccatgtatcggcatactcgcggcagatgttcagattgcttttcgcatccggattcgccggatgatacgtctcaaatgtcgctgcagcaaagcgcggcgggatgttcgcggtcagttcgtcagacatgcttgcccccgttcacccatgccgcagagcggctctcgtagtttttatcgctgaatccgaagtgtgtgctcggcttagccggtttccgacctgcggtgcgttccgggaatattccctgccagccgttggcaatcgagtcacacagcacagaatcaggatccggatgcccggccagctttttgccaatctgccgacagctggtttccgtcagtggttttttaatttccttgcggaattttacccaatcctgccagacaggttcgctgacgttttccggacgaactgacaacgggtcaaatttcaccgtggattttttctgcgtcgcaggcttcggatcctcttttgaatttactgatggatcatgttttgaatttactgatggatcgcctccagattctggagggtgaaaaccccctttaacgccagaatctggagggtcaaaacgcccagaattactgttttctgaccggtcggattctgaaccgtcagaaactggagggtgaaatattgcgttattttcacgctgttttttcagtttcgcgatttcctgtaacgcgatagtttccagcttatcaacattgagaaaatataaattcgatgcgttgcggttaccgttccggcgttgttttttcctcagccagccatccttttcaagctcactgcatgcatcacggatagtgctgacccctgccccaatctgccgggacagtgtttctacgctcggatagcagatcccttcatcattggagaaatcagccagacgaaccataaccatcagttttgtccctttcacgccggaaacagcacaggcatcccatacatagccctgaattttattactcacgtcacacccccaatgctctggcaatgtcacggcatgcgttctgatactgttcaggggtcagattacgctgcagtaatttcgctttctgttgctcatactgttcccatacattgagggctgccacacgacgaccttcaaaaatgggccgaatctgttcaatgtccacaggttttccgttatgcataaacccgttgcgataggtgattttttcagttgtattcagcattggtctttgcctctctcatgcgctggtcatgcgcatcgcatttaatgcggttactgcttttgatatgtaatgtgacatgtcacgactgcctaaaagtgtttcgctgattgctgcagcaaattctttgattgccagggaagccagataattaaccgactcatccccgttaacccgtgccaaccgatcagcaggtagtgcaattttgattgccggaatcagctcactgaactttctgtctgccgccggagaatttccgcgcaaccaacggaaaattttctgcctgttgttattaatcgctttccagtccgcgttaccggccccgtcttctattgggtgtaggcgtgacggtttatcaccacgcagtattaaaaaatgcgccctgctaatttcgattgcgacatgctcctgtcctttttctgccgcccataattcaatctcatacttaattatttggttgttattcatcatcttgcgtctcctgtcgcgaaattgattatgaataatcagttttttaactggctagctgagataattcaccacggtcgggtaaaccatcagcaatgttcggataaatttctggcgctacctcatggggggttattttccagctgaggcactcacacagacttaaaactttttgtgccggcactccgtttttaaaccacagatttaccgtttgtggttttattcccaacctgcgggcaatttctgactggttggccagtgtgacaattttgcttttaagatttggtgtcatatcggtctccttaacctgattacaagttaatcttacaattacaaattggtaatttcaagtttttcttgaagtgatgagtacaagaaaaccttgtaatatgacattatgaaaaagaatcctaatgaaacatcagcagccagaatcagccaggttctcacagagaacggatggtcacagtctgatcttgcccgcagaattggtgtaagacctcagtcagtccaattctgggtaagcggaaaaacggcaccaagcggaacaaatttatctgcattggcttctgtgtccggctatccggaacactggtttttaatggatgatatatctaaaggaccaacccggcagagcgttacaccaaaaaaacatgattcatatcttgttgaattacttgatgttgaagccagtgctggcccaggcatcataacaaaaggtgagttcatggagacggtcagatcgattgaatacacctccgatgaagctttacgcctgtttggacaccggccaagtgaaaacataaaaatgatcactgttgccggtgatagtatgcaaggtacaattaatcctggtgaccaagtttttattgatgttcacataaattactttgatggcgatggtgtatatgtttttgtctacggacaaacattacatatcaaacggttacagatgattaaagatcagcttacagttatttccgataataataattatcgtgactggcaaatcacgaaagaagacgaagataaatttttcattgccggaaaagtgctgattagtcagtccagagtttacaagcgctacgcctaaatccccattcaacattaaactttaaattacaaggaattatgctccttgtaatttttaacgtctgtaattacaagttttatttgcaattcaagcttgcaatattcagtttttacttgtagatttatctccatcaaaaccccacagcgggtattcaggataaacgttcacagttttacatcagcatcaggaaacaaatagcgccacgaagatggcagaagaggcaagacgacctgacaccccggaaagacggggatctaatcaaaacgggggttatatgaaagaaaccgatagcaccaaaagcagagagcaggaaataaaggattacgttggctttgtaatgagtgacgttaacatcctatccacgagcatgatccctaaaatgattgaggcgggatctagccttaatgatatcaaagaaaaagtggacatactggcggaagcgtatatctacacgcgattaaaggtactgcatgaagggcgtaaattaattgaagatatcaacaaatatgacgccgccatgaatgcagaaatgacggccctgattaaatcgaatgcccgtaactacgaattgggagacagcttcacataaggcgaagtaaatccaaagcggctttttctgcgtcttcaattgctgtttctgattggaaagatgtcagtaagtgagggtaccttgcagcctgacttaaatggctaatttgatgtttaacttcttccctttgttctgaggttaacacattaaaaatagcttttaacaaaatatgctgagcatctaattgctgttccagatttttattatccataattcagttccttaaacacgttgcggtgactgaattatacacagattccttgcgttgcggaatgcaggaacctcagccgcctgatgagggtaaataatcaggcatcggatttcagacgtaaaaaaacccaccgaggtgggctcttttacccggagtcgccgaccaaagctaatccggagttctgctgacgggaccaaccgtcagaagaggcaagaccaatgacgaatcattggaaacatcattttaaaggagttgctatgaaagcacaacctaaccccctcaaagtcacgctttacgtccatgcacaaaagcggttcgacggaagtatcgcgtattcagtatacacccacaaattcaaagcgactgacggcatgggcttccctgttgccgaacaccagcttgaattacctgtcccctcagtcagcaaatttgatttagttcaggccgaaattgacagcttacgtgcagaacaaaacaagatccttgctgatgcaaccgccaaaaccagattactggaagaccagatacaggcgctgctatgcctggagggcaaagtaatttccaaagatgacgaagcattaccttactaaccagaggcaagaccaatgaccaattatatctgtgcatttaatcccatagatgcggcacttaaagacggtgctgtgactgttgcaatcacgatttctgccaattcagagaagatggccagagcaatggccgccgtgatgctggaggaaacttatcctgaaaatacaggaaagtttgatgtggcggcaccaataatctgcgaagctcaggcaggcaaaccagcaccgaccggcgatagttttgatgaacattttgccaaagagtacgagttcaacggtacagactggcaaaagcgtgaagagaaaatggtcgtatttgcaaaaacagcacctgttgtgcgtatcgccgccatcctgttgtacgggaaaacgcaatttacccgtagcgagtacctcaaagctgtcgattttgttcatatcggtgacgaatacccactgctccggaatatagccaaaggtgtcgcggccacgcccggggtatccctgcttaacgagcaggaactggaagcgctggtgaattttgtcatgcaacaggcaccggacagcatcaccgaaaaagaggcacagaagctggcagaaaaatatttatcccctgctgctgaaccagccacagggcagctcccgatcacggaacacaagcaacgcgattttgaccacaactatgcaacactggatcaggaaatagctctcgcccttcttcccggtgatttttcaccgtgggaaatacagccaagcaaacttactgctgcgaaaaagctgatcagtgatgaagatgaaagctggcggcgctggtctactgagttccgtattatcccgaccgcattgcagatcccgcgtgaaacagtctttgctgtcgtacgtgaaggaaaagaattacctgacctgataagcgatgcggcagcccgtaaacagtttgtggctaaccgtatcggcataacgctgacagaaagcagtcatgaccaggaaacaggccggtccggtccggatattacggaagataaaccacccgtagcagcaaagcaggaaaagaccaggcgcacacgtactaaaaaagcagataaaccggcagagaaaccagctccggaagtaacggccaacgatgaaccggccaccatggcacaggcaccggaaccggttcatgacgaggaactcgctactgatgacttccgcagccgcgccgaggtgattgccgaggttctggcagacacggataacctgagtatctggaagcaggtacagcgcacagatccacgctttaccaagcctttagagggcgcgggatttcagggtaccagcattaacagtaactacatgtttatgcgtgctaccgaaattttcggaccgatcggtgagggctggggctatgaggtggttgaagaaaaattcctggacggcaaaccgctgactgaacctgttctggaaaacaacaaacaggttgctctgcgttacctgcgtgacgcagacggttctctgttctgcgagcaaaatcattcaataaaaatccagttttggtaccgcagcaaagatggtaagtgctgttattttgaaagctatggcgcgacaccataccgctatcagacccaatacggcataaaagttgatagtgaagtcatcaaaaaatcactgacagacgcgattaaaaaagcactgtcaatgctcgggttttcttctgatgtgttcatgggtatgcacgataaccctgaatacctcatcaaaaataaaatggaatttgaaatcaaagcggccagcgagaacgcagaggacagcgtccggatccgcgaggagctggacgagaaatttaaacgcaacacggaaactatgcggacggcagtcacgaccaatgagctacgtggtatcgcatccaccctgtcacgggagatttccgtacatgttaataatgcaaaatcccgtggcgataaagaatatcagaaatacctcgagggccgcctgcgccgcctgaaagctattgaagatgaatgtttaaccgcactgactgaaaaacaagaggcagaccaatgagcacaaccgcaattgcattagccgcagactatgaaaagctgcaacgactggtagagaccggtgaattcaccccggaagaaatagccgacacactggaaggtatcgagggcgcactcggcgataaactggacgcgattatgatccacgtccgtaaccttgaagggcaggcaaatacgctgggtgaagaagccaaacgcctggcggatcgtgaaaagtcatttaagcgtcaggccaaagacctgaaaaaatatgcactaacctgcttactggcatccggccaggacaaactgaaaacagtgaaaaacacatttactgcggcaaaaggtcgggcatcagtagttattgacgatgaatcacttatccctgattcactcgttgatgtacaaaccatcgtgtcaccggataaaaaagccatcaaagaagcgctggaaaatggtgttgaagtccctggcgcccgaattgaaattggtgaacgttcactgatggtccggtaattacccacggtgcccggcaaccgggcactttgtttcagtgtgacatgtcacgataaggcagaccaatgctaaaacaccaacactacaaagaccggccggtaaagctcacgttccctgacggcagtcacggctacatccatacagaccgccggtgtgatgtgtattacgacctgcctccgcaggtgaaaattgaggcccgtaacgaaccgcagcagaaggatgaaagcaaatgatatacggattgttcatgctgatttgctctgccaccagctgcgaatatcagccctacggctacgtttatccggatgagcaaaattgtctgatggataaagaaacactgaccgtgaagggtattttttcagagtgctatctgattgatgaaattatctcggccgatttttctcagacacaaagttgattaagcataatcagttttattccgccacggtgattaccatgatgccaataccattacaggggaaaacatcatggaaccgtggcaaccaggacaacaattactgaccgactttgatattaaattaggccgcctggctgcgagtgtaaaaaacagaccatgcactccggcagatattaaacgctcatgcgatacagccgaccttcttattttattgatgatgaggcaagaccaaaatgaaaaacgagagtgacgtaattaccccggacgaaatgatagaactgaccggctatcaattcccgtcaaagcagtgtgaggtattagagcgcgccggtatcttttttataaagcggccggatggatacccgaaaacgacctggacgcattttaacagtccactggctaaacgacagacattaccagcatcagaagaacctgacttcggagctatgtaattatggggaggaaaaggaaaaatcctgctgataactggatgccaaagcgggttaaacggggcagatctgcttttgaatttattactccggataacaaaacaatccggctttgtgatttttcatgtactcaggctgaggtatgggtagcatacgaaaaactgatagacgatcagaaaaatgaggcaacattgacagcattgtttaactcatttttcatttccgccgactttactaacctgtcaccggaaacacagaaagattatcgtaaatattccggcaagctattgcctgtattcgggaaaatgcagcctgataatataaagcctgagcatatccgtaaatatatggataagcgcggcactaaaagcccgacacaggcaaacagggaaaaaacgctgctatcccgtgtttttggctggggttatgagcgcggactggtaaaaagcaatccatgtaaaggtgtgcggcaattcaaggagcaagccagggatcgctatattacagatgatgaatataatgcgctctattccgtatcccctgtagttgtcaggatagcaatggaaatagcgtatctctgcgcagcccggcaagctgatgttttggcattaacttattcgcaattaacagaggatggtatttacattaagcagggaaaaacaggtgtagcacaaataaaggcatggacggagcgcctgcatgcagctataaacctgagtaatactctcccccttgattctggtatcagcagtatttatgtacttcatcaatccagaggatccgggtatacacgggatggtttcaacagtcgctggagaaaagccaaagaagctgcagctaaaaaattcccgcacctgaattttaacttcacctttcatgatttgaaggctaaaggtatttcagatctcgatggaccactgtcagaaaaacagaaaatatcggggcataaaaatatcactcaaaccgcccggtatgacagaaaagtgatggttgttcctgttgtcggtggtcagaaaaagacagtttgaaggagagaatatagtgaaattatatagtgaaaatatagtgaagcgtgattcagggcacaaaaaaagcgaccgtaaaggtcgctctcttttaactctaacccactgataaatcaatgaatttctatatggtgcccagagcgggatttgaacccgcacagcgttgccgccgagggattttaaaaaccatgatagcattttaaaaaacaataaattacgttaattcaatgaattatagctattgcttattgctatttattatagtttatccgctcttgctgccacttatttttctatttcatccagtgggtttaaggttacagcagcatcaagatgatccggtgaaaaatgcgcataccgcatcgtcatcattattgagctgtgacccaatatttgttgtaaaactaatatatttccgccattcatcataaagtgactggcgaatgtatgcctcagaacgtgggttctctgtccttccggtaatgagatattcgctttttttaatgcccgctcaaaagcatcgtagcagttcgaaaataaagccccccgccgtttaggtaatttgtcaaataaggtccttgatatcggaacggttcggttcttcttggatttggtttgtgtataagtcactttacaaggcataacgtgtgattgagttaagccctgcgcttcaccccagcgtgcgccggttgccaggcaaatccggacaacaatgcctaaatctttattgctggagtcgtcacacgctgccagtaatttttttatatcctctgcgtataaaaatgccagttcctgatcagactctttgaactggcgaacaccatcaagcggattatcgccagtccattcacctaagcgcctgagctccgcaaatactgcgtgaagatacgattgctcacggttaacagttgattgctttggtgaccccctgcctttcgcattccatttgccttttaaccggtgctcacggtattgagcaaatagatttttatcaaaatcagaggctaacggatcgctgagccgttcgcatatagcgtcaagtttacctttacgcgacttcccgtcactcagtgttttaccgtgcatgtcataccaacggctaattaaatcactgagctgaacagcgttagaatcattcacagaatacaaactactttcttccgcttcctgcataatgcgtcgttcataaccaagagcttcgcctttagtggcaaaagtctttcgtatacgctttccgtccctgccctctgggaagcactgacacaaccattttccattaggtaatttgcttacagccacagcgagatcctattttatttgtcacacaacgcgagagcgtcagaaataaacggagccaaacttatttttgcaccaggcatatccggattttctttccagaaagaagaaccgttaatatcgtcagcaggatactttccttttttcgctaattgattggcaagtcctgtcatggcataaacattattcgtgtcatagtccataacaaaagcgccaccatcaatgcactgcaactgaacttcatcacttgtgaaagcccacttgtctccgtaatcatcttttgagattgctttcagcggcattgctaaagcagcagaagatatgagcaataaagcacaggataatactattttcttcattttaacggctcctattttgggtacagtaaattaaagttatttaaccttctttttttcaactagttctgattgcgcgaacgcaacgccaaccgcctgcatatttaatcgtgccgcatcattcattgcgcggtaattctctatcagagtttgttcttcttgtgttatatccgttggtatagacgaacgccccgtcaaaataaaattagtatcgaatccatacaagccagatagcatcgctaataccgtagcatcaggaaccgtttcaccgcgttcatatttaccccatgtccttgtagacacaccaatatttttcgcgatctcttcttggctgatgccagaattttctctttctcttcttattctctgaccaattaggaacaatagttcctcttttgaggttgacataggaataattcttccttaaagtgatttaaacaggaacttagtggatcacaatatatcatgatgaaacaagcaaaagatcactcacggtcgcgtttaccgcgttccgttgaggaaaaaaagctcgtacctatgcggttgttttgttctgagcatggtgcattagagcaccttgctgagcgagacagccgttccatgtccgctatggctcccctgatttttctggaaggcttaaaagcctttaacggcaaaaatgatgagcaaggtaacgtatgaattcagtgtcgcttcgccatatgtctcgctgaaagagtatgcccggatatccgggatcacgttaagtacatgcagggctatggtgagacgcggagaaataatcattcggccaaaggtacgcgagaaggacactgttcaggtcaacatgattgcaatgttgaaagacgcattacggaatagttaggtggtcaatggttacgcaaatcagcacacacagccaggaatatcgcggatttattattatcaccctaccgcgtaacgcgacacggaaaataacgcagtatcacgtcaccctgtctgatggcgctgatagctgtcattcgttcgggaagtttgacgcactggcgcaggcgacgggttttatagattcattgttcgatatgaaataacggcggtaacttatgcgtgcaacggctgaattaattgatattacatcacagttacagagtggagatattaatcattcgctggctggcgttaagagttacaagaataacggtatgtcattttctgaaaggacagaaaaactaactgaggccggagcattgcggacaactgtttttttcaaaaacaaacaggataatccggataatagagaactagccggatttcttgaatatatgcggctgtcagataaacgaatgttagacatgattttctttcttgctgaattgggtaataaagaaaggaaatatgcaggcctgacaaaagaggaaaaacagcaattaattattgctattaataaaataaagtcactaacggcattaatgccgaaaaatatttcatacccgatttaaatattgaccaaaaagaaaatgaccttaaccggtcagggctttttattacctaaaaatgaggttttaaaatgaaatcaattccggaaccaatattcacccctgtagctgaaaatatcaaagccaaccgcgaagacgagcgcaaaaccttgcttgatgggtttgccggtcgtttgcgcaccatttcccataaagcgttaagacagaaaatgacaccaactgaaatttatcatctgctcaatggtgaggctgaccgtatcgaaaacgaagcgggagagctgaaccatgtctgacgaaatcgaccgcgctaatgaccacgccgcgcttgtgcttgaaagccagatagccgctgcccgtatcactgctgcgggtgtgtccgcgtttgaatgtgaggggtgttgtaaaccaatccctgagccacgccgccgcgctgtggtcggttgcaccatgtgcattgattgccaagcaattgatgaactgaaaaacaaacattaccggagcgtgtgagatggcggagaaaaccatcctcaaatgggcgggttcaaaagtcggcattatggatctgttacgtccgcacctaccaaaaacagaacgcctcgttgagccgttcgccggttcttgtgctgtaatgatgaatactgactatgagcagtatttaattgcagatgtgaataatgatttaatcactatgtatcgcgaaatcgcatcatttaaaaccaactgggttttagagacggcaaaggatttattcgagatcgaactgtgtgaaccaggttattacgaggaaagagatttttttaataaagctaaatcagcgctgccaaatgtagttattgctgcttattttatttacttaaaccgtcactgttataacggactgtgtcgttacaaccagaaaggcgattttaatgcaccgcgtggaaattataaaaaaccatacttcccggagaaagaaatccgcgcatttgctgccaaagcagtaaaagccaacatccagcacctcgtatggcaggacacgttatcgctggtcgattttggtgacggtgtgtattgcgaccctccgtacatgggaaaaaatttcactcaatatcacgctgacggattcacggatagcgacaatgaagcactggcctttgccctgaaagatttgaatgatattcagggtaacccggtcacagtatcgaattcactggcagcaaaagagctgtatgcggatttaggcttcactatccacgtaatagaagcaccgcgcaccattgcggccaatggtaaccggaagaaagcacctgaaattattgctgtgctgggtggttgccaatgagcatcatcgacccgcgcaacggcatttatattaccgatacccgctacgctatcgtccgccgactgccggaagagcacgcatcacttccggcatatgcgctgattgaggctgatcttgaaaacaatagctggtcgttggtttcccggtatgacaaccctgtcgttatggttgctgaccttgtcgccatgcaggttatcagaccgaaagataaaccggtaaaaacactggatgagtatttgcttttcagcgaaatgatagtgaaacgctgtcagacagcgctgtctgtactccgagaaatgccggttggtggtcggccatgaccggaaaaatcattgatttcagtgtgcagccgccgccggaaccggcgggttttgtgcatgaatggaacaaaacgcgacatgaggcggtgctgggttttgaacagccgttaacgcctgcacaactgaaacaaaatcaggatttgcaggatgaaattgagcgcttgccgcgcatgctgcgttttccgttccgtaagcgctatgaaagtatttacgaagaaaaggggctgttagaggctcacagatatctgtatttcaaattttaccgggaaatacttccgcgagttaatgcagttaatgaccgattttcagtgcgtcatatggatcagtttaatgcgctaccggagttatccgacaaggccgttaaattactggcaaagcaactggcgaaagtattttttgagcgttgccaactgctgatcgataaggtcagcgagattggtgatggtgccatatttaaatttaagtacctgtatgaaatatacgggcacatggcagttgatgccaaagaactgcatatcaccccgcttcactacagccggtatctgaaaggctcaattagtgaaaaaaatatccattctgcgcttgcccgtctggtgaatgatgatttctggtaccgacgtttacgggcgcaccgagcgcggtggcgtgaatcgctgctgattgccgttatggccgtcaatatgaataagcgtccgtatgccagccgccaggcgattaatgaagtccgcgcccagcgtaaagcgaacgaagaatatctgaaacagatggatatcgaagacaccgagacaggtgagaggtttgatctgtttgaaaaagtgatggggagtatttccaaccctgaaattcgccgtatggaacttatggcacagatcgccggcattgagagcgtggctatgcaacgcggtgatatcggcatgtttgttaccatcacgacaccgtcaaagtaccacccgacaaaggttaccggtaagaaagacgagaaaaaggccattattaatcataactggtcgaaagaggcttacacgccaaagaacggacagacatatcttgtccgcgtgtggtcgaaaatacggacagctttcaaggattacgggcttaaagtctacggtattcgcgttgttgagccgcatcatgatgggactccgcactggcatttattgttattcactgacaaagccagtcgtacgcaggttatcgacattatgcgcaaaaaagcccttgccgttgacgggaaagagcaaggcgcacaaaaacaccggtttaagtgtgaacacatgaaccgtggtggagctgtcagttatatcgcaaagtatatttctaagaatattgacggctacgcactggacggtgaaatcgataatgacaccggaaaaccgctgagtgatcccgccgcagccgtcacagcctgggcggcaacatggcgcattcctcagtttcagttttataacctgccgtcgaaaggcgcataccgtgaatgccgcaagttgcgtggtatttctatcgcagagcagatcggcgatgtggcagaaaaggtcaggtttgccgccgataaaggtttttttgatgaatacatcctttctcagggtggcccgtgtaccccgcgtgacctgcaaacggtcagagtcgcgaggcgtgccgctgatcggctgaaccagtacgacgaagaagtcccggaagtattcgggatctactcccctgtttttggcggtgatgtcgtcaaaacccgcgaacgtaaataccagattgttaaaaaacacgacagtcaaaacccagcaccggctgccgttggttttgattttaatcttttaaagggcggcatcgccgaccctcggagtcctgtcaataactgtggatcggtgatctcagccgatggtgataaatcgccagatttagcaccaaactacggcatgacaggggtttaccaaataaaaccgtggggttcatgcctcagtgataaagccgctgagaaagcggcacaggaagtaaaaccggcacaaatcgccagacgggttaattcccgcatcactttaagcgacaaagaaatcgcattcatcccggaaatacagaaattcaccactgcaatggggcatgaaatgccagcggacgggctgatgatgatgtttattcggggcatgaccgttgattacggtgatcaaaaactgttgttccgtgatggccggatgcggctggagctgagcaacgaggtaaaaacgaagagagtatggctagggattgctcaacaagagcagagaatagcggcgctgttaggccggattagaaagataaggaaaaaatagagttaaacctgcaattgatgattaaaaacacaccataatatttaccgaattacaactattactctggcaaggtcaatacacttcattaaaattcgtgagtttaatcgcaaaaaatttattttatatgtaataaatatcatgttttacacataagatttattaataactatcattaattaatagatatggataatattacaccctgttctaatataaacaaagttaggagtatattttgaaatattttgctactggttttttccttaaaaaaggcaccactgcaaaggaagttattaatgaatgcttatcatgggtttctaattctccacatacaaaactaataccagcccaaatcgattttatgcgaaataactgtgatgagtttgagttagaaggtgaaaatgagaaaatagaattaactaaatactctgaaaacagcctttctatgtattgttttagatattctaaaataaccatgccacataaatggattacagacatatcaataaacgaatatataaatgaaggaagcttatgggtgcaagtacagtctaacgtactaactcaagatgctgcatataaatcgccaaatactaaaagaccattaatagtaatgaatcttcttgataaattctctggaggagatgatgatatatttaatgttggcatagaaccaatttatttaaaagatacacaagaggatattgaaaaagcaacaagtattattaattcatcaactaaaaacagacttcctatagtttatgttagttcacgatattactatagagaacatgcttacaatttaataccaacacgtttagcaagaaagttgtctggattagcacatgttgttattgaaccaacaagtatcatattttctaataaattaaagtttaaagttaacgggaaaaatgtatatggtggtgcagttggaatatattggccaaacggacaagaaattagtgttcataagcgagggttattaaatgccggtgattttgaagatctaatttttgatgaggttattaaagccacaacgtcgctagtaccattaaaaaaaggtggctggatagaaataaataatgcaaaaaatagaaaatcaattcaagtcttaaaagaacaaggctcatcctcagatcaactattatctctttatgaagaagaaaattccacattacacgatgaagttcgagatctaaatagcaaagtagagatgcttgaatatcggattaaaaaattattagaaaaaacgccagcacaaggtgacctatacttaaatacaggcgatgaagatgatttctttgagggggagatatctgagtatttaatactaaccttagaaaagtcactaccatctattagaaatgattctagacatcaccatattataaatgaaattataaaaaacaaccctcacaaagataaattaaaggaattagaaggaaagctaaaaaaggcgttaaatggatatagagaaatgaataaaaaggtatcatcattacttattgaacttggctttagcatatgtgaagaaggaaaacactataaattaacataccaagaagactcccgatacacatatgttttatctaaaacaggcagtgaccatcgcggttgtttaaatgccatatcagacatatctaataaaatgttcatttaatacttttcacttcgaccattcaatagcaacgttaatccactaaaaacgttgctataaaaaacaacaaaatcacagagcttaccctataacctaacacttttattaaagatagattaataaaaacatcattacgattaataaaacaatgaattaaattacttaaactccctcaaaaaaaccagacgcaacaaacatgaccacacaaaaatatgctctattttataataatcacaaataaaaaacgtcctatttttttataattccaacatacctagttttgaatgagttcggacaaaaataatcaaaaaccgcataaacagaaaaggaactatacagcggcgcaaccctatatcctgcgggattcgaatgctcccttgcaggtgcatgaaaagcggtgcatttagtgggcaggcgtggcgaggctacgattgcgcggcagcatgtttatccgcttcccggttgtcgcaaatttcccgggcgtagcggcgttaaaaacaaaaataggtggtacgggttatcttttttcgggtcgtcgcacagtgcgatacaggcggtataacagatggtttcagaggggcaaaatccggcagattcgtattccggccgcaggttttgtataatatattggggcgttattattattggtaacgccgatcttcattatgtacggacgtaaaaaaaccgcctgccggcggttcctgttttcgtattgtgattaatcatccggcagccggtaatcctcaaaccggatcacctcctgaccgcgccagtcattcagctgtttcatcttggcctgtagcggcatcagttcattacggacaaacacctttgccgccttttccacatcaccgaagccgccggtattctgcggcagtatgcccatcagctgcggcggtacccggtgagcggccagcatgtcatcacggctgacgttcttgatattcaggaattcatccttggcggcaacttcactgagcggcatgatctgaatgccgtctttcttcccgttcggggcatacaggaacaggttgcggaagttgccgggtcctttgctgctgcgtaccgctttacggatgttgtcgatatcacccggcgtctgggaagaatcactgatatacatgatgtacccggcgtgactgccgttaagataataccggcggcggaacagcgtggcggactcgttcagcagggttgacggcagtgcggccagatattccggcaggccgtacagttcctgattcacatcaggttcaatcagatgaaacaccgcaccgggttcaaacgggtacggttcactctcatagccgtatttggtgaaccagtactgatccccgtcaatcccgcgccgggtgtatttcgccggggcgtgatcaaaccgcaggatgccgccgagacggttgtaacgggtttcaacgtaggcgttgccgaacatcaggaagtccagcgcgaaactgtcaaaggttttccggtctaacagcgggtgcgggataaaggtgctggtcagtatgttacgtttcacatagattgcgctgctgtgatgcggtgctgcccggaacgctttggacagcccgttaaaactgagcggcggttcataccagtgctccatccggacacactccagataatcataaatctcgcggctgtcgagcaccgaaaccggctcaccgaacgtgaacgcctccacgccgccggtattctgttgtttatgctgtttgtttttgtttctgcggctcattaataaagctccacgatattatgatgttgagtgttttcacctgtgataggttcgttatacagggcgtgcattgccgcccaggcgagatccgcatgactggcgtcctcgctgcggctggcttcataggtcgggcggttgccgctggcggtggttgagcggcggatagacataaacgactgaatgacgtcccggtctccggcgtcgaactcaaggcgtccgctgttgatgacatcccatgctttcagcaccagggcgttttttaccgccgggttatagacgaactcccgcacctgcgggaaaaactcctgcaccgatttgtaaacaccgtggccgatcccggtactgtcgataccgatgtattccacgttataacgttcggtcagttgtttgatggcttccgcctgagcgcggaaatccatcccgcgccactggtgacgctcaaggatgcggaacgcgccgccgaacatcaccggcggtgcgatcaccacacacccggcactgtcgccgccctcagttccttttgccgggtcatagccgatccagaccggccggtgaccgtatggccggtacagttccggctgaaagtcctcccacacatcccatgaatcaaccaggcaactctgcatcagttccagcgagaaaatggacgcgatatcgtccacaaagtcacacatcagcaggttctgatattcgtccgggctgtattcaaggcgcaattgtgcgatatcgaacaggtcacagccgccgcgtaccgcgtcttcaacggtgacaatctgccgccactggccatcctcacacagacgaccatcacgtaatgccgcatggctgatatcaatatccacgtgatccgctttggcacggccccggttaaacagttttcctgaccagaacgggtacgcactgtgggtcaggcttgacggtgtggaaaaataggtctgccgccattttttgtgcatcgccatgccggaggcgactttgcgcagctcctgaaatttcgggatccagaaatattcatccaggtaaagattgccgtgataactttgtgcggtccgggcattggtaccgaggaaatacagggtggcaccgttcggcaggacaatcgggtcgcctttcaggtcaacatcgacttcgcgggcaatctcaatgatgtactgcttgaatacatgtgcctgtgccttactggcggaaagaaatatctgattgcgaccggtcagcagcgcgtccataaaggcttcgcgggcaaaataatatgtcgcccctatctggcgggatttgaggatatcgcggatgcggttctgcgccccggcgcggtaccagtttttctgatactcaaacatgttccccatgaaaatctgttccagcttttcgatctgttcgtcgctgaacacatttttttccggagccttacgttcaccggcgttgcggttcgccagtttcgggttgagatcggtttcattgccgccgttctgatagcgccggattttggcggcacgctccagctgacggcctaacaggtcaatctctttgtaatcctttccctctttgctttctttggcgataagctggcacagccgcgcttcaatagtgaactccacccggtcaaaaggcgtgatgtcatcccactggtcgcggcgcttccagctgtgaatggttgaggctttcttacccagcatttccgcgatccgtgcaatacggtagccgctgaaatacggtgcatggcctttttgcgtgagtcaaatacggttatcgtttccatgccgccagattactggccgcacttcccccgcgccctgctgttctgttgtataccccgggcgtacaacagcctttcattgtttccgcagcaattcaccggaaccatagccccatcattactgacaatcccgtcctgactgatggagtcattcacatgaccgtaaaatcaaagccggtgcgtatctgcacagagggtgccaccactgacggccgcaccgtacagcgcagctggctgaccgatatcgaaaagaactacgacccgaacgtctacggggcgcgtattaatattgatcaccttaacatgtcctacatgccgcgcctgggtgatgtcgaatcggtgtataccgaagaaatcaaagacggtgcactgaaaggtaaattagccctgtatgccacgctgaaacccactgacgacctgattgaaatgaataaaaagcgtcagaaggtatacacctctgctgaaatcgccccgaaatttgcggacaccggtgccgcctatcttgtcgggctggcggtgacggataacccggccagccttggcacgcaaatgctgcaattcagtcagggcgccggggaaagcccgttcgcagatcgcaaacagtcgaaagacaacgtgatcacactggcggaagagaccgttatcgaattcaccgaagataagccggatgaactgaaagtgccgtctctgttcacccgtatcgccgaagtgctgaacggcaaaggcaagaaggacgatgcccgttttcatgatgtgcatcagagcgttgagctgatcgccaaagccgtcgaaaccattcagacggatgttgccgcgctgaaaaaaaccacacttacggtggatgcaccggaagacccggcggaactggctacgctgaaaaaagaactcagtgaactgaaagcgcaactgagccagcaggacaacagcggccataagcgcccggtgtcactcggcaacaacggcacacagccggaagaactgctgactgactgctgatcccggcctcaccaaatttgagaaagagaacatgaaaaaagagacccgctttaaatttaacgactacctgatgcgactgtctgcactgtatgaagtaccggttgaggaactgaccagcaagtttgaaatcaccccgtcagtcgcacagacgctggaagataacgttcagcagtctgcggcgttcctcggctttgtgaatattgtccctgttccggataaaaccggtcaggttatcgggctgggcgtcggctcaagcattgccggtaccacggacaccacaaaagaagatcgcgaagcgactgacccgtctgaaatgacagatattaagtacgaatgtcagcaaaccaactatgacaccgcgctgacctaccagaaactggatctgtgggcgaagttcaaagattttcagctgcgcatccgtaatgccatcatccgccgtcaggcacttgaccgcattatgattggctttaacggtacacaccgcgccaaaacgtccgaccgcgccgcaaacaaaatgctggaagatgtcaatatcggctggctgcaaaaagtccgcaccgatgcaccactgcatgtggtcagtgatgtgaaaggtgaagacggtcaggtaatttcggcggtgatccgcgtgggtaaagacggtgatttcaataaccttgatgcactggtaatgagtgccgttgatgaaattatcgatgaggaataccgcgacgatactgaactggtggttatctgcgggcgcaagctgttatccgacaaatatttcccgctggtcaataaagagcaggaaaacagcgaaaaactggcagcggatatgattatcagccagaaacgcatcggcgggttacaggccgtgcgtgcgccgtacttcccggaaaacgccctgtttatcacccgtctggacaacctgtctatttactggcagagcgaaacccgccgccgccatatcatcgacaacccgaaacgtgaccggattgagaactacgaatccgtcaatgaagcgtatgttgttgaggattatcgcggtaccgcactgatcgaaaatattcagatgcagaacggcacccaaaaaccggaagcaccggacaccggtgataccggcaaaaaggacggcgaataatgggcggcagtattttccgccgtcatgtaatgcgggtcagtgcgcagcaggatgcacagcagcgcaacccgcagacacagaccggcacggcttacacacaaatgacactgatgatgaacgctgaccgccgcaggctgaagcgcatccagtcatttgagcgcaaagctgctgtgaagcgggaaatgctaccgaactatgcaccgtgggtcggcggtattctggcttccggcagaggacagcaggacgatgtactgatgcgcgtgatgctctggcggattgatgccggagactttcacggcgcactggatattgcggactacgccctgcgccacggcctgaaaatgccggaaaaccacacccggacaaccgggtgtgccattgcggaagaaatcgcggatatggcggaaaagatgtacgccgccaaaaccccggtaccgctggatgtgctgacccgcaccctgagcctgaccggcgaagaagacatgccggatcaggtccgggcaaatctcctgaaatggctgggctatgcacagcgtgatgacgggtatttacagcctgccacctgttcgtggctgcgggcacttgaattatatgaccgtgtcggcgttaagcaggatttgcgtcagctggaaaagttgatcgccaagcagcaggaagaacgcgacgcggcacaacagaacgagccacagcgccggggcggcacagcggaccagccgaccggctaatccgctgtccaccgcccaccttttacggggtaaccgatggacttcacatcagacaaaacaacagacatagcggacgaaacactcagcagcggggattttttcccggatatcagtctgcgtcattatcagcagtcagtactgacagacggcaaagtcaccacggaacggctgcggcacgcactggtcaacgccatgatcgaggttaaccgcgaactgtcagcatggaaacggtcacagactgccgccgggtttacttcactggaagccgtaccggccgaccacatcaataacgacagtgaactgatgctgctttaccgccgggcggtatacagcggggcaaaagcgacactgacagagcgttaccgcgacaccgacaccaccgacagcggcgaaaagaaagccgccgccctgagtgaaactgttgatgatctttggcgtgatatgcagtgggctatccagcgcatcaaaggcgaatcgcacaatatttgtgagctgatatgaaagtctttgcgttacagggggaaacccttgatgccctgtgcttccgggtgctcgggcagacggccggtgtggttgagcggacactggaactgaacccggggattgccggtcacggtgcggtgttaccgcacgggacaccggttgaactgccggatgtggcggaacagccgcaaaaaacaatgatccagctttgggattaataacacctccacaaagggggatgggtatgaaaacgatgaaagaacactgggctgacattctcgacacactaaaaaacgcctggccgcagctgtccggcgtagcgatagcgatttttatccgctatgcgtgcctgatttatgacggcgacacccgtaaaaacaagtgggctgaatgcctgctgtgcggtgcgctgtcatgggcgattatcagcggcgcggaatttatcggcattccgaacggtgccagcggcatgatcggcggcgcggtcgggtttttaggtgttgagaagatccgcgacattgcacaccgcatgattaataaacgactgggagactgattaatgtcacgaggtatccgaaataataatccgggcaatattgactatcacccggcgaacaactggaaaggacagcttgcgcacgataaaaccattgagccgcgcttctgtcggttcagtgcgccggagtacggcatccgtgccattattgccctgttacgtaactatcagcgcaaatacggactgaataccgtcaccggactaatcagccgttgggcaccgtcgaatgaaaacaacaccgccgcctatgttcgcggtgtggcaaaagcccttgctgttgccccggacgccgtgatcgccctgtctgataaaaacaccgcgatccgcctggcgaaagccattattcagcatgagaacggcagtcagccgtattctgatgcggtttttgaaaaggcgtacgcactgttatgaccaccaaagcccgcattatctcgctgttattcagcctgcttattgcgggcttattatcattcagcctgaagcattactacgacaaagccggacggctggccggtgaaaatatcgcgctgaaaaaagacctcgaccggcaggccgggattatcaccgcgcagtcatttgaatttaaccggtttaaccggatagcgcaggttgccacgcagaataacatcacgcagcgtgccgcctcggaggagcgccagattgaataccgcaccattcttaaaaacactccgacctgtggtctgcctgtgcctcgctctgtttctgacggcctgctccgcgacacgtaccgtctacgtgcccgcacaatgcaccccgctgccggactcgctgacaaaaccggtgcctccgtccctgccgcccggactctgacctactgcgagctgccgctgtggattgatttgctgatcacggatctggatgaggcaaacacgcagctggacggcatccgcgccgccgaaaaggcaagacagcatgaacaaactcaacagcattaaagataccctgtgccggaagattccgtacctgaaagataacccggaaaaactgtatctgttcgtggatgacggcggcatttttgccactaatgaaccgtcgctctcctacgaatacatttacagcctgaatattatccttgaagcctttcccggtgatcagaatattgtgtttgccgtggtggttgaatgggtgaagcagcatcagccggatattctcgccaacccggacaaacgcgccaacggcatacgctttgaggccgatattctcaacagtcagaccgccaacatcagcattgacctgaaactgacagagcggattattgtttctgtacaggacggtgcataccacgttgaagcggtgccggagccggaaaacccgatggacagctgggaatacctgaatgtcagaaaatagtcttgatgccctgaatcatgaactcgccgggctgctggcccgggtcagtcctgccgaacggaaaaaactgtcgcgggcgattgtccgtgatctgcgcaaaagtcagatagcccgcatccgggaacagaaaaacccggacggcagcgcctatacccggcgcaaggcgcagtttattaccgtacagcgggaaatgcgtttcatctggcgcgggcgtgagcggcggctgaagaactggcagcagaacaagcggttaatcaccggtaccgatattgataaaaatgcacagcgctcattccgcaagggtgatattcagcggttcacagccattaaaaaagaccggataaaagtcaaaggcaaaagtaaacagacccgcatgtttaaacgcctggcaactgtccgttacatgcgcgtgttctccaatgaaaacgaggcggcgatcttctttgcccctgccgccgctaacattgctgcagtacatcagttcggtcagaaagaacggttacgcaaccttgatattcagtacccacagcgtgaactactgggcttttcgcctgatgatacccggcggattgaaccagccattatcgacttccttgcatcctgatgttgtatctgacggacatacaacactgagccggtgcattaatccccggttcggtggcaggctgtccccatgagcgcaaacacccaaatcgcggaactcctccgcctgatcagaaatatcatccgtaccggcgttgtcaccgctgttaaagtcggtcgcggctgtcgtgtacagaccggcgatctggaaacagactggttgccggttgtgacacagcgtgccggaaccgcccgcagcagctggatgccgtctgtcggtgaacaggtggtgatcctctctgtcggcggcgaactaaccacagcggttgtaatgcccgggcttttttctgatgaatatgacgaaccgaccgcctcactgacggcaaaccacgttacctacccggacggcgcggttatcgagtacgaaccggagaccggcgcactgattgcgaccggcatcaaaaccgcattgattgaggccggagaaagtatcacggcgacctcgccggtcgtgattgtgaatgccagtgaaaatatccgttttatcaccccgactgttatctgctctgacaatctgacctgtgccacgctgaatgtaatgaaaggcggcgagatgtccggcaactttcaacacaccggcgggacattctcctcaaacggcgtggtgattgatgaccatgaccacggcggcgtagagcgcggcggaagccggacggatggcccgcaatgaaatattacggatttaatgccctgaccggcaacggtatcacagatattgagcatctccgccagtcggtgcgcgacattctaatgacgccaatcggttcccgtattgcccggcgcacctacggatccctgctgttccgcctgactgatcagccggacaacaaagcgctgcggctgcaactgatgtctgcctgctactccgccctgctgcgctgggaaccgcggattcagattcagcaactgacgatttcgtcaccgcagccgggcagcattgtgatcgacctgtccggggtgtacgccggaaccggccagccgttttccttttccgtgccactgaggtaatcatgccaaccatcgacatcagccagttaccgccgccggacgtgatcgaaacgttagatttcgaacagattttcactgagcgcaaagctgccttgctggcctctctgccggaagaactgcgggcgccggtcacccgcgtgctgcaactggaatccgagccgctgaccaagctgttacaggaaaatgcctaccgggaattactgctgcgccagcgcgtcaatgaagccgcacgcgcctgtatggtggcttatgcctacggggcggatttggatcagctgggcgcaaacaacaacgtgccccggctggttgtccgagaggctgacgacaccgtgatcccgccactgccggccgtttatgaatccgatgctgatttccggatgcgtattccgcaggcgtttgaggggatgagcgttgccgggccggtcggcgcgtatgtttttcatgcacgcagcgcttccggactggtcgcggatgcctcggcaatcagtccggagcctgcctgtgtgaccgtcagtgttctgtcccgcgagggtgacggcacggcatcgccggaactgctggccatcgtcgataaggcgctgaatgatgaaaatgtgcgcccggtggctgaccgcgtgactgtgaaatccgtggaaattatcaattacaccattgatgcggtgctttatttgttcccgacaccggaatccgaaccgatagaagccgccgcccgggaacggatagcgcggtatgtgaaagagcagcaccgcattgggcgtgatatccggctgtcagccatttacgccgccctgcatgttgagggggttcagcgtgttgaactgaaaagcccggcaaaagatatcgtgatcagtaatacccaggcatcattttgcactgatgtgacggtgacggtcggaggttccgatgagtagccgcctgctgccgaccggatccagtccgctggagcttgccgccgccgaagcgtgtgccgcgatagagcgcgtgccggtaccgataaaaaccctggtcaatcctgatacctgtccgctgcatctgctgccgtatctggcgtgggcgtggtcggttgaccgctgggatgctgactggccggagcggacaaagcgtgacgttatcaaagcgtcaatgttcgttcacaagcataagggcaccatcggggcgctgcggcgtgttgtggagccgctgggttatctgatcagcgttactgaatggtggaaaaccggcgaccggaacggaacattccgcctgacggtcggcgtgtcggaaaccggcattaccgaagaaacctattacgagctggagcgcctgatatttgatgccaagcccctcagtcgtcatctgctggggttgtctatcaacctgagcacatccggcaatttttactgcggtgccgccgccaacaccggcgacacactgaccatttatccgtatatcccggaaaccgtccgggtggaaagcgcggactatctcggtgctacgctgataaccatagataaagtgagagtaaacccatgacagcaaagtatttcgctatcctgacgaactacggcgcggcacagctggcgaacgctgtcgcgctgggtacacagatgaatatttccgcaatggcggtcggtgacggcggcggcacactgccggttcctgacccggcacaaacaaagttagtccgcgaaacccgccgggcggcagtcaatcaggtatcgattgacgagaaaaacccgaatttcatcattgccgaacaggtgatccctgaaaatgagggcggttggtggattcgcgaaatcggtctgtttgatgataccggtggtctgatcgcagtcggcaacgctccggaaacctacaagccgaatttacaggaggggtctggccggacgcaggttattcagatagtgctgatggtcagcagcacccaggctatcaccctgaaagttgatccgtccgtggtgctggcaacgcgtgagtatgtgacaaaaagtattgatgccgcaattcaggtatcagaggctaaatctgcaaaaatttacgccactaaaactgagttaagttcagggttatcgggtaaacagccgacaggcgactacgccacaaaaacagaagtcggattaaagctcgacaaaaccgcagtggttcagggtaccggcacatcaacaacaaacgtgatgagtcagaaagcagtgactgacctgtcggagactaaattcgacaaaaccggcggaacaatcaccggttcgacaataatcagccgctcatgggaagcgcttaaaatttctgccacggcacccggagccgcgcattttatccgactggctgataccagcggcaatacagcatcactcggatttctgtctgacaactctaataacctctctctgaataatgaaaagacatcgacgatgtttcatgttgctgacggagaaatcagggtaaacagtaagagatgcctgacaaccgatgacttgtcggctgcggttccggttggcggttctgttatctggagcagctcatcacctatcccggctaatttttggaaacatgacggcaggtctttttcagccgcagaatacccggaagctgcaaaagtaatgcctgacctgaaagtccctaaagacggcgggtattttttgcgcattacggatgatggcgcagggattgaccctggtcgccaggttggtacttaccaggaagatgcggccagaaagctcgaaggtaaaatcgcattacgcagcgtgggtaatgcgggtgaagcgctatatttcccgacaggggcattcaatacagcaaaaccggcgggtattaacgcgagagccatgtcaccgatgaatgacgacataaataacggcggcatggacttgcttattgactcttcaagagtgtggcctacagccagcgagttccgcccgaaaaacgtatctaaatatcttattgtgaggatgaaataatgtataacaccgatttgccgatggctgaatttgataaagaaggcctgtccactaaagcgggatgggcgaaagtatatcgcgccaatggcgtgactggtgagtatatcggtcatgcagatatggataatgtcccatatcgtgcagggctggcagcagatgcctatcttgacgcgcctgaaattccgtcagcaccaaatctggcggtggttcgctcatctgatggtaaatcgtggttgcatgtgcctgattatcgcggatgtgttgtgtatgacaaagagacaaagcagcaggctgaaatttccggtatcggcgaactgcctgataacctgacgctggacgcacctgaaaccccgtttgataaatggaacggtaaaaaatgggtgacagataagtccgagcagcaggcgcatgagatcgctgttgccgaaagtcagaaacagtcattactggctgaagctgaacaggaaattgccctgctggaacgcaaggttcgcctgggaatggcaactgatgaagacaaggcaaaattgaatgagtgggaaattttcagtgtgaaagttgctgacaccgatacatccaccgcacctaacatcgactggccgcaaaaaccacagtaagaaaaaggggcgcttgcccctttgttgtacaactccttcttacaacaccaacagcacgacatcacgccatatcaataacaccatagaaagcaccaaaaagaggagcttctttctatggcacaagattatcatcatggcgtgcgggtcattgaaattaatgacggtacacgccctatccgcacggtcagcacggcaattgtcggcatggtctgtaccgctgacgatgcggatgcaaaacaattcccgctgaataaacccgtactggtgacggatatccgttccgcactcggtaaagccggtgataccgggacgctggcgcactcactccaggcaatcagcgaccagaccaaaccggtaacggttgttgtccgcgttgaacagggcgaaagcgaagccgaaaccacatccaatattatcggcggtaccactgacgacggccgcaaaaccggcatgcaggcgctgctcgtcgcaaaggcacataccggcgttaagccccgtattatcggtgttcccgggcatgacacgcaggcggtcacatcaaaactggtcacgattgcacagacactgcgggcatttgcctatgccagcgcctacggctgccagaccattccggaagtactggactaccgcaaaaacttcagccagcgtgaattgatgctgatttaccctgattttctgtcgtgggattccgtcaaaagtgcagaggccactgcttacgcaacagcgcgggcgctgggactgcgtgcaaaaattgacgaagaaatcggctggcacaaaaccctgtcaaacatcggggtaaatggtgtaaccggtatttccgccgatgtatcgtgggaattgcaggacccggcaactgatgccggtctgctgaatgaaaacgacatcaccacactgatccgtgaagacggttttcgtttctggggttcccgcacctgttccgatgatccgctgtttgcctttgaaaactacacccgcaccgcgcaggtactggccgacaccatggcagaggcgcacatgtgggcggttgataagccgatgaccccgacactggtcaaagacatgatcgacggtatcaacgccaaaatgcgcagcctgacgactcagggttatttactcggcggtgagtgctggtttgatccggatgccaacagcaaagaagagctgaaagacggacagttagcgatcgattatgactacacaccggtgccaccggctgaaaatatcaaactgcgtcagcgtatcaccgacagatacctgatggactttgcatcaaagattaaggggtaatcatggccttaccgcataaactgaaaaacatgaacctgtttttcaacggcgacaactggcaggggaaagccgaagaaataaccctgccgaaactgacccgcaaactcgaagcttaccgggcaggcggcatgaacggtgccgcacacgttgatttagggcttgaagatgatgcgctggggatggaaatgaccctcggtggtatggaagcacaactctataaacagtggggcattgccgaaattgacggtgtgccgctgcgatttgccggggcctatcagcgcgacgataccggggaaacaatagcctgtgaagtggtggtgcgcggtcgcttatctgaaatcgacccgggcagtgccaaacaaggcgataacactcaggtgaagttcagctttaaaccgacctattaccggctggtctggaacggtgctgatctcattgagattgatgtcatcaatatggttgaaaaagtggacggaaaagaccgtctggcagaacaacgggccgctatcgggctgtaacaggaaaaatataaatgactgaatacgttaacaaaacatctgtggttgttgaactggatgaacccatcaaacgcggtgataccgagataaccagcgtcactatccgcaagcctaaatccggcgcattgcgtggagtgcgtttacaggtactgctggaaatggatgtcaactccatgaccgaggtgttaccacgtatcaccgttccctctctgacaaaagatgaaatcggtgcgatgccgccgggtgacctgctcaacatgtcaatcgaggtggtcaattttttgctgccgaagtcgatgcagaacaattacccccaagactgacagtcgatgatttggtggcagatattgccaccatttttcacaggacacccgccgacacggcggaaatgagtctgacagaattaattgaatggcgttatcacgcttacaaacgcagcggtaacagtgaatgagcagaaacctccgtttacaggtcgtgttaaatgccgtcgataaattaacacggccgttccgcagtgcgcaggaatccaacaaacgactggcgggcgctgtccgccagtcccgcgatgcactgaaagacctgaaccgtcaggccggacaaattgacggcttccgtaaaacaaagcagcaactcaccgaaacacagcaggcttatcaggcggcaacacaacgcgccgccgccctcgcccgcgaaatgaacgcctccggcaatccgacacggcaacaggccgaagcgcttaaacgcgcgcagcgtgaagccggtcaactgaaaaaccggtttgaacaactacagcgatccacccagcaacagcgcaccgccttacaggctaacggcatctcgacaacccaactcggacaggcacagcgccgcctgaacagcgacattgcccgcaccactcagcaactgcaacggcaggagcagcagctgcgccgcagcgccgaacaagagcgccggatggcagcggccaaaggcagctatcagaaaacgatggatgtccggaataaaatggccggtaccggcgcggcagcgatggcgaccggcggtgcggcgttatatgccgggaagaaatttatggcgccgggctatgagtttgaggtcgggatgtcaaaggtgcaggcgctgacccggcttgataagaactcagaagagtataaagcactgcgcgaacaggcgcggcagctgggggcgaccacggcatttacggcaaacgaagttgcgcaggggcaatcgttctatgctatggccggatttaaaccggagcagatacagaacgccatgaaaggcaccctgtcgatgtcccttgccggtgatatcgacctcgccaccacagccgatatcggatccaatatcctgactgggttcaaactgaactctgacgaaatgaaccgcgtcagtgatacgctcgttgccacctttacccggtcaaacaccaacctgaatatgctgggcgatacgatgaaatatgtcgcgccggtcgcgtccggtctgggtgttgatctggaaaccgccgccgttgccgccggtaaactcggcgatgccggtattcagggcagcatggccggtaccagcctgcgatctatcctcggccgtctggctgaaccgccaaaacaggctgctgacgcactggaagaactgaacatcaagacccgtgatgccaagggcaacttacgcggcctgccggaaatccttgctgatctggataaaaagacaaagaaaatgggtaccgcgcagcgcgccgggtacttcaaacacattgcgggtgaggaagcattttctgccctgtcggtactggcagaccaggcaggcagcggcgaactgcagaaaatgatcgccgaagtcaaagcggccaaaggtgaggcgcagaaagtcgctgacaccatgaccaacaaccttgacggcgatttaaaaaacctgacctctgcatgggaagatgtcggtattcagatattcggtggtgttgacagcccgctgcgggatatcgcgaaatccatcactgatattatcagtaaggtcggggactgggcgaaacgcaatccggagctggcgaacacactgacaaaaattgccctggcgctgggcgtgatcctcgccgtgggcggcgcgattgttctgatgctggccgcaatgctcggcccggtcgcaatgctgaagctgagcctgtcagtgctgggtatcaagggtgccggtgcttttggtctgctggctaaaggattaaaagctgtcggactggccttattcggtatcggaaaagccctgctgacgaacccgctgtttcttgccgccgcagtcattgccggtatcgcctacgcaatatataaaaactgggacactgtcgctgcgttctttaagaagctgtgggcggatattgtcagtgcctgtgatgccgcatggaaatggataggaagcatcatcagcagagcctgggagggaataaaaaactatttcctgaactacacccttgtcgggctgatttataaaaactgggacggcatcaggaaatacatgtctgatctgtgggaaaccgtgaaaaccaccatcaaaactaagtgggatcaaatcatcacggatattcagaacctcccggcaaccatgaagcaggccgcatctgacatgatagacagcgtcattaacggtattaacgagaaatgggaagacctgaagaataaatttgccgaaataaagcaaatggcaaaagacgctcttacgccggactggctgaaggaagcgaaacaggatccgaagttcgtggcggctgtagaggccacaaaacagagcacaacaactggcggcatccgcaatgtcaactggacgataccggataagaaatttgccggggcctatgattccggcgggcatattccgcgcggccagtggggtattgtcggtgagaacgggccggaagtagtggacggcccggcaaatgtgaccggccggaaaaatactgcagcactggcaatgctggcactgagtacgctgtcccagccgatagccgcagcaccggcacaaaccgccggcggttctgtcagcagcgcgtattcatcacagcagaacgccgcgccggtcatcaacatctacccgacaccggcgcattccgcacaggatatcgccagcgaagttgcccgccagctggacgcgcacgcccgccggcagcaggcaagccgccgcagcggttacagtgacacagaggagttttaattatggctatggctgcactcggcctgttcgtgtttgagctgcgaaccgtgccgtttcaggggatgcaggaagaaaaacaataccgctttgcgtataacagccgggtcggaaagcgtccgtcctggcaatttttaggattatccaatgatcctatcaccctgtcaggtacgctctgcccggaaatcagcggtggccggttctctatgatggcgctggaagccatggccgacagcggaaaagcctggtcctttatcggcggtgagggaaccatttacgggatgtatgtcattgagtccatcagtaaaaataaaagtgagttttttcacgacagctcggccagaaagatagatttcaccatcaagctgacccgcgttgatgaatcgctgtctgaaatgttcggtgatatcagcgcacagcttgactcgctgactgacaccatcagcggcatagggaataaaatttctgacagcattacagggttattatcatgacggattttttcctcaccggtactgagtgcaccccggcatattcgctttccgccggatccgtcaacatcaatgagcggattcaggggcggctgatctcactgtcactgacggacaaccgcggatttgaggccgaccagctggacatcgagatcgatgatgccgacggcaaaatgatgctgccgaagcgcggcgaagtgttatcactgcacttaggctggaagaatgaaccgctgatttttaagggtaaatttaccgttgatgaaatagagcacagcggaccgcctgacaagctgaccatacgcggccgcagtgccgatttccgttcgtcactgaacgcaaagcgcgaggtgtcctatcacgaaaagacactgggtgacatcatcaccactattgcaaagcggaataacgtggagccggtgatcgaaaagaaactcgctgagattaaaatcgctcatatcgaccagaccaacgaatcagacggttcctttctggcgcggctcggcaaacaggagggcgctgtcgcggccataaaaaacggtcagttgctgtttatgccgcagggcagcggaaaaaccgcatccggcaacccgaccccgccgctgctgatcacgcggtccgtcggtgacggctaccggttttcattggccgaccgtggcgcatataccggcgttattgcctcatggctgaacacccgcaagccaaagaaaaaagacgaagtaaaagttaaatgcaagcggaagaccaaaaagaaaagcccggagaaaattaaaaaacctgatgagccacagggggattatctggtcggtgaagaaggaaatgtcctgacgctttcacacacttacgcgaacaaaaataatgctgaacgggcagcgaaagccgcctgggaaaaaatgcagcgtggtgttgcatcgctgtctatccagctggcaaaaggccgggcggatatctacccggaaatgccggtaaaagttcaggggtttaagccggaaattgacggcgcagaatggatattgacgaaagtgtcacactctctgaatgacagcggatttacatctgcactggaatttgaagtaaaaatttcagatgtcgaaatgggtgacggataaacacgtaaaataacactgtatacatcatcagtaattgctataattaacgcaatatcaacatgatgataaaaggtaaatcaatcatgatgaaatgtcctctttgcggcgaacttgcccgcacccgcagttcccgtgatgtcaccactgagacaaaagaacgctataaccagtgcacaaatattaattgcggtgcaacgttcgtcagtcatgaaacccttgcaagatacattacaaaacctcaactgatcggtgcggtaacacttcaccctgctaacgataagcaattatcaatgggtttataacgcagtgtaaaaaagaactattttggttggaataatggcactgtatagaaaatcagtggtgccaatctgctgccacttctgctgccacttgtgattttgatgagcagaaaaacaaagaaaaaagccaccgcaagggtggcttttcttaactctaactcactgataaatcaatgaattctcacatggtgcccagagcgggacttgaacccgcacagccttgcggccgagggattttaaatcccttgtgtctaccgatttcaccatctgggctgaatatggaggcgcgtcccggagtcgaaccgaggtacacggatttgcaatccgctgcatggccactctgccaacgcgccctggagcgggaaacgagactcgaactcgcgaccctgaccttggcaaggtcgtgctctaccaactgagctattcccgcatctctgaacttactgatttacttatttgttttcgtaaaccgctgtgtcgttcggatgcgttgcattctactgatttcacgctgtgagtcaaccgcttaattcatgaaaaatgatcgttcgctgttttttacagcatatcgatcaggcttcgctcaaatccgcccatgcagcgcgtaaatattggaacatagaccagaaagtcaggatcattgcaatgtagaaaaggatgaaagcagcaatttccgtcaggtcattcggccgccagataagccccaccagtgccaccatttgggccgtggttttgactttccccatccaggaaaccgcaacgctgttgcgtttgcccagctctgccatccattcacgcagtgatgaaataataatttcgcgggcaatcattgtgatagcaggcagcgttatccaccagaccgcatagtattctgttaccagtaccagcgcggtcgctaccatcactttatcagcgacaggatccagaaaggccccgaaacgggtggtttgttttaaacggcgggcaagaaagccatcaaaccagtctgtcatcgcagcaatgacaaaaatagcggcgctgacaacaggtgcccagctgaacggcaaatagaaggcgaggacaaagaacggtatcaggataacgcgaaacagagtcagccatgtagggatatttaatcgcataacggagccattattttataagtcagatgaaaaagccgcttgcgcatctgccggcacatattaccgccccgctgattccggggcctgttgcgtgattttcaggttctgcgcaatcctaccggatagcatcatactaccacagttacagataactcaccgctgttattgaaaaaattctcttatccgccgcacagataagtcctgtttattaatgcttaagtgcatggaaaattttttccgccagtgcatacgagatagtcgggactttggcgatttcatcgatgctggcgttacgcagcggctgtaatccgcccatgtatttgagcagcatctgccgccgtttcggcccgataccttctatcgattccagcgcactggtgtttttgacttttgccctgcgctgccggtgaccggtgatcgcatggttatgggattcgtcgcggatatgctgaatcacatgcagtgccggtgagtccggcggcagcgccatcccttccccggaggcggcaaaaaagagggtttccagccccgctttgcggtcactgccctttgccacaccgatcagtttcggtctgtttttatcccagtccacgtccaggccgtcaaaggcttcaatcgctttaccgagctggcctttaccgccatcgataaaaataatatcggggattttttcattgccgatatgtttgccgtagcggcggtgcagcacctgatccatcgccgcataatcatccccgggcgtgataccggtgatattgtaacgacggtattccgatttcaccggcccgttgctgtcaaaaaccacacaggaagccaccgtctgatcccccatggtatggctgatatcaaaacattccatacggttgatggtttcaatgccggtcagttctgacagagctttcatgcgtgtcgcaatagtggattgctgcgcccgttttgtcatcagcgcggtaacggcattggtgtgtgccagcttcagataacgggcacggtcgccgcgcggtttcggctggataaggattcgccggccggcaaactgagacagggtttcttccataatctctttttccggtaacgggaagtccagcagaatatcatccggtaatgagcggttttcactgccctggagataaaactggccgataaaggtttgtacgatttcgtccggctcagtacctgccgggactttcgggaagtaactgcggctaccctgcacgcgaccgttacggataaacaggacatgaatacaggccagaccggcatcaaaataaacacccacgacatccaggtcatctccggaaccggtgacaaactgtttttcagtgacagcacgaacagcctgaatctgatcgcgcagacgggcagcctcttcaaagcgcagtgcctgactggcctgctccattttttccaccagttctgtcagcacttgctgatctttaccttccagaaacaggcggaccaggttcacttctctgtcatagtcctcatcactcaccagccctttgacacacggccccagacagcggccaatctggtattgcagacacgggcgggagcggttgcggtagacgctgtcctcacactgacggacggggaacagtttctgcatcagcgccagcgtttcccgcacggcataggcgttcggaaacggcccgaagtattcccctttggcgtgtttggccccgcggtgaacagccagccgcggatgtttgtcattgctgctcagatagatatacggataggatttatcatcgcgcaacaacacgttgtaacgcggctgatattttttgatataggtgtgttccagcagcaacgcttctgtttccgtgtgcgtcactgtgacatctatctgagcaatgtttttaaccagctgctcggtttttttccccgaaacctgcgtacggaagtagctggaaagccgttttttcaaatctttggctttcccgacataaatcactgtgccttcagcatcatacatccggtatacaccgggctggctggtcacagtttttaaaaatgctttcgcatcgaattcagttacaaccgctttttccatacagggtacaaactctctgctctcagtgtttattcattcatccggcaccacgctgtcaatatggatcagtccgtagcgcagtgccagatgagtgagtttaatgtcaccattaatattcagcttattaaatattctatatctataactgttcaccgtcttgctgctgagacacattttgtcggcaatttgtgtgactttgatgccctgcgctatcataaccatcacctggcgctcctggtgactcagtttatccagcggattgctgtcatgtgcatgcagacgggtgtcaagaatggtctgctgggcgatatccggtgccacatagcgctggccccggctgataatccggatggcgtgcagtaaatcctcacggtcactgctctgatacaaataccccgccgcaccgctgttcatcactttatacggtgagatcaggctgtgttcatctgtcaggataatcactttggtttctgaggtatagcgggtgatttttttggcggcttccaggccgctcatcaccggaaaaccaatatcaagcaatgccacatccgcatgattatcacggcaccagcgcaccgcaccggcgctgtccctgacctcccctgccattttcatacctggtgttgccgtgataatggcaccaatccctgcacggtaaaattcattcgcatttgccaccaatactgaaatcacacagaactcctttctgaattttcaataaatttgccgcaaattatacaaggcctggttaaaccgttatttaatagagatgaaattcttccggtaacaggctgaatattataaatatattttgcggctaaaaattgattgcagtgatgattcaacagaaacagaggataagaaaggaacggctgccgggagacagcagccggagacaggcagataatattacggcatatcaggatgaaaacgatcaatactgaccagttgatcgaaaggcagtttaccgatacgcggataaggctcaccggcggatttgccaatcgccaccatcaggcagatttcatagttttccggcaggtcgataacttcagccaccgcattaaaatcaaatccatccatcggacagctgtcatagccctgcgcttttgccagcagcatcagcgtctgagcaaaaataccggcactgcgcataatttcatcacgctgggtttccggtttaccgcgatagtagttatcaaccgcattgaccataaaatcccgcaccagcggatcagcatcacgccagatttcacggggacgggaactccaggctgccacatcgccacataaaatcaccagcatggaggcgtccgtcatctgcggctgatcccagcccactttgcggatattgcggcgttgtgccggatcctccaccagcagcggccgccagtgctgaagattaaaggcactcggggcgttttccatcgccagtgacaacagtgcttttttctcgttgagtgggatcacaaaatcaggatcaaacttcttggttgctctgcgctggcgaacggcatcaataacattcatacagactcctgtttattccatttattatccggatgatttatttaccataacatgaatttgattccggatgcggggtcacgattacaacgcaaaaaaaaacccgcactccggtgagtgcgggttttcagtcattaactgtcagcagaattatacgaacagtttgaacacgatgttaccgatggtcagcagaccgatgatggtaacgaagtagttagctggtttacctttgtatttgctcagagcaggtacacggttaacagcgtacattggcagtaagcacagcagagatgcgatgattggtgcacccatctgctcaatcagatccaggatgttcgggttcaggtaagcaattacccaggtagaacccatgatgaagaccatggagatcaggttcagtttaccaatgctgactttgtttttgtcgccaccgaaagcaaatttcagtaacagaccgttcataccttccagagtacccagatagtgaccgaagaaggatttgaagattgcaaccagtgcaatgattggtgcagcccagtacagaaccagagtcagagtggtgttagcaccgccgctgttctcaaagtgctgtgctaagtaagtcagaacaggaacgttcatcgctttagcttcagccatgttagccggagacagtgcaaacaggcagctgaatgcgaagaacataaccacacccaccatcagtaaacttgcacgggagatgattttgttaactttctgctcagtgaaatctttaccgcacgccgcttcgtactcttcacgttttgataccacgaaagaagatacgattggtgagaagttgaaagagaacaccatgatagcaatacccagccatacagtgaccagaataccgtcatgaccggtcagcgcgaagctgtctgcgtttacggcattaaagacatctgcgctccagtatgggatcagtgccagagataacagcaccaggctggcaatgaacgggaataccaggtagctcattacgcggaccatcagatctttaccgaagtaaatgatgacagccatcgctaacagcagaaccagtgcaaccagaccacggttcagcggcatcagacccagctggttttcccagaaggacatgaaggtgttggtgatggttacgccgtagatccacagcagcggacagattgcgaagaagtacaggaaagtgatgataacaccaccgcctttaccaaagtgctcttcaacagtttctgtgatgtcgcctgacggattgctgcctgacagacataaacgtgctaatgcacggtgacataagaacgcaatcggatatgccagaaccagcataagcagaatcgggatcagaccaccgtaaccggcacgaatcgggaagaatagtacccctgcacctatagcagtaccgaacagaccgagtgtccaggtcgtgtccgatttacgccagcttttatactcagccggaatctgggttttgtcagtactcatgttgcttttccttttaaaagactatgcaaatattatttttcgtgggtaccaataatttcagagatacgagtcaggtcaatgttcccgccggaaatgatgctgactgtcttcttgtgttcgatatattttttcagttttccgctcagaatcgcagcagacgccagtgcaccggcaccttcggtcactactttgttgcgctggattaacgcaatcatgctttcgcggatttcttcttctgttaccagaatgatgtctgtcaccagctctttcacgatgtcatacgtgatactgcccggagtcgaaacatcacaaccatctgccacagtaccggcatcacgatgggtcgtgattttaccagcacggtatgatgcttccataccatgaacgttttcagattggacaccgatcacattaatagtcgggttgatggatttcagagcaactgcaacaccggcaatcagaccgccgccgccgattggaacgataacgttatcgacatcatacagatcttcaaggatttccagaccgatagtcccctggcctgcgatcactttttcgtcatcgtatggcggggtaaaaaaacggccttcctgctcaatgatctctcttgctttagcaatcgtgtcattgaagttattaccgtgcagaacaacttccgcagagtaatctgaggttgctgcaattttggattttggtgcaccggtaggcataacaactttaccgttgatacctaacatagcgcaggataaagaaacgccctgagcatggttaccggctgagcaggcaacgatgccctgtgctctttcttctggtgtcagcgaacttaacttgttaaatgcaccacggagtttaaatgaacctgtgcgctgcatgttctcaaattttaagtggattgtgccgttgcacttttcacttaaataattggacttcggcatacccgttttatagacatgtcctctgatggttttttgtgcatcaatgatatctttaatggttaccggcagatcgtatgtaatcatgacaaacctcgtcctatctttttatatatattaaaattgagtctaactataccgacaaatttaaaaacaactgtatttcaaatcatatttttaaaatattcccgaaaaactttctcaacgtgtgatccaatccaaatttctttcggttttctgtcttttttaatgttttatatttcatttcaagttaaatgaaaatgacttaatgttgattatttgttaaattaaagcggccagattaacatttcgttgcgtgatgcaatcttttttccgttttttgttatccatgctgcatttttgtaaaaaaatcactgcgtaaaaagacgtacaaatgatcccgtcacgtaaaaaacggcatgtattttgacaaaaattaatcttaccaaggccccatctcacagcaaaatatcctgatttttttaacaatcctgaaaatgcaatgtgatacaaatcactacaaatctcatatccttttgtttattaacgatttgatcgtttttaactcattacaatcctgatttgcggcagatcgtaacatgttcagttgttctgtacgcattatcaccgggcacttacccaagccaaattcggataaaaaatcatcaaatcatttgtttatatgttaatgattcccatttatagccgggatgttacatttccatgacataaatcgtaacgtttttttgcctgatagcccggaaaagtgttcactttaggaaacagctaaatggctgtttttttggcctgaatctgtgttttttttaaccttgcaattaattaaatatatatttaatttgtgacaattttatttaccaggcatctttaaaccaaaattaaacaatgaaaaatattaatttactgaatactgtttttaataatcaaaaaatgatatccggctatttttttataacccgatttcttcccatttatttcattgcggacgtaaatagccggtttttgcctgtgggtatagtcactaatatcaacataagccaactacaacatatctataagcactttaaactgcaatattctgatttttcagatttaatgtttactgtaaaaataatcagcccatgtgacaaatccattgctgaacagcattaaaacggcagaaaatgttattttgctaaaatcgattcagtcataagaatggttttatgcgccgctgccacaattatctgttacaacgctctgctcatccggcagatacttactggtgtgacaatcctcatacttcctcaatcatggcggctttgccattgcattccgggacagccatgctgtaatgatttacgacttaagtgttaaccccggtaaacaggagaatgtatatgttcgacttgacaggcaaaatcgcagtggtttccggcggcgccaaagggatcgggcgcggcatcgtcaccgcgctgaaaaaaggcggtgccaccattgttattgccgatattgatgaaaaaaccggcagcgcgaccgctgcagagctgggaacagactttatggcactggatgtgacctctcagtctcagtgccgcgctgttatcagtaaggtcagagaaaagtacggtcgtctggatatcctctgctcaaataccggtattttcccgcaatgcaccatcaaatccatgacggagcaggactgggataccatgcagaaggtgaatgtgaaggggatgtttttcctggttcaggccgcactgggtgtgatggaagaacaaaaatatggccggatcgtgattacttcttccattaccggtccggtcaccggcttcccgggctggagccattacggcgcaagcaaagctgcacagctcggctttatgcgtagtgcagcgctggaatatgcccgtctcgggatcaccattaacgcagtccagccgggcaatatcctgaccgaaggactgaaagcacagggtgaaacctatctggaccagatgcgtgccactattccgacgcacacgctcggtgagccggaagatatcggttatgcagcggcgttccttgcctctgatgaagccaaatacatcaccggacagaccatcattattgacggcggccagattttaccggaatccccggaagcgctgctctgataaaacagcacaggtgaggataccgcccggtatcctcttatctgccctgctccctcgcggcagcaatcagtgtctcgcccagatagcttttctctgaggtaatccccggcaataccagatagtatccgccgccgaacggtttgatgtaacgctcaagcggttcaccattcagccgtttctgtgtatcgataaagccttttttcaaatccttctggaaggagataaataccagccccatatccagctgtccggacggggtcagccccagcgagtagctgtaactgcggcggcgcagtttggccacatgtcgctctgtggagcgcggttcagcgcggcgcatgtgagaatcaaataagacccggtcaccgtgcggatcctgcttaaagtcagggtcgtcgtgctcatgctctttgcccatcggcgcaccgctggctttgtgacggccaaaatcattttcctgatcttccagcggcgtccggtcccagaattccagctcaaaacggataaggcgtaccgcctgataactgccgttttccgcccaggcgggttcccggccggtgatccagaccaggtcgttcatcagggcatcatcaccggcatcagcattgccggtaccgtctttaaaaccaaacaggttaaccggtgttgtgcggcattcaatatcccgtgcgggcagaaaaccgtcaattttccacaacggagctacccggccggagaggcggcgcaacacttcgcgcagtgcataaatcaccgtttcacggctgttggcacaaaactgcagcaggatatccccgccgcaccaggccggatcaagccggtcgttcgggaacgccgtcatggcggtaaatttttgcggtttcagtggtgataagccgaagcgctcatcaaacagggagtggccgagagagaccgtcactgtcagtgcatccgccgtcagtgccgtaccgagaattccggattccgccggcggcattctgtcatcgcccggtgccgccgcctgacggttgcgggtcagttccgcaatacaaccggtcagccgccggaaaacatcttcaacctcatccagcgttttaacggtcagattcagtgacagaaaaatggcctctttctgctccggtgtgataaccccggcctgatgtttgccaaggtacggaatttcccgcagccgcgcgctgttatcacacgcagccggtgctgcggcggcagaaaaagccggtaacccgccggacaacaggacactccctgcccccagccatttcagggtatttcgtttgctgaggctgacagactcttctgtctcagtcagattcactttgccgtgtttcatggttcattccggtatttgtaatacacgtctattttcagttcagcgcgcagttgtgccagagattctgccagcaacgtcaggtctgcatagagttgctgtttatcttccgctgtcagtttctcatattccgcatactgcccccgtgtatcccggtaacgggccatgaccgcatccggtccggcaaactgctttctgagtgtctcattggtttttgcggataacaacggcgccagcccgctgataatgcgccgggccccttcaatattggcggcgatatctgacagatctgaacgactgtaacggttttcatccccactcagtttagtgctgagaatcagctcaatactgtcatccgcagactgcaccagttttgctgcagggagggtttccacgtcgatccgctgtttcagatcgttaatattgcgcagcagatcggcggtagcggcctgagcggctgccggatcattttgagcaaagagcgcatattcgatgcggtgaaacccggtgaatttcggatcctgctcgcggctgagaaaatagccggcatgagggttaataaccctgtcagcgtggccgaaaaccaccactgccgcgcggataacctcataatcataatgtgcctgaatataagactgccgtggggctgccatatcccccgcagccagcgctttttgcagcaattgcagctgatgttcagccgcagctgtctgttttcccatcatcgtcatgtaatccgccacaaccggacggaatttttccggtgacggaatatcccctttggcgatcaccacatcactgccggtatccggattacctgcacggtatttttccgcatagccgggtgcgctgagcaacagtgatgtcagaaccagtacggcagtccggttaatccgcatgtttttttcctctgcggcagaacagcgcaataatccccagccagtacgccacaaaagtaatgacactcaggccgataggctgtgcacggtaaccgaacaggctggccaggaagctgccggtggtaccggtgtcatccagccagttggtggtatcccacagcggatagatgaggaaatcattcagttcgatatcatgctcggtcagcaggttgacgatttcttctgttcctttaagcagcagcgaacaggcaaggaacaacagcacaataccggtgatgcggaaaaaccatttccaggcaattttccggtaagtgaacaggaacagccacaacgtcagtgccgctaccgcaataccggccacgacttccccggtaaatgaccacatggtgtctgcattcagccccatcacaataccggagaggaacaccacgatttcactgccttcacgggctatcgcgatcgccacaataaacaacgcgccccaccaggagtgctgccgggcgctgtcattcatctcctgctcaataccggatttgagtgatgcgctgtgctgctgcatccagtacaccatctgcacgatcaatactgccgcgaacagcgacataccgatcataaagtacgtctggccgctgtcatccagcacattaaacacaccatagataagcagtgcgagaaacagtgacagcgcaacaccaagtgccactccgccccagagatagcggcgccctgcggcagcatccggatgctgtttaatccacgcataaatgatgccgaccaccagcagagcttcaaagctttcacgccagacgacaaagagaacctgtcccataattaattcctgtgaactgacacttattccgcgatgatctcaccggccggatgcgacagatgaaaatcatcaaaaaaggtatattttccgggtttgagcggtgcaatcaccactacggaagacgcccccggagccagcactttctctttgcgcagctgggtgctttcaaattcgaccggttcggtaccggtattggagattttaatgcggatcggcgttttcgcgggtaccttcagtaccggcggtgtcagttcgccgttattcatttccagttcgacagtgaatttctctgccgctgcggcgggcagtgatatcagggagagcaccgataaacacagtgccataactacgagtttcatgagtgacctcagcgggatagcgacatccggtgtccggacagcagaccgcagttaccggcctgctgttttccttaaataataaactcagtaactgcctttccggccggtaccggcatactcgaagtcccaggagacatcaaacggctcaaaccacggggcaacaccggtttctttatcgatatgacgaccgaaagccacgttgtcgttcatgctcggcggagagatgcggtattcaacgcggtatttaccgtagccatccagcttcaggttttcaccgtagtgcggaccatcgctggcaaccatcgccataaaggtgccggactgggcttttttcggatcatccagtttggtgactttgtaatccactttcagatacgggatccagtccccttccgcgaagccgttcgggttttcctcaacggcgtggatatctgcttccaggtggatgtctgacttatccgccgcaaggtgatgcatttcatgtttgccttccactgccatggtaatcggctgcagatacaccccctgaatctccataccgtttttgataacaggttgtccgagcggatattccagtgccagggcagaggttgataccacgcccagtaatgctgctgccacactcatcccgatacgcatgctgattcctcattgtcattatacaaatagtgctgacaataataatcattaccatttgcgctattcaagtaaaagttatcgcttaccgccacatttttcaatgaaacggttacattttcaccgggattcagccacgaaatacatccgcaaaggcaatgtccggcaggaaatatccgctgttgtataatttgcgcggatgcgttacatcctaatcagccttccgcaaatgagatcacactgatgcaagccgatattgtactgttcgatgattttgaaaccctggatgtgttcggccctgctgagattttcggccgttccccgcattacacactgaattactgctccctcagcggtggtgtgatcaccagttcacagggggcacagataataacaacggtatttgagccggagaaaaccgcactgatgctggtaccgggaggtcagggcacacggcggctggtcagtgatgagggcatgctcgcggcgttgcgtaccgcggcacagcatgcacaatggtgcctttctgtctgtaccggttcggcccttctggcggcagccggtgtacttgacggcagacgggcgacatccaataaacgcgcctggcagtgggtgacctctctgtccgcacaggtaaactgggtgaaaaaagcacgctggtgtgcggacggccgtttttatacctcttccggtgtatcagcgggcacggatatggcgctggcatttattgctgatcgccacggtgagaccgcagcggaggagatcgcacaacacattgaataccggtggcataatgatgccggtgatgaccctttcgccgtataaaaactggacgacaggcaaccatttacgacataatagcgcctctgaaataaaaccggcggatgtttatgttagaaactatcggatttgtgctactggtgagtacctgcggcgacgatgcctgtgaggcactgccggtcacggaagatatctataccagacatgagtgcgaactccgcctgaaatatatcgccaaacgccgtcccaacctctactttatgtgtaacgaggtgatgcgggaaaacggctccggtgatgacgacagccccggaattccggatgatccggaagacacgctcccgccggatgagcagccgtaaccgcttaactgaacggattaattccctgttttatcagacgccggaaacggaaaatcgcccagccgttgatcaccagaaacgtcgattcaatcagtgtgccgccgaccgttcccagccaggcgttatacaccacccagcaggccgttgaacaccagagcacataccgcatacgcaatcccgtcagcaggaaaaacgcaaaggtactcatcagagtgcccgttaccggcagcacctcctgccaggtgcggatattcggcaccgccagaaccagtgtcagtgaaacaaataaccagagcacccaacgctgacggtggctgatagacacataagtccggatgctgttgagcgtggcgctgatcccggcgggatatgcgccaagcagaaaaaagtgggatgccataatggcggtgtaaattgataaccggattttgagcttccgctcattgcgctggacaaaaaccgttgtcccgataataaacgcaacaataccgagcccctgccctgcgtaatacagatagtccatcttcccctgccgtaatcacatgctgaatggttttaattattgtactgccagcataaacataatttgttcaggttgcgagctattgcacgtttcagacattaaaaaagaggcctcagccccttttcttattgcatcatgccgttatcacatgtgcagcggtatcagcatgccatatagcccggataatgtgtctcgattttgtgataagtccgggttttcttattgtcgtcctgaatgacacagattctgctttttgacttcagcgcctgcgggattttctccgcattttcatctgcggcagctgcaataaagatgttaatttttgatttccctttactgtatgtatagggcattcctaacaaacgtctcgcagctctgttagttcgcataataaactcctcattgttgtgaacgttcacctattatagcaacttactgaaaataataaagttttccctaagtggctgatttaccgcctgcataatggtatttcctggccctatcctgtatgttggatatgacctgttcactgaccgggagagtctgataaatggcgtgtattttttgtgatatcgcggcggggaaagccccctgtcataagatctgggaagatgagcactatctggcatttttgtcgatatttcccaataccgacggctttacggttgtgatcccgaaggcgcattacccgagctatgcatttgatctggaagacgatgttctgaccggcctggtgctggcgaccaaaaaagtggcaaaagttctggaaaaggcatttccggatgtcgcacgctgcggcatgtttttcgaaggctacggggtggatcatatccacagtaaactcagcccgatgcacggcaccgcagatatgacagaatggcggccgatcgagcataaacaacccgcattttacacacagtatccgggatttttgtcatcccacgactgtgagcgggcagatgataaaaagctggctgaactggcggcggctatccgcgcaggtcaggaaaaatgagtgattccggtggtgccttcaccaccggaatgttgtgtcagcggacttcgcacccgaccacggtggcatacccgaggccgtcactgtccatcatcagcagacactgcgggctgagggtttccatcgcttttatcagcatcattgccatcacaaaaaccgcttccctgtcagcgctgacctgattatccgcaatataaatattatttttcaggaaagtacggcgctgtgctttattgcagtactgataaatcacatcctgcgccagttcattttcccgcatcagccagaatgatttttcttcctctttatccagcagattcattttttccagcatcggcagatcggcggttaactgcatttcattgatcggcataaagcgggacaaactaccgttaaacggaaatgtattgcgctcaaagtagtagcaggatgtcagcagaacagcacttgccatttcgtgataagccggtatctgaccggcctgccagatattcagcccgaccagcagccacatggcgctgttatcttcctcatcaaacagatggccgatatcatccggtgtctgaatgaattcagtcgcacagccccagattttcgttacattgcgctcaatttctgtattttgcaactgattcggggtgatcacatacacggttttcagttttgactgataaccttcatgctgctgattcagatctttcgccagcgcggtaaaaatggcttcaaccgaatgatcataaccggcaagcagctgtttatcttcctcgtctgaccgctgtttccgctctgaggtataaacctgtttgatacttttcggcatcagcaatgaaaccccggtgaccatcagtctgcgctgacaccagttgacccactcattacgtttgaaattaatggaggcattccagctctgacaggcaatccgcgcctgctcatgacggtgcatggcgtaagtgaacagacacatccagatcagaatgtacggcagatagataaaaatcagtacttccgtcagcgggagtttgaaaatataaaaatcgagaaaaaaaataagggccagaacgacgaacagcaaccccagccacagcgtaattttggcgcccggtgcatcacgtttaaccggaaattcaggaacaggccacgacatcggaatatagctccatgctgaaagaaatacagatatgccgctccgggctgccggaacgacgtcagtgtttgttataaaaagagagatcacaaaaaatcgtgactgatacagggaaataacggcagaccggttaaaaactttaatgggacagcatgaggcagatcacaaaatccgacagagaacagagagaaataaacagaaattaagaaagaggataactgagaaaaaagagaactgcagggagaagaaagatggtgggtcgtacaggattcgaacctgtgaccaattgattaaaagtcaactgctctaccaactgagctaacgaccc

SEQ ID NO: 28 - DNA, 216 bp, unknown
  Altogen 322075 strain
catgcctgcatcacgtccattgccgtcgataaaatgctgcgaccgtaaaccggcttatttaacagcgtaatcagccattcaggaaccgcaccgtaagcgtctacagcagacgctataatttgttgtacctctgcgccatttaattgcgtaaatgcactcacaatctctttcggcgctcctattcgcgtcattgcatccagtgtcgggcggagcagg

SEQ ID NO: 29 - DNA, 77049 bp, unknown
  Altogen 322075 strain
  misc_feature (3827)..(3842): n is a, c, g, or t
tagatatattcggccagaataccaaccgcttcgccggtcatggcaccggtggcctgtgcagtgtaaatagacccattttagttccatgcattttttgagatcccggccaaataatggtgttgccggtattcctccggcgtcatattattcagtgactcatgcgggcgttcacagttatattctgataaccatttctccgtgatctcccgtacttcattcagtgtcctgaacagataaaaatcgagtatttctgtacggtatgttcggttaaagcgctcaataaaagcgttctgtgtcggcttacccggctggataaactccagttttactgcatgtttctctgcccattcagccagtgccagtgagataaattctggaccattatccatgcgtagcatgaccgggtaaccgcgatttgccgcgatcctgtcgagcacacggaccacgcgcagagctggcagattcagatcgatttcaatcgacaacacctcacggttaaagtcatcaacgacattgaacgtgcgaaaacgacggccacagaccaaggcatcatgcataaagtcgacagaccagctctggttcagcgcttccggcgtggccagtggagagggattacgcaccggcaaccgctgtttgcccttacggcgaaaattcagtttcagcagacagtaaatacggtggatccttttgtgattccacgggtgtccctgccccctcagaacctgaaaaaatttcggaaaaccgtatcgtgggtaccgctcggccaatgcctgcaacgcgacaataacgggttcgtcccgcgtggtatccggacgataatgataaaccgttctgctcaggttcagactccggcaggcctgacggatactgagtccaaatgtcgttatcagatgagtgaccagctcacgcttacaggctggttttaaagctttttttcgataacgtctttcagtgcccggttctccaggctaaggtcggcaaacatctgtttgagacggcggttctcgtcctcaagatccttgattttttttatatcagaagctcccaccccgccgtatttggctttccagttgtagtagctggcttcggatataccggtgtcacggcagacatctttgactgtccgtccggcgtcaacggatttcataacggagataatttaatgttcagtaaatcgggctttgcgcatagcgatctcctcagggtacatatcagtatggatgaagagctctgaaagtgaatgggacttttttccgggatacttacacgcccgccgatgctgccttatttgcagcggcttctgtcgcccccagtacgcccagcacattattctcaacactaactcagcaatattttttgtacattaccagtatgaaaaaattcgctaacaacctggattacgaatgaaaaatcggttattatctgatttccaggccaataatcacccaatatgcagaccatttcggtagtaccttttttattgtaataagttcgcacttcataatcatcattcactatttcgcctagcattattaaataattacctgcttcagctcttacttgtaacatttgaggacctgtatcattatcatgaatgtctaatgttatcgttccatatgtatttcttaaagccaatactttaatttcaacatcattccataaaggattgccacggtttcctccaattccatttagtgtccagcttaatgaaaataacattattttttctccttaagtgatttcattccaggattccaatataatgttttcccagtgctttcctcatagacagtaagagattttaaacctgccttgtcagccatagctgcaatatctccacggcagtatccacatacaggctcttttgtaaccctcatattcatatctcgtccaacagtgagaccatcctcgaacgcttgttgaatagtaccaacttcagcatgagcagaagacatatttccatttggtaaatacttactaggattttttctattttagcctctatcctatcattaattaaagttggtctgcttttatcaccaaggaaataatcagaccgatttccttgattcgtgtctttatatattttacctgactccttatctattaactcagcttctactttaggaatcgatgtgtgcgttttttgtctaaaacccagctactttcttgaattactttagattcaggagaaataattccaccatccggcttaccagccgtaactttatgccccagatagttgccggatacaatcaatccaccgagaccaatattgatacttccctcagtccactcaccatcagcaacttgattaattcctttttctatctgattcataccaccgggaatcaaggccagccgcattaattggctggttctccccggaccggctaacaaaacatctgtacctattgcagcctgccatgcatgcctttcttcggcactaagatgccctaatgcttcatagtaagctgaacgcgtatccttatatccctcagataatttaagatattttctatcagaatcttagcatctcttttattcacccccttaactgtaactgtattccaaccgcatcaaggtactcagctaattttaccagaccttttttatcgagttctcccttatggtagcaacaccttgtttaaccaattcgagcatacattcctgctcaagtggagtactgagccggttattctcaacaacaactcttatctaaagataaaagcaaacatgattgatgaaataaaaatcaacctaacgcaccataaataaattctaaattctttttccccattagaaataaataactcataaaaaaaatctcgattaataacctctctattacctaacgctgatgagtatataaaaaaataaatcgcaacaatccacaatgaaattattgatggaaggtattcaattccatatttattcctcacacatacaataaagtaagagattggtattcctaggaatattgaacaccgcccaacaatcaaattaatgttattttctcttaaaaagaaaaccccactaaaaaaatcgttcattgctttacttgaggtaagtggcaccttcttttttctttcgtaaaagaaaaatgacaaaaagaaagaaaccatagataccacactgacaatcatttcgatattcatttatcagtcccgctattgttaaattcatacttgtatttttcagttcctgaagaaccatttatatcaatagattcgccgcctatactcttagatataccactccatccccaagaaggccctgcccctaaacttaacccaacaccatcttttccatgggaaaattctatgttacccacaccaaatcccacaccaaaagaagtatttcgctcagttccacctatattaggaaaatatgggccaaactgaatgcctacttgtccggaaacacgccctccaatagccagagtttctcctccattaatcgcaaactgagatgggtcaacactggcatcataaaaataccctggtcccatccccaaagctgcttcacccttcatataaggtttaaccttatactcaactccccatgatggccgctgatgactatattctatagccttattaatttcatcaactgaggctcccttatccattaaatcaaatgctaaagttgcatctggatttacggagtttaccatttgcccaaaaaatgtattggggccaaatgtattattctcaatcgtcgttttcccggcctgtgccgaattagcagcactctgcgtatcaccaccaaccagtccgccggcaagacccgatgccagggtggcccaggcgctgatattctctttnnnnnnnnnnnnnnnntatgccaatggcttcaccggtcatggcgccggtggcctgtgcagcggcgttatcccctttggccagtgccagcgctgcgttggcgataccgtgcgctactacccgggccagttgtgaatctgtgccctctcccggaatcaggtttttgatttcattagcaataaatggtgccgcgccgttggccagtgccgcattcaggtcaccgttcatcagaccctgtaccgcggcggtggcggcctgcatggcgcgggtgtacttgccgccggtgccgaagcctgactctgtcagatgttgttcaacccggtcgttaaaaacgtaatccgtgatggctttttcgtccggtacggtgtttttgtcttgttcttttaacgcggcaactgcctttttccgctcatcatctgtcactggtgtccggccaaactgctcttttacgtccctgaccgcattggctttggcatgtgtccgggcaatatcaatcacctgaacaccaatttcaccgagcagttgctgctctttcacccggttctgctctttctctttatcaaatatctgattaagcgctgagtgggcgttgtccgtatcacggctcaggtctgccacgtcctgtttctggttttccgtgtcgcggataatccatttgccgtccgagaccgccgcatgagtggtgttgctgctgctctcttttttgttatccgccacggccagggcattgcccaggttggaaatcacctgagcaccgaggtcaccgccggtgcccaggctgccgccctggtgctccacctgatattccgctttgttttccagattgttaaagcccagcgtaccggtgtcgagggtgtttttgtctttgtccgccgtcgaagcaatcaccgcgccgtcaagctgtgtgtgtttgccgaccgtaacctcaaagccctcttttccggcaaaaatacccgtctggttctgtactgattcgtattcactgtgcatcttatcgcggtttgccgaaatattcagtgaaccgctgctcagaccgatgcttcccccggcactgagactggtttgtttcgagtcgtagttatcaaccgcctgctcactctgcagtgtcaggttaccgcctgtattgacaatgactttttcaccctgtgcctgggcacctttcagcgtggtgtcgttgccgctgttaatcgtcagggttttgcccgcgttcaccgtggtatcagtggcaaactgactgttacctttctcgaaccccttgcccttgttcacgctggcgttaacattcagaccggtaccgcccgaaccaaaggtgatacctacccccaccgaactgcctttgctgctgtttttaccgtccacggtctgcgtgttctgtgccgaggtcagggcgatatcattctctgcattcagggtgagattgccgcccgcctgtaactcactgccggtgacggcgatattaccgctgtccggcgtttttccggtggcgttaatggtcaggttatttcccgcgctgacactgctgccctgtgccgtggtctgccgggtggtcgtttcggatgatgaggagctgctgccgtaagacagattcacgccgaaggctgagccagcatccccctgaacatcggccaggcgaccggcttccagcgcctgggcgccggataatcccgccttgatattctgcagtgcttttacgcggccgctttcggtttccttcgcgtcatccgctgtttgtacagcggtattcagcgccccgcctgcggcaccgctcagcgccagtgtaaatccgctctgtttctgttcggttttcgtcagttcggtgtgtgtgttttcagccgcggtgactgcaacggattgtccggagagacggatgtctttttccgccaccacatcgctgccgtgaatagtgaggttttccccggcggtcaggctgacattcccttctgtgctgccgagcgtgctgcctttgccgtaacggctgtcgctgtcggtggtctgtttcatttcctgtttgccgacggtaaaaccgataccgccggaactcatcaggccggattttttctcctcgcgcagatgtgtttcctcacgggcttcatccgtggtggtgaccgtgatatttttcccggctgtggcggtcagatcgttatccgcaatcacctgactgccttcgacggtgagattatgaccggctttcagggtgacggtatcgccgccgaactggctgctgaccgcatcggggcggtgtacttcgtcgtgggtttccagcgatgaggacgacaggagccctttgctggtctgtttactgtgctcagtcagctcagaaacatctttgccggactgaatgttaatatcgcgcccggcagtgaccgtcagggcatttttggcatcaaccgttgcggcggtggcattcatatcccgtccggcgttcagggagatatccccgccgtgcagttgtgaaccaacttctgtctgtgtggtgaggtggcggtagttatcgttaccccagtcgccgttttcagtccgggtggtggtcaccgttcccagcgtgatgtcattcccggcggtaatggtggttttgctgtctttgccggtggcggcaatatcggtcgcggtcagtgtgactgagtctttcgcattcagggtgagtttaccgttatccccctgcacataaatgcccgcgatacggttgaggtgacggttatccgcatcccccgccagcgtactttcactgcggatagtctccgcatttgccgtcagggaattaccgccaatcagcgtaccgccgatattattcagatcacgctgtgcattaagcagcacatcattaccacttattgttccctgattgagaatgtccccggcattgaccgtcagggcgtctttactgaggatcgtgccgctgttaaccagttgtccgttcacggtaaattgtgtacttttaccggccagcagtgcgccgtcgccggttaaatcccccggtttcacacgggcatagacctgcggtaccagcactttctctgtgctgccgtccgccagcgtgacggttttctcaaccagccagaccatgtcgccggtcagcagcgccatctgctctgcagtcagcgccacacccggggtcaggttatattttttgccgaaggtgatgccgttatccatcagtactttgaattgttcttcgtcgttgcggtaatcgccaagataacgctgcccggagagtttcacgatctggtcagtgataagcttctgctcgtaatagccgtcaccgaggcgtttgtgcatctgactgtgatcactgagcagcgcctgctgcatataatcggtgcccagccattttttacggttggtaaaacgcgggtcggtttccaccagatactggctgtcgctgcccggtctgacattgaacaggctgttgtttggcagcgttatcgtgtcattaccggtgcggatcacggtgtctgctgtggtgccgccggtttcagccgtgaccggcacatcaataatcaccggggctgtgcgcccggaggtatccaccgcctgaatgtcggtctgtgcattcatttcccatttatgcacaccgaggtcagtgtcggtgatcaccggtgcgggacggtaacggctggtatccctgccctgcgaggttttggtaccgccgattttccgttttttctttttcgcgtaccagcgggtctgtttcccgatatccgtgacaatatgcacccctttggtggcaatattctgcaaatcaccaatcgtggttgtcagcagtccgcccgccaggacacgactgtctttgttcagcagtttgtcactgttaatcgtcagatccgcaccggactgaatcacgcccggttcagtggttacaacctgcgtatcctcaatcgtccgggtgtagttatattcataaaactcgtcattacgggttccgtccggcatcaccgccgtatgaacgccgtatttatttttacggctgggatcgatatctttccagttaaagcgctgcgtctgacctttcagcacgccctcatgaattttctgcctgccggtgacctcaacccgggtgaccaggttggtattgatattattgatttcccggatgttcagcgtcatattcccctgcgattccagggtggatccgaggttattaaacaggtcagcactgccggtggcgcggtagtccgcatccaggctgcgaccgatattgagcagcccctggctgtaaatcaggctctgtccggtattgttcagcgttttggtgccgatattcaggctgttgcgggccgcaatcaccgccgagcgggatttatctgcggctgcggagttattgaggatatcagcctgaagcgcgatatcgtcaccgtagatccgcccggtggcggtattatccagcgttttggtgctgatgcgggtattcacaccgtcaatcagtccggtattggtgagggtgtgctgtactgtcagcgtggtgttgtccgcgctgatttcggcatcgcggctattggtcagatctgaggtttcaatcgtgacggcgttgccgccctgaatcagggcttcattctgaacaccgttattcacagtcatggtcaggctgccgttagcctgcacctttttccggttggtgaaggtgtcattcagtgtcagcgacatatcccctgacgataacacatcgccgtcaccgctgaggctgccgctggtgaccgtcaggttctgaccggcaatcagtgtgccgccgttgttggtgagggtattggtggtcagcgccgcgttttcatgtccggcaaccgtgccctgagtgttatccagttcacgggcagataatgtcagctgtttgccgccgcgcagttccccttcccggttatccgtttttccggtgaccgtcagttgtgcctcaccgctgccctgaagttttccgcactggttgctcagtgactctgcgctgagggtcagatgttgtccggcaatcaccccctgagtgttatcgagggcgtgctgtattgccagtgtcagtgcaccgctgtcgcgctgcaccattttgccgtcacggtgagacagggcgttcatctccccggtgatcgtgcgggctgaggtttcactgttatccagctgatagttgccgcctttcatcatcagatgaccgttggagacaatcacaccgttttgtccggtgaagtccggcgtggtgatgctgactgtgccggttccggcgtgctgaatacggccttgccggttatcggttctgtctgcattcagcgtgatgttgttgctgttggcggcgatcgtgccgtctttattgatgatcccgtctttatggtccagtttcagatcatctgtaccggtctggattatctgcccctgtgtgttatccagtttgcgggcagtcagttgcagtgcaccggcggtcagtttgccgctgcggttatcaataccgtccggcgcaactgcggtcagcgtaccggaggcggaaacgtccgcatttttcaggttcagtccggaggcggaggtcagcgccatgtctttcgctgccgtgcggctgttttccagtgagatattggctgccgtgcccgccatgcggtcatgcgccagctgctgcccgttaagggtcactgatttcgcggcagtcagagtcatatcgccggtctgtgtcagccgcccgtctttatccgccccggccgccatcacggcaccagcggcattgttcagcgcctgactgtctgaggtgatattgcgtcccgccaggatctgtttttggttatccgtatccccggcggtgctgagctgaatatcccgcccggcactgactgtaccggtattggtgatattatcagtcagtgtcgctttcacgtccgttgctgcggtaataataccgctgttctgtaatttgccgtcagcggagagactcagttccccgacctgcgccccgatagtgcccgcattgcgcacaccgacgccgtgttcggtgccgaccagtttaattttattgccatacataccgccgaccgccgccacatccagcgcaaacgccggtgtggtgccgtcagctgctttttgtgtcaccacattgccctgtgcgtccgtgatgttgcgcccggtggtgatggtcagatcctgtgcatgcagtttggcgttcacttccaccgcacggcctatcagccgcgtgtagttgctctgcgtatcattcatgcctttgccggtaatggctatctgccctttatcgacatcaaatcctttgacacggccctgctcaagcaatgcctgtgccgcggccatggtggtctgtccggcattgataaaaccgcagccgttacaggtgatccccgccgggttagcaataatcacatccgcccgtttcccggccacttcgataaaaccgttaagctgactccggttggcgctgttgacctcattgaggataatttttgcctcaccctttgccacccacgggttggcggtgaccataccgcccagctgtgtctgcgtgttaaccgcgctgttattgaggatcgcacctttgctgtccacatcaaactgactgtactggttgcgggagactccgtcactgttcggcgcctgaatattgacctgcggcgtgccgttggcagaggagatgacggtcggctgctgattgcccggcgctgaaccgtccgcaacaataccgtccgccatcaccggcagcgcaatccagccgagcagcagcatcagaccgagccgcaacggggaaatcaccgccgtcagtgaggtcataccctctccggtctgtgagcgggatttatcgctgctgtgattttttgccagctctgacaccaccatcatcatctgacgggctttgttaaaaataatccggtaacagtgtttgttcataatctcagttccctgaaaatcgggtagtcatccgtgcagcgggcatcagtactgccagctcacattaaaattgaatacggcattgtcagttttgaatccgtccggtttcgagaacggtgtgccggcagaaaaatcatacgaaagcccggccgggctcaatgccccgcgcagaccgagcacgccccccgcaagggtttgtccgataaggtcattacggttatgcccgctgacacggccgtaatccgcaccgatatacagttgctgctgcggcagcggcgtgttccaggaaagggtgttgcggacagtccagccgtcatcgctgctcagcgtccgttcgccgtcaaatccccggacactccagcggttaccgatggaaaactgatcctgcggggtcagcggggtgccgctgagctgacgcaggtattcgccctgatactgaaactgctgttcacccagcgcaaacggtacagtcagagaggcggagaactgtaagatacgggagagcgcagtggcgtaatcctcactgtcacgggcacggtactcctcccaggccggcatcgcaccgaaccagcgggtaccgcgctgataactgacacccgcatccagaaccgcagtaccgaaatactgccggtgatccagcccgactttccaggtgctggtgcggcgtttctggttctcaatttcggtatcctgaatatagttgcgggtctgacgcagattcacaccgtagttcagcgtggttttggcggttgcgtcgcggtacagcacattgctgagctgcgcgttgagagtttcactgcggcctttgtaacgcgcatcgccgttgagcagcgccacggtctgtacataattgtatttgctgccggtcagggccagctgccagtaaccgagcggcacagagtaatgggcactgtagttggcggattctttcccgccggtaaacagcaggtcgcgggtggcggtcacgtaaaacaggtcactgagggaggacggattatccagtgcgaacatcagcccgccctgatttttcccggtactgttggtgccggtattatccacccaggcattgagccgccacatttttttctgtttgcgggtaataacgatatcactttcaccgggttcctctccgggcaccagttccattgaggcttccacggtcggcaggcgttgtaagttttccagtccctgctcaatatcccgcagatccagcacattaccttcacgggcaggcatcgccgtatagagtgtcgcgtatttgtcagaatcatcggtgaaacgcacctggcgaacccggcccggaaccacaaccagcgacagagtgccctgcgtcagatcctgctgcggagccagcacccgggtggtgacccagccgtggctgatcaggcggttctgcatatcggacatcagcaggttaatgccctgcacaccaagacaccgccccgcgccctcaccggccatgcgctgtaacggcagccagtgcggcagagattccgtcccgctgaccgttacctgctgaatatcaaaacagggtgtttcctgcggaaaagcgagcttaccggccggagctgcgggcgctgccagacggacatccggtgccctggcaccaaattgttcttccagtgcatcctgctgctgttgctgatggataaactgctgatcaccgggtgcactgaaagcagagccggtcacaaaaataagtaccgcgccgggtaagatgcggttggtcactctgtttttcatatttctcataactaaatagcggcgcggagtattgccggaaagcggatgcggtattgcagtaagtgaaattttatcggaagacaccggatgcggggaagtgaaaaaacgcacgaatagttaaaaaaagataatattttgcaataataaatgctgagtgattttgcagtgaaatacaatgcagaagcgggagatgcaggatatataactgaagcttatgtattttatattagtaaatcagaacgttatttaatgcgggcatattcttataagttgtggttaccggcagaacaaaaaaaaccggcattgcagacacaatgccggttttattttctgttaacgccctttcttaatatgagacatcaggcgtttacgtttccgcagctgagtcgctgtcagtacgtttttcttatccgcaaacgggttttcaccctctttaaactggatgcggataggcgttcccatcactttcagtgactgacggaaatagttcatcaggtaacgtttatagccatccggtaaatccgaaacctggttaccgtggataacaataatcggcggattataaccccctgcatgcgcatatttcagtttgacacggcggccgcgaaccagcggcggctggggatcttccgctgccattttcatgatacggggcaccagtgcggtactgacacggcgggtcgcgcagtcatacgcttcctgtactgagtcaaacaggttaccgacaccgctgccgtgcagcgcggagataaagtgaatacgggcgaaatcgacgaaaccgagacgcagttccagcatatctttgacgtgctcgcgatcgtctgcggtcatgccgtcccatttgttgatggcgataaccagagaacggccggcattgaggataaagcccagcagtgacagatcctggtctgaaatcccttcacgggcatcaatcaccagcagtaccacgttcgcatcctcaatcgcctgcagtgttttgataacggagaatttttcaaccgtttcagtcactttaccgcgtttacgcacaccggcagtatcgataataatatactcacgcccgtcgcgttccatcgggatatagatactgtcacgggtggtacccggcatatcgtaaaccaccacgcgctcttcaccgaggatacggttggtcagcgtggatttaccgacattcggacgcccgacaatcgccattttaatcggctgatcaatcgggttgaaatcatcttcctcttcgctgtcttccgtctctgctgcctgtgccagggcttcctgctctgcccagtaagcggcgttagcctcttcttcggttaactcgcgatcatcatcctcactttccggctcaccgtagaacggcaccagtgcgcgggtgatcagctgactgacaccacgcccgtgtgaagcggcgataggcaccacttcacccagacccaggctgtagaattcacccagcgcctgatcctgatcgataccgtcgattttgttcgccaccacaaaggtggttttgttatcgcggctgcgcagatgtttggcaataccgctgtccgccggcatcaggccggaacgggcatccaccataaacagcacgatatcggcttcttcaatcgccagcagtgattgtgcggccatgtgggtttcaacaccctcttccgtgccgtcaataccgccggtatcaataataataaattcctgtccctcaacctctgcacgaccgtacttacgatcccgcgtcaggccggggaaatcagcaaccaacgcatcgcgcgtacgcgttaagcggttgaataatgtggacttcccgacattgggacgcccgaccagagcaacgacaggtatcatgcttttactgcctcataacactgaaaaaatcccctgcaccatacaggagattaaagacgaaacggcccctgtcattcaggagccgtcaatgaaaccactccgcagtcagttaccctgccggagtgatgccggaaacagcggtttactgtcagcggcggagcaggtacaggcgtccgtcacgggcctgtaccatcagtttatcaccggcaatcgacggacggctgagaataccggaactgttcagtttattctgcgccacgaactgtccgttagaggtatccagccagtggagataaccttcaccgtcacccaccaccagataaccgttaaagatttccggtgcggagagattacggtgcagtaatttatcctgtgaccacatggtgacgccgtctgctgcacgcaggccatagacgttatcatcctggtcaacaacatagagggattcgccatccagcaccagttcgttgactgaaccgaaatcgcgtttccacaggatttgtccgctgcgcatatccatcgccaccagattgccgttataggcgatagcgtaaacgcggccgtcggcaacaaccggggtcatatccacgtcattcagacggctgatttcagtggtaccggttgtctgggaaatacgctgctgccagataatctgaccctggccaagcataaccgcactgacacgaccgttgtcgccaccgacaaatgccgcacccatggccacggccggagcagattcaccacggacagacaggctcggggtatccaggttcaggctccagcgctgttcgccggacgcggtatcaaatgcctgtaacagaccgttaccggtatgcaccagcaccaggccgtcactgacttccggacgggacagcacttcaccaccggcgttggcggtccatgcgatttcaccgtcgttcgcgttcagggcgatcagcgtaccgcgctctgtacccacataaacgtgttcaccggaaacggtcagaccgccggataacatcgccgggatattcgcggataagaaaccggttttttccgccagattcactgaccagatttcaacaccggaatcggtatccagggctttgaccaggccattgcgatcagccgcatagacactggatccttcccatgccggggaaagatgagaatagtatttaccgacaccgtcaccgacggatttatcccacacggtttccggggtgaactgacttgtcacttccggcagtggtgacatcacgatagtatcctgttcacttgaacagccggccagcagcacagaggcgactaatcctaccagcagtgttttacgcagttgcattatcgagagtcccctcacccggctaagttatcgagtttgaatgtcataacggatttgatagtcccggcaccttcactctgaataccggtggtgtaggcttcctgcgcgcctttcacatcccctttctgtaacagggcgtcaccgcggatatcctgtgcgtaagccgcccagcctttccctttcactgccgcaacggttgccagcgcggcatccggttttttctgacccagctgtacacgggccagacgtgcattaatcagatcttttaaatcttcattatcggtttttgtcagcgcctggctcagggcattttctgccgccgggaggtcgttgctgtcaaccgctttcatcgccagatcaagaccggcgatagcaccgtagttgttattggcttctttcgcaaaagcctgcagacgggcggtctgctccgccggggtgccttttgctgcgatcgccgtttcataggcaatcgccgcatcctgtaatttgctgacctggtgagactgatagtagttccagccggcaataccgccgataccgatgatcaaacctgccgcgattgctttgccgttttcgacaaagaaattcttcagcgctgatacctgttcattttctgtggtatagacttccacacgtctctccttaacctaaaagttcgctcagacgagcggaaagcccgctctgtgccagcgtctgctgctcaccggtggccagttctttgacagtgactgtcccgttggcaatttcatcctcacctaaaatcagggcgatgcgcgcaccgtttttatccgcacggctcagctggcgtttaaagttgccgccgccgtagttggtcatgatccgcacatccggcaggctgtcgcggatctgttccgccagcatcattgccgcaacctggctgccttcaccgaaggaagccagataaatatcggtcactgcggtttcgctcacaaagtccggattgactgactgaaccagcagtaccatacgctccagacccatagcaaaacccactgccggggtattatgaccgccgagctgttcaaccagcccgtcataacggccgcccgcgcagacagttccctgcgaaccgagtgcggtggttacccactcaaacacggtgcggttatagtaatccagaccacggaccagacgctgattgatgcggtactgaataccggcagcatccaggatggcacacaggccgtcaaagtggacttttgattcttcatcaagataatcaaacagtgccggtgcatcgttcaggagttcctgaacaactttgtctttggaatccagcacacgcagcgggttggtgtacatccggcgtttgcagtcttcatccagtttgtctttgtgctgttccaggaaggcgaccagtgcttcacggtagtttgcacgcgcctgtaacgaaccgattgagttcagttccagggtaacatgctccgcaatgcccagctcacgccaccagcgggcggtcatcataatcagctcagcatcgatatccggaccgctcaggccgaaaacttccgcacccagctgatggaactgacgatagcggcctttctgcggacgctcgtggcggaacatcgggccgatataccagaggcgctgttcctgattgtacagcaggcctttctcgatcccggcacgaacacagcccgctgttccttccggccgcagtgttaagctcacattttcttcgcggtcctgaaaagagtacatttccttttcaacaacatcagtcacttcaccgatggcgcgctgaaacaggggggtatgctcgacaatcggcgtacggatttcactgatcccgtagcttgtcagaatgcgtttaagcgtgttttcaatacgctgccataccgcagtatcagcaggcagataatcattcataccacgaacagattggatttttgtcgccacgttaattctcttaactcaatgaaatatgtttccgattataaaagcgaccctgtgcgggcgcaatatcgggaggcggatatatcgtcttaaaacagcatatctgccaaaacagacaaaaccggcccatcaataatgagccggtccgcgattattctttctcaaccagactgatatcaatccggttattctgatccagcatggccgctttggcacggattttcgcttccagctgatcaatcatatcagtgttatccagacgctctttctgacggacaccgtcttcgtagaacccgctgcgggttttcgcgccggtcacacccagtgtggagacttccgcctcgcccgggccattaaccacacagccgataatcgacacatccatcggtgtgatgatatcttccagccgctgttccagtgcattaacagtgccaatcacgtcgaactcctgacgggaacaggtcggacaggcgataaagttaatgccgcgcgaacggatacgcagggatttcaggatatcaaacccgactttcacctcttccaccggatcggctgccagtgagatacgcagcgtatcaccgataccttccgccagcagcatacctaatccgatagcggatttcacggaaccggcacgtgcgccgcccgcttcggtaatccccaggtgcagcggctgatcaattttctgtgccagcagacgataagcaccgaccgccaggaacacatctgacgcttttacactgactttaaactggtcaaaattcaggcgatcgagaatatccacatggcgcatggcagattccaccagtgcttcaggtgtcggttcgccgtatttttcctggatatctttttccagtgaaccaccgttaaccccgatacggatagggatattataatgacgggcgcaatccaccacctgacggatacgctcctcgctgccgatattacccgggttgatacgcagacaatccacgccgtattccgccactttcagcgcaatgcggtagtcaaagtgaatgtccgccaccagcggtacagagacctgttgtttaatcagtttaaaggcttccgccgcatccatggtcggtactgacacgcggacaatatccacgccgacgcgttccagggatttaatttgtctgacggtcgcctcaacatccgttgtccgggtgtttgtcattgattgtacggcgattggtgcaccatcaccgaccggcacatttcccacgtaaattcgggtggatttgcgtctttttatcggggattcattatgcataagtctttctccggaacatccttgtgcccttaatcattgctgtattaaatgtgtagtaaagatttaatttataaaccaattattcaccggctttcggcacactcaggtttgccacccggtttgccttaacaaaatgactcaggtcaacactctgacctttgaactgcacatccacggcagccggtgcgccgattttcagacggtaaggttctgcgcccgcaaattccagggtatcccctttctgtttggtgccgctgaaaatttttgtacctttgttatctgtcacttccagccagcaggtgtttttaaaggtcagaaccagaccatcctgtgtctgtgtggtggtcggcagcgtgccgccttcactgtctacggcacggttaacaaccgccggtacgcggtcactgcccggcagcggcacaatcttgctgctgtcaatttcctgatcctgcggggtggctgccgataattccagtgcagcggtattggtattaccggccggagcggtgtccggcgttccggcaggggcattcagtgtctgtggtgcggtgctgtctgccggatcggtacccggaacatctgccggggcattcacggtgacatcattctgttgtgccagtgaagcaatatcagcctgttgtgcctgatactgctgccaccaccacacgccaaccagcgccagaaccaccagcagtaccagccaggtgaacttcatcagccagccttcgcgttttttacgctggcggccgatagtcacacttttcatcggctggactttggtcatctgagcgggggcgattttatcaagataaggcatgatcgcagattcagggatctgcaacagcttggcatacgtgcggacataaccgcggataaaggtcgggttgccttctttcagtgcatcttcttcgatttcacgcactgtagtcagtttaagacaaagtctgtcggcgactgtttcccgtgataactgaagttgttcccgacgttgtgttaagaattggccaagagtgagttggagattatcttgagattgagagttattcatgagtttcaggacacaaacagttctggttacgagaaagcgcggagatctgcccttccgcgcaccgaagttccgtattccggcatactgcatgccacccgtaatgataaaaataatcctgaaaacaacatcacttttatattgttttacagactgttatccggcggacactcataagccaaaatgtactgtaccacactatcactgcctgacggggaattcacggctaaattcaggtatttttccgcaatttcaggctgctgatcgcattttgcactcagcgccgcacctgtcagcgcaccggtatgctgcggctgtgctttcagtacccggtcaaaatgataccgtgcggcatcataccggccggcctgaagataagcctcacccagtgcaagacgggtaccggtcgcagccggtactgtctgtgtcacgggtgctgtccggcatcctgccagcagcattactgcaattaagcccggggaatacgtccttatcatactgcctccttgtctgtaaggcaggtatattaacgtaaacagtcaccggggagtgttacttaatattactgtcagactgctttgacagagattggttcaccggccatgcgttttttcagtgtccgtttggtccggtcgataacatcaccggccagctgtccgcaggcagcgtcaatatcatcaccgcgtgttttgcggacaatggtggtgaatccgtattccatcaggaccttggcaaaacggtcaatccggctgtttgagctgcgcccgtaaggggcgcccgggaacgggttccacgggatcaggttgattttgctcggcgtgtctttcagacaggccgccagctgatgcgcctgatcagtgctgtcattgatatgatccagcatgacatactccacggtcacacggccgccgttcgcattggattttccgagataacggcgcacagatgccaggaatgtctcaatgttatattttttgttgatcggcacgatttcatcacgcacatcatccgtcggtgcgtgcagggaaatcgcaagcgccacatcaatcatatcgccgagtttatccagtgccggaaccacaccggaggtggaaatcgtcacgcggcgcttggagagcccgaaaccgaagtcatccagcatgatttccatcgccgggacaacatgggtcaggttcagcagcggttcacccatccccatcatcaccacgttggtgatcggacggcggccgctggatttcagggagccgatgattttcgcggcacgccagacctggccgataatttcagatacgcgcaggttgcggttaaagccctgctgcgcggttgagcagaatttgcattccagcgcacaaccgacctgggaagagacacacagagtcgcgcggtcatcttccgggatatagacggtttccacttcctggtcgccgacacggatagcccacttgatggtgccgtccgcagagcgctgttcttctgacacttccggggcacggatttccgccaccgctttcagtttggtgcgcagcactttgttgatatcggtcatcagatcgaaatcatcatagcaatagtggtaaatccacttcatcacctgatcagcacggaaaggtttctcacccatatcggcgaaaaactgacgcatctctttgcgggtcaggtcgagtaaattaatttttccgttgattttttcaggagcaatcggtgcggagcctgttacacaggcgtcttgggtggtcagttctgacattgttaacattgcctcgttgttacactttcggcggtgacacgcggcgcgcatcacagatacaggaataaggatagccgctgaaacggacggcgtcacggatacagcggaaatataaaagccccgtatcataacggggcgcggcattgtacaaacattaatggtgatatggcaaattaaaacacgtaaatgtaaatcgatttattgaataatagtgcttgtttaaatcattttttcagatattaataatattaacactcatcttttacaggtcatttaatctgaaacaaaggagttgttatgcataaaattatactggttccgatcgatctgaatgccggtgcgttatctcagaacgtcattactgagattaacgactatgccaaagataaaaatgtgaaatttcacttcgttacggtaattcttccgtctgaacagctttttgactatggtctgacattcccggtgatgaccgaaaatgccaagtcagaagaccagcgcatcaaagcactgcttgaaaaactggatgccgccaccgaaaaatttgctgtacagaaagagcagatttccaccggtgtccttatcggaagtgcagcggaagccattcttgataatgcagagagaattaaagcagacctgattgttatcggttccaaaaacccgaccatgaaaagccgtttcctgggctccaccgcttccgcactgatccattacgctaatatctcagtccttgttgtccggtaaaaaagaaaaagcccggtaatccgggcttttgcgattgctgataaaacagccgtctgatacaaaaatcagcgcgggcagatctcatcttcagtgaagaaataggcaatttcacgggcagcggattcttccgcatcagagccgtgtacagcgttttcagtgaaactgtcggcgtaatccgcgcggagtgtaccggccagggcgttatccggattggtggcgcccatcagatcacggtgacgctgcacggcattttccccttccagcacctgtaccataatcgggccggatgtcataaattccaccagaccatcaaagaacgggcggcctttgtgctcagcgtagaatccttccgcctgttcgcgggtcaggtgcagcattttggcggcgataatacggaaaccggcgctttcaaaacggtgataaatggccccgatagcatttttctttacggcgtttggcttaatgatagaaaatgtgcgttgtacagacatgaattgacctcattgtgcgcatgtgcgctgttgtcattgttatttgcggctgacggcagaccggtccacaccttgtggtaaggcggtgattatacgggctcacctctgtttttcctacagttacgcaacatttttgcaaagtattccgcataacagatcacagattttccgtctgtatcacactttttccgctgctgttcccgccgtttctgctatttcagggtaaaactgactgaactgacctgcccgctgagatccagcaccgtcagctgataacgccccggggtatccagcgtcagcagcagcggctcaccggattcagtactgcccgcctgatcgccgttaagaaaccaccactgggtgccctctccgccctgcgtcactacccgcagatcgagggttttcgccagcggcagacggcgcagcacatccccttcgcggatcccggaaatcagcagcggagccgcttccacccgcagcggcggacaggttttactcaccggcggcagacggtggctgcggcgttcacccggcggcagccagctctccagcgcaatcggccacagcgccacggttttctcctgtgcatccggacaatccggtgatacccgctccccctgcccgttaacccagatcaccgcattggtgccggacaggctttcctgccctgcggacggcagtgtcggcggcacagtattgtccagcaccagcgctatccgctgctggcggcagttcggatcctgtttgtccgccgccagccctgacggccagcaaatcattttactgctgacactgatgggtttcggatccggcaattttttgccgccgcgtgcccgcagataactgtccacctgatacaggatcgggatcgcggtcgcaaacccggcctgtccggccaccggcgtgccatcaggacgaccgacccacaccccgatggtgtaacggttattcacccccagcacccaggcatcacggtagccgtaactggtgccggttttccacgccagcggcacatcctgcgccagccggtcatccgccagcggccgtgtctctccggccatcacccgacgcgtgatccacgccgcgcccggggagatcagctgccgctctgccagcggatcttccggacgaaaacgtaccggtgccactttaccctgacgggcaaacgcgctgtaggccgcaatcagctgatccatccgcgcccctgtcccgcccagaatcagcgacaggttcgggtcactgccgagcggaaaacgcagttccagaccgacgttacgcagtttggcactgaaccgtttcggaccgtaaacatccagcaactgaaccaccggcagattcagagaacggcgcaatgcctcactgacactcaccggcccgctaaatccggtatcaaagttgcccggacggtaatcattaaagcggcgcggcacatcctgtaacagggattcgctgtggatcagcccctcatccatcgccagggcatataaaaacggtttcagtgtggaaccgggcgaacgccaggcgctgttcacatccacatgtccgaaacgggtgtcatcagagaaatcaatagagccgacatagcccttcacactcatatcgcggttatccaccaccataatgccgagcgaggttttttccggcagctgatatttgcggttgcgggccatctcctccagctgacgctgaatggcaggattgatggtggtgcggatcaccgggtctttcaccccctgcgccacacgccgtgccagcagcggcgcggaatgcggcacctggcggggtgccagccagatactctcctgctttaaatcattcacttttgactgcggccacacctcaaattcggccagccggtcgagcaccttattacgggccgcttccgcgcgctgcggataacgatccggccgcagacggcttggtgcctgcggcaggaccgccagcagtgccgcttccccggcggtcagttccgacggcggtttgccgagatacatccagctcgccgcaccaataccctctaccgtgccgccgtacggggcgcggttaagatacatctccagaatctcatctttggaatagtgccactccagctgaatggtgcggaaaacctgtttcagtttgccggtcagggtgcggtcatgggggtcgagcagacgggcgacctgcatggagagcgtgctgccgccggagacaatacgtccggaagtcagatcctgcaacgccgcgcggccgatagccaccgggttgatgcccgggtgctgatagaaatagcgatcttcatatgtcagaagcgcttcaataaattccggtgatacatccttcagtgtgaccgggtagcgccacacgccgttactgtcggcgaaacgccacagcggtgacccgtcctcagccgtaaccgtacgcgccatcaccacctcatccagcggtaaaggccagattttatcggccagccagagcagcggcggtgtcagaacaattgttatcaggccggtcagcgcgagacgtttaaaccacactttcatgtatcaaaccgcattatcagaattcttaagataaaaatgcccttatagtttgttataagggcataaaacatattttgctgccgcagcccggaggctgcggacaacaaacggtgctgttaacgaaccacttccagtgtcgccggtgtcacaccggtggcacgccaggacggaatatacatcgattccacctgtggtgccggaacactgtatttacccggtgtaaccgcgcgggccagatagaccagcgtaaccggacggtactcttccaccgccacctgggaaacaaagcgatcatcacggtactcggtatgacggatattggcctgctgcatatcctggatagcttcagccaggttcggcgcactgtccgccagacttgcactggctgccgccagggtctgggtttccagctccagaccggccggtaacagatctaccaccagcgcatccggcacgttgcggtcagcctgaatatccagacggacagccaccaggtcaccgctgctcaggcggtcaatactgatcgggttaccgttcagatccatatacgtccgcttgatcttcagtacttcagatgacgggtgcggtgcctgtaacggataaccggtgatattcacacgaccgaacagctccgcatcaccccggtttgcgacactgatgccgttattcagttgtgccgcagtgagggtttcacgcagtgcgctgtcacggctgaccgcaggggcctgtccgttgatcagggcagaccacggtttttcgctctgattaatgtactgacggcctgccagatacagggcgttgctctcctgagtggagaagtaacggttattctgtatctccgcagagagtgcctgcaacttgccgtaacgctgatccgcattggaatccgcctcactcagcagggcaataatcatcgcatcatcacggatggtgctgccgtaatcgccggtgtagacgctgtcacggttcttcatcacacccagacggatagcttcgttaccgcgatccgcatcccccattttcttcagggcgatacccagctgcaccagtgccagtccgcttgcggcatcatcacggcgctgatagacctgacgaagtgcgccgagcggtgctttctgctgctgtgccagcacataaccggcatacgcctgtaccgcaaagcgcatctggtcgctgttgccgtaatagttgctgctgatcaccgagcgatcctgcagataacgcagcaggcggttattggcgttactcagggcatccgccgggacatcaaacccgcgctgtccggcacggaacagaaaatctgttgcgtatgcggtcagccacggctcttccgcgccgctgttatcccacagggagaaactgccgtcactgcgctgcataccgagcagatgcgggataccggtcatcaccgcctgacggcgtccggcgtccgtctgggttttgatgcccagttttttcagctcagcctcagaggagtacagagacggatacagcccgctcactgtctgctccagacagccgtacggataggcatagagttcacggatataacgagagatatccagcggcggacggctggtcagtgtcatttcaccggacacagtaccggcatccagataaccgatctggtcagccggtaacgcccattccccgccattgccgagtgacatggagtaagaaacggtttcagccgggtatgccggacgcacgccgattttccagctgtttttgtaggtgttgctgctttcatcaggcagtttcagccctttgaccgtcataaacacctcgccctgaccaaagccgtttgcagcttcaaccgggacattcacggaggtgcgctggcctttcgccagggtgacttctttctctgccgcccctttgagatgcaccatgccgtccgcactgaaattcacggtcagattctgtgtttcatcggtcaggttggtcagatccagcgtcagctgtgaacggtcaccaccggccataaagcgcggcagtgccatctggctgatcaccggtgcggcaacaatcactttattctgcgcatggccgaaatcttcgtccgtccaggcctgagccatcaggcgcagttcgccgttgaaatccggaatcgacagagtaacggtcccttcaccctgcgcattcagttccaccggtgctgcctgctgcgcgataatctgcacttcggtcagtggtttcagaccgccgcgatccagttcatcaccgccgtcaccaccaaaccgcagtgtgccgagacgaccgctgccctcaatcagctgaccatagacgtcatactggtccacgctgtagcgcttgcggccgaagaaggcatcatacggatccggcgttttgtagtcggtgatattgagcacaccggtgtccacggcggaaatcagcacattcactttttccggtgctgctttgccgtcctgtgctttcgctttgattttaacggtcagatcctgattcggacggatgcgggccggcgtatccagtgtcacatcaatcttacgggccgggtcggccatcgggatatgcagaataccgaccgcgcgtttaacggtcgcctgacgggagctgtcccccggacggacaaccaccgctgtcgcgtacagatcgtggcgtgtccattctttattgagcgggacttccacatcggtgccgccttccggtacatccacttcctgccaccacagcgggccgtcactggattccagcagcacatagcctttaccggcctgcggtgcggttacattcagtttaactttatcaccggcgtgataatttggtttatccagtttcagtttcacctggtccgggcgaaccgcgccggtaccaccggtgttatcctgccaggaatagccggcccagaaacgcacactgctggtcagcccggtggacggatccaccacttccagacggtatgcaccccaggagaccgggacagtcacttttgcggtgccgtctttggcgatactgattttgtcatcagacatcacgaggtctttctgatcataaccggatgaccagccttcggagtcagaccagcgccagtaatagtcacggcgctcataaatcagacgcgcattcagatcatccgcttttaacttattaccctgacggtcggtatagacaatttcaaattcagccagtgaatcttcatccatgctgtactgcgacacatatttgtcagtgcggtagtcgtaaacctcttttttggcgaagaccggacgaataccggccattttcgcggctggccataccgcgacatccgcacggcgggtcaccggacggccgccggtttccatcaggcttgcctggagaattaatttaaacggcgatttcacctctttccagtaatcattactgatggtgaatgccagctcgccgccgtcatccatggtttcgtcgaactcatccagggtgcgggtcagactctcttcctgaatatcaccgaattcaaagcccggcaatttggcggatgcttcacgatccggacgcataaacagctgcccggtcagctgattaccggcagccggcgctccatagagataatggccttcaatttcaaaatcagcggattgctgtgtggtgatcggctgtttgtcggttttgatttccatcgccatgcgctcaggcatgaaatcttccacattgacgctgtagaagcgcggtgtgttatccccgagatcaaaacgcagcgtcagcttaccggtttcaatattttccggaatcgcatactggtattgataaaggccgttttccggctgccagacgaaggtagaggccacctgaccgtcatttttcagcacatccactttgaccggctgatctttgaccggatggccgtcgccgtcgcgcagcagaccgttaatcaccagagtttcccccggacggtacagatcacgcggaccaaagacgaagaattgttttgcatagccctgcggaccggcgatatcaaactctgccaggtcaagcgccgggtttttcaggtcgatcatactggtctggccgttattaatcgccagtaacagcgcggcatccgccccgcgatccagttttgcatgaccgctgctgtcggtttctgctttgctcagaagctgacctttactgtcgagcagacggatttccacgcctttcagtgcactgcctttcgccagcgactgagtaaagacatccagctcattaagatagctgtgcatggacacgccgatatcactcagggtaaagagtgtggccggcatggtgtagctgtaacgcccggcctgctgcatcaccgccagatacacgccctcttcctgtaacggcttgatatccttcagcgggatctgcatattttcacgggtatttttctgcggattgagatcaaaacgcccggtatagaccagatcggtattattcagcaggtcatcagaattccagtactggagattgttgccgtactgccagcttgcgaggaaagaagccagagagtccggtttgatgcggtagaaattgacatcaatactgtccacgttcagcgcgaataccggcagtccctgcaggacatctgccgggaacagtgaaccgcggctggcaaagccgacactcggtaccacatccgcagtggtcagttttaagtcatagccattaaccagtgtgcgctcattgataccgcgtacgccgcgatcgatactcagctgcaattcccgtgacggcggcagatggcgcatacgcagctccatcaggttatccgacagctcccaggcaccttccagcttgccgtttttcacgtccaccagacgggcaaactggctgaaatcctggttaggatccagcggaacggagaaagtcaccaccatcgcatttgcgccgtcgagctgaatctcagaggcgtcaatgatagtcacatctttcccggcgtagcgcttactcagctctgccagtgatgcggcatcctgtgtttttttcgcagacggggaggaagcagatgaagaagacgagttttctttattattggccggtgcgctgtcattgctgcccgccgccgtggtgttactgccggtgtcatcacaacctgtgagcgccagcgctgatgcaagaagcactgcaatgcagcgttttttgccgggaccctgtcctgcaatcggagaacgcataatcaatcctttctggtgagcccggaaaacgggcacttgttcggtattatttcacgaagtgtaaacaaagcctaaacaagcgtatagtgcattattctgaatatatgcactatacatattcaccatccggataaattattgttacgcttctgttaccggaatggagttgcgcagccagccaccgagacggcgctgatagaatgcctgagtgtgttgtgtcaggaagtgcgtcagcccgtcattttcatccggatttaacagacaaaaatcaatatgctccccgtcagcgaggtgctccatcgcagcctcagccgcctggcggatcacggtatccgcttcctgctcttcactcagctccagcacaatcagcagcaccggttcatcagggacagtattgtttttttcggcagccattacccaaaatgcacggcgcaccggtttgtgctgtttaaatacgccggtcagcgcatcaagcaccgcgtccggtttgttttccggtacgctgagcagcagtgcgctgccctgttcaatcatcacttcctgtaccgggagtatatccgccattacagaactccttatttcagcatctgtcttcataaacatcacagaaaaacggccacatgtttatgtgaccgttttacagcagaatcagcagggcaatgcccggttactgtccggcttttttcagcagcagtgccgccacagtgcgcacaccatagccggttgcccccgcagaccataagtctgacggcgctttgcggtaagtggctgagcagtcaatgtgcagccagtttttgcggtaatcttccacaaagtgagacaggaatgccgctgcggtacttgccccggcggtattcggtgctcctgtgttgctcagatccgcaaaagaggacggcatctgacggcggtggaattctgccagcggcaggcgccagaacatctctttttcctgatcagcggctgacatcagttcattgtacagcgcgtcatcgaagctcatcacagagtgatagtcattaccgacagccgttttcgccgccccggtcagggtcgctgcatcaatgataaacccggcgttatctttgtccgcttcaatcagaccatccgccagtaccagacgcccttccgcatcggtattcatgatttcaacggatttaccgttgctgtaacggataatatcacccagtttgaaggcattgccgctcaccaggttatccgcgatgcacaggtacagtttgacacgcttttgcaggccgcggctgatagccattgccagtgcgccggtcagggtggctgcgccgcccatatcggatttcatggagtccatggaggaagttggtttcaggctgtagccgccggagtcaaaggtgatccctttaccgaccaggctggcgaacaccggtgcattttcctgtttgccaggattgtaatccagcgccagcagtaccggcggacgtacagaaccacggccgaccgtatggatccccatatagccctgctcgcgtaaatcttcccctttgatgatacggtaaccgacagaattgcaggaaacgccgcacagcagatcaaccgcacgctgcgccagctgttccgggctcagttcttccgccggggtattgataacgtcgcgtacccagtcgatgatacggatacggtgttccagttcggttttatccgcttccggtaattccggccattcaatcgagcgcgcgcctttcggaccacggaagccctgccagaatgcccagctggtttccagatcccagttgctgccgctcagcaccacattgcggatgccctgaccatcgattttgcggcccgcgctctgcacggcgcacagcatccctttacggcttaaatgaacggtcattcctttgtcagtcgcgctgaccagggctttctctccccacgccggagaagcaggttcatacgataaggttacaggcatgatgagttgcgtcatttcgttctctcttttgacttttagactgccgtaacagtcagattttatttgaggaatgcacggcgtgccggtctgcacaggaggcggtaacagcatacgcgcatcagagaccgcacgctaacacaattgtgcggcctgatgcgcgtaacaaaagacatcattcaaattcgtcgagccagactaacaaaattgcttctaatactttttcgttagatttttcaggggcatcgtcaaattcttccagttcgcagatccactgatgcatatcggtgaaacgcacggttttcggatctgtgtccgggtacagatcatacagagcttcgccgatttcacggctgtcctgccatttcagtcccatttcaggctcctttatcagtgctcacgcgcatggttgatggtatatttcggaatttccaccaccaggtcttcatccgcgactttcgcctggcagctcagacggctttccggctcgagcccccaggctttgtccagcatgtcatcttccagctcactgctctcgccgagggagtcaaacccttcgcggacgatacagtgacatgttgtgcaggcacatgatttctcacaggcatgttcaatttcgataccgttacgcagggcaacatccagaattgactcaccttcatttgcgtcgtataccgcaccttcagggcataatgactcatgcggtaaaaaaacaatcttaggcataatcttcccgttatatctcatccacagagtggcccgcgagtgccttgcggacagaattgtccatccggcgcgccgcgaatacctgtgtttgcttgtccagttgtttaattgcgttttcaatggcggctggtgagtcgccttcaacgctctcaataagcacaccgactgccgcatcaatagcggcattttcgtcgtcgctcagtaaattgccatcctctgaaagcgcctgagtcaggctctccagcaggcgggcagcttccactttttgttccgccaggcggcgggtggataaatcgttttctgcgttttcgagtgaatctttgatcatcccggcgatatcagtatcgctcaggccgtaagacggtttgatctggactgaggcctgcacaccggtggatttttccagtgcactgacactcagcagcccgtccgcatccacctggaaggtgacacggatatgggcattaccggcggccatcggcgggatgccgcgcagggtgaaacgtgccagggaacggcagtcgctgaccatttcccgctcgccctgcagcacatgaatagtcatggcggtctggccgtctttaaaggtggtaaattcctgggcacgggctgccggaatagtggtgttgcgcggaatgactttttccaccaggccgcccatggtttccagccccagcgaaagcgggatcacatccagcagcagcatgtcgctgtccggtttgttaccggccagaatatccgcctgaattgcggcaccgatagcaaccactttgtccgggtcaatcgaggtcagcggctctttgctgaagaactcaccgaccagctcacgcaccagcggcacgcgggttgatccgccgaccatcaccacttcgcggacttcatcctgatccgtccccgcatctttcagggcacggcggcaggtcatcagggtttttctgaccagcggacgaatgagttcctcaaaagtctcgcgggtcagcacaccctgccagccatccagggagatggtggtttgtgcggcatcagacagtgcaattttggcttccgccgccgcatttaatacttcgcggtgctgcgaatgcccctgtgactgaatgccgcgctgctcataaatccagtcagcaatcaggttatcgaaatcatcaccgccgagcgcggtatcgccgccggtggccagcacttcaaatacaccacggctcagacgcagcacagagatatcaaacgtaccgccgccgaggtcataaaccgcaatcaccccttcctgaccggaatccagcccgtaggcgattgctgccgccgtcggctcattcagcagacgtaatacgtgtaatccggcaaggcgggcagcatctttggtgccctgacgctgcgcgtcatcgaaataggcaggaacggtgatcaccacaccatccagctcaccgccgagggtttcctgcgcgcgctgtgccagcacggacagaatatccgccgagacacggactggatccgtcagcccggctgcagtgcggatgattggcaggccgttttcgcccgcctgcaactgatacggcagatcaggatagcgctcagtgatatcggtcagcgagcgccccatcatgcgtttgacagagataatggtattctgaggatcggccgccgcatttgcgcgggcatcccagccgaccaggcggttatccgcgctgtactgcacgacagaaggcagtaaataacgcccttcgtgatcgggcagcacatcggtttcaccactgcgcacagtggcgaccagtgaatgggtggtgcctaaatcgatacccgcggcaaggcggcgctgatgcggggcgggagcctgtcccggttcgctgatttgtaacagtgccatatttttcccctagaaactgtcgagcaaacgttcttcaagattttcaatttgttgcgtcagtttactcaaaaatcgtaatttacgcacgctgtccgcagcagcggtccagtcttcgtcatccagctgacgaatcatctctgccatccgggtttttgtcattttagtgatagtggcagcaaaaccggccagggcatcactgtcctgtttctgttcgatgatatcgagggcttcgcgcagctccagctgctccatcagaaatgcagtatcatgcattgtgtgctgttcattattgatatcaatatcatgtaacagcagcatgtattccgcacgtttcaggggatgtttcagggactggtaggcgtcattgatagtcgcggccatcgtcagtgcctgcgcttgttctttcgcatcaccggcggcaaatctgtccgggtgatactggcgctgcaaatcctgataacgaccggcaagtgcctgtgtgtcaaggtcataacgcacaggcaggctgaacagggaaaaatagttcatcgtgttctcttcgcggataaatggatcagttaaacgtgaaaactctcgccgcagccgcattcgctgttgacgttcgggttattgaatttaaacccttcgtttaacccttccttcacgaaatccacttccgtgccgtcaagatacacaatactttttccgtcgatgatcacttttacgccgtgatcttcaaagacgacatcatcttcattaatgacatcggcaaattcaagtacgtaagccataccagagcaaccggaggttctcacgcctaaccgcagacctactcctttaccgcggtttgccagaaaactggtgacccggtttgccgcactttctgtaagagaaacggacattacacacctcgctctataaaccagtatggcggatgaccgatgggatcagtatccgccattattttattgttttacctgctgcatatcagcagcggcgggctattagttgccccggcgtttacttttgtaatccgcaattgctgctttgatcgcatcttcagccagaatcgagcagtgaattttcaccggcggtaattccagttcttccgcaatcgcggtatttttgatggcttctgcttcatccagggtcttccctttcatccactcagtcaccagtgagcttgatgcaatcgccgagccgcagccgtaggttttgaaacgcgcgtcttcaatcacgccgttatcatcaactttgatctgtaacttcatcacgtcaccacaggccggtgcacccaccatgccgctgccgacagtcgggtcttcgttatcgaatgaaccgacgttgcgcgggttttcgtagtgatcgattactttatcgctataagccattgtttatactcctgaaaccgtctgattaatggtgtgaccattcaatactgttaatatcaacaccttgcttgtgcatttcccacagcggggaaagatcgcgcaggcggccaattgcgttatggataagtttgatagcatagtcaatctcttcctcagtcgtgaaacgacccagagagaagcgaattgagctgtgcgccagttcgtcagtcatacccagggcgcgcagaacatatgacggctccaggctggcggacgtacaggcagaaccggatgataccgcgagatctttcagcgccatcatcagggattcaccttcaacatagttgaaactgacgttaagaatattcggtgcggagtgctccgggcaaccattcagataggtttcttcgatatctttgataccgttccacagacgcatacgcagtgcggacagacgctcagcttccgctgccatctcttctttggcgatacggtaagcttcacccataccgacaatctgatggactgccagtgtaccggaacgcataccgcgctcgtgaccaccaccgtgcatctgtgcttcaatgcggatacgtggtttgcggcggacatacagtgcgccgatacccatcgggccgtaaatcttatggccggagaaggacatcagatccactttcagtttgcttaaatcaaccggcactttaccaacgctctgggtggcatccacatggaaaacaatccctttgctgcggcacagttcaccgattgcttcgatatcctgaatcacaccgatttcgttattcacatgcatgatggaaactaaaatggtgtcttcgcgcattgcaccttcgagttcagtcaggtcgatcaggccattacgctgcggcgcaagataggttacttcaaacccttcgcgctctaactgacggcaggtatcgagtaccgctttgtgctcagttttgcaggtaataatgtgcttgccttttttctcatagaatttggccgcacctttaattgccaggttatcagactcggtggcaccggaagtgaacacgatttcacgcgggtcagcgccgaccagatcagcaatctggttacgggcaatatcgacggcttcttcggcctgccagccaaaacggtgggaacgtgacgccgggttgccgaagatgccgtccattgtgaggcattgcatcattttttcagcaacacgcggatcaaccggggtggttgctgagtaatctaaataaatcggtaatttcatcgctcaattgctccatgaactacggttgcgttgttaacgcaggtttctgcttatgcttgcagattgataatcgtttcgttaattgccagattatgtgcacgacgtttatcatcctggcgatcagcaacatcaatcacttctttatgatttactaactcttccagactgatactgcttaagaaatcagtaatacggtcactcaggtcacgccacagcgcgtgtgtcagacagcggtcaccgccctgacagccttcctgggttccctgacagcgggtcgcatcaacggattcatcgacggccgagatgacctgagcaatgaaaatctcaccggcaccgcgtgccagaagatacccgccgcccggcccgcgaacgctggaaaccagctcgtttttacgcagacgggagaagagttgctcaagataagagagggagataccctgacgttcagaaatgtcagccagtggtacgggcccctcatgggagtgcagcgctacgtcgagcatagcggttaccgcatagcgcccttttgatgtcagtctcataaccggatccccgtgataaatggtgaagaaattgtgtcattcctgagtaatttagtcaactatttaacccagtaatttactcaactattttttcgcccatttctcgacagaagtcaggatcccacgcaggatattcagctcctgtgtttccggatgcgcgcgggtaaataagcggcgcagacggttcataatctgacccgggtgtgctttgcggataaaaccggattcattcagaaccgattccagatgcgtgtaaaaccgctccatatcatccgccggcggatagtgtacctcatctgcctcatcattatttgccggttcgctctcattctgagaggcaagaaatgccatccggatctcataactgaccaactgcaccgccatcgccaggttcagcgagccgtattccgggttggtcgggatataaagatgataattacacttctgcaattcatcgttggtcagcccgacgcgttcacggccgaaaataatcgcgaccggtgcggtctgtgcgattttaacacttttttccccgcattcacgcggttcaaccatcggccacggcagtgtgcgtgaccgggcactggtgccgatcaccagttcacaaccggcaatcgcctcatccagggtgctgacaatcttcgcattgccgataacatcactggcaccggcagacagcgcgatggcgtgagagtccggctgtacctgcggattgaccagataaaggttggataaccccattgttttcatagcccgcgcagcggagcccatattgcctgtatgtgaggtttcaaccaggacgattcggatattttcggacataacacactttctttgagaaattatcgcaatatcttaacacaagaatagtcagattgacgatcacctgttatactctgccgcgtttattttcgttctttaacatcccggtggacaaccccatgcatccgatgcttaccatcgccatacgtgctgcacgtaaggccggcaacctgattgccaaacactatgaaatgcctgacactgttgagacaactcagaaaggttccaatgactttgtgaccaacgtggatcgcgaagccgagcagatgattatcgagatcatccgcaaatcttatccgaagcacaccattatctccgaagagtgcggtgagttactcggtgaagaacatgatatgcaatgggtgattgatcccctggatggcaccaccaacttcgtcaaacgtctcccgcacttcgcggtatctatcgcattccgtatcaaaggccgcactgaagtggcggttgtttacgatccgatgcgtaacgaattattctctgctgtccgtggtcagggcgcacagttaaacggctaccgtctgcgcggtgcgactgcccgtgatctcgacggcgcggtactggctaccggctttccggtcaaagccaaacagcatgctgatacttatatcaaaatgctcggcaaactgtttacccgctgctcagacttccgccgtaccggctctgccgcactggacctggcttatctcgctgccggccgtgtggacggtttctttgaaatcggcctgaaaccatgggacttcctcggtggtgaactgctggtccgtgaagcgggcggtatcgtcactgacttcaccggtgaccaccgttatatcgacagcggtaacatcgttgcaggcagcccgcgtgtggtccgcgaactgctggcagaactgcgtgatgagctgactgagtctctgaaacgctgattctgttccgccagatgtgaaaaagggttatgactttcgtcataacccttttttattatgcgttttccggagtctgcggccggactttcgggcgcaggaacagtgccggaagcactgtcagtgccatcagataaaatatgccgccgtggatatcctcatacagataccccgccaccagcgtcatcaccgcaatcgccccgcccatcgccagcgcggaatacgccgcctgtaacggaataatttccgtggatttgcgggcaccgataaagcgcatggctgccagatgacacacggtataggtgccgctgtgcaggatctgcgccgcaatcagcaccggcagtgccgccgacatgcccatcagtgaccagcgcagaataccgcagataccggaaagcagtaacagattggccgcactccagcggcggaacagcttattactgaaggtaaagacaatcacttccgccaccacgcccagcgaccagagatagccgattgcggcgtcagagtaccccaccttctgccagtaaatcacactgaagccgtaataggccgcatgcgccccctgcaacagactcacacacagcagaaagcggaccaccgcattgtctttcagcagaacacggaattttacctgcggcccgcgctgtttcatttccccggacggcataatgcgcggacgcagcagtgacgtcagcagcagtgagccggtactgactaccagagcagccaggatcacctcatgcttccagatatccatcagcattccggtaaccgaggtggcgatgataaatgccaccgatccccagacacggatcgagccgtaatccatcgggaattgtttttgccaggttgcggcgagggaatcccccagcgggatcatcggcgagaaaaagaggttgaacccggccatgacaaaaaagagccagagccagtgtgaaccgaaataaaacgccaccgcgaacaggaaagaacagagcgccatcagtctcagggcaaaaatcagccgtgacgggtctttaaacagcggcgtgataaacaggctgccgacgaaccgcgccaccagcccgacactgagcagcataccgaccgttgccacatcatgcccttcacctttcagccatgcgccccagtagggaagaaaaatcccgtaggaaaaaaaatacgtaaaataatcaagcgccagccagagcgatgacggaacaaacatctgcctctcctttcaggaatacaaaaaacccgctcgcggcgaacgaagcgggttttggttacatcagattggtaacgcgattatgcgtaaaccggatatttcgcgcagatagccagaactttttgtttcacagcttcaatggtcgcttcatcattgaggttatctaacacgtcacacatccagccggccagttcacgggcttctgcttctttgaagccgcggcgggtgatcgccggggaaccgacacggataccggaagtcacaaacgggctcttcggatcgttcggcacactgtttttgttgacagtgatgtttgcacggcccagtgccgcatccgcatctttaccggtgatgtctttatcgaccagatccaccaggaacagatggttctcagtaccgccggacaccactttataaccacggttcaggaagacttcaaccattgctttggcatttttcacaacctggacctgatttgctttaaattcaggctccattgcttcttttaacgccacggctttaccggcgataacgtgcatcagaggaccaccctggttgcccgggaataccgctgagttcagttttttgtacagatcttcatcaccgcctttcgcaaggatcatcccgccgcgcggacccgccagggttttgtgcgtggtggtggtgacaacgtgagcatgcggaaccgggttaggataaacgcctgcagcaaccagaccggctacgtgggccatatcaacaaacaggtaagcaccgatgctgtccgcgatttcgcgcattttcgcccagtcaaccacaccggagtaagcagagaagccgccgatgatcattttcggctgatgttttttcgcctgagcggcaacatcgtcataatcgattttaccggcagaatcgataccataagggacgatattgtacagtttaccggagaagtttaccggagagccgtgagtcaggtgaccgccttccgctaagttcatccctaatactgtatcgcccggtgacagcagtgcggagtacactgcaacgttagcctgggagcctgagtgcggctgaacgttggcatagtctgcgccgaacagttcttttgcacggtcaatcgccagctgttcaacgatatccacatattcgcagccgccgtagtagcgtttgcccggatacccttctgcatatttgttggtgagctgggagccctgagcttccataacgcgcgggctggtatagttttcagaggcaattaattcaatgtgctcttcctgacgacgatcttcgtctttcatcgcctgccagagttgtgggtcgtaatctgcaatattcatttcacgctttaacattcgcttctcctgactcgcctgatgccgataaaaaaacacccctttccggggacgaatgccctacagtgtaaaccctttttctgaattgagatagccccggaaacaaaaaatacgcaaacgattgcatagcggtaaaatcaggtaattagcatgcttattatttcataagaatatcctgtccatcggacacaataccggatttgtgatcccctcttacccacgctcactgatcaatttcgctattttcaccggattttcagaaacagcagaaaaatttgcgctttacaaattctgccctgtattataagttgcataaaaaatacatgttataaatttcacactgatgtgatgctttttcaggagccctgctatgctcgatgcacaaactatcgccaccgtaaaatccaccgccccgctgattgccgccaccggcccgaaactgaccgcccatttctatgaccgcatgtttcgtcagcatcctgagttaaaagatatcttcaccatgagtcaccagcagaacggtgcacagcgtgaagcgctgtttaatgcggtctgcgcctatgccatgaatattgacaacctcggcgcgctgggtgcggcagtggaaaaaattgccaacaagcacgccagtctgatgatcagaccggaacattacccgattgtcggggaaaacctgcttgccaccattgaagagttgctcaatccgggtgaggaagtccttaccgcatggggtaaagcgtatggtgtgctggcggatatctttattcagcgcgaagccgggctgtatcaggaaaaagcggctttacagggcggatgggaaggactgcgtgaattccgcgtgatccgcaaacagccgcagagtgaacttatcaccagtttcgaactggcgccggttgatggtaaatctgtcgcggattaccgcccggggcagtatatcagtgtctatatcaatgatgatgcgctggaaaatcaggagatccgccagtactccctgacgcaggcaccggacggtaaaacctaccggattgcggtcaaacgtgaagataaaggtacgatttccggctggctgcacgccaatgtgcaggaaggtgatgtggtcagactgacaccaccgctgggggatttcttcctggaggcagaaaaagaaaccccggtggtcctgatttccgccggtgtcggcttaacaccgatgatgtccatgctgcagacactcgccgcacaacagcatccggcggacgtgacctggctgcacgcggcagagcacggcggcgtgcatgcctttgcggaggaagtaaaccggtttggcgcgcagctgcccgcgttcagccagaccgtctggtacagagagccgcgtgcagatgaagctcatccgcacctgaccgggctgatggatttaactgctcagcaggatgctctgctcagtaaaacccgccactattacctgtgtggtccggtggcctttatgcagcatatcgcgcgtcagctgaccgcaatgggcgtcagtgcagaccagatccattatgaatgtttcggtccgcacaaaattttataatcgcgacagaacaacaataacaacacgctggatattcagcgtatgtgcttaagctgaagcacatttgagtaacagtgacataaccgccgaatttatatctatcccatcctttcgcccggttcactgttactcttttttttgcccgtcagatcacccgttcgatgatcgcatcaccccggtaatccccttccagcataattgtgccgtcaatacgccggtattgtaccgtactcagcatccccttcatggcatacgccggaatggtgattttaacgtttttaaaatgctgatgacggccgcagagattcagaaacatactgaaatcgctgatgttattacggaagaaataagtgtagccgtcacggcagaatccggcagtcagatttttaaaaatccctttgctggatttcaggtgtattttgcggtgaattttattttttgctatctgagcaagaacatcatccagttctttatcactgctcagacctaaaatacctttcaggttttctttcggtgtaatatgaataaatgaatcagagtcttttatatcgtatttatccgttaataaaaacataataataatcccttatatatcatatcattaataaatgaattaaaggattacattatgtcgtctgttattctccgggattgctctgaatcatcacagaaagccggaatatcagtttttataccgggcccggttcacacatttttttactgcctgcgagaaatacatcaccttggccgaattaatacacgcttccagctcgttctgttcttctttatttaaattcatcccggaaacctctgcaaaaagtgccggtaattcatgctgacctgggtctttcagtgctgactgcagaataataataccggccataatcagaataacaatcacagcacacaccgccactgtccattgtattacccgcacatgtattgtccgcacagtcttctccttttactgacagataaaagaatccggcggtgtcagaaataacagccgccggatacgtttgattttcagggatgctcagcagaactcagatagcatcttcatcctgttccccggtacggatccggacaacctgtgccacatcgaacacaaagattttaccgtcaccgatcttaccggtctgcgccgtctgcataatggtttccacacaggtttccagaatgtcatcggcgacaacaatttcaatttttaccttcggcagaaaatccaccatatattccgcaccgcgatacagttccgtatgccctttctgacggccgaaacccttcacctctgtcacggtcatcccggtgatccccacttcagccagagcttcgcggacatcatcgagtttaaacggcttaataattgcctcaatttttttcattgtcagatcctgttaccaatttttgcggccaaacccggatgtaatcgggtaacggcgatctttgccaaagttccgggcggtaatgcgcggtcccaccggtgactggcggcgtttgtattcattgatatccaccagccggataaccttgcggaccaccgcttcatcaaacccggcggcgatcagttcatctgcggacatatctttttcaacataccccgccagcagggcatcgaggatgtcatacggcggcagactgtcctgatccagctgacccggtgccagctctgctgacggcggacgggtgataacccgctccggaatcgccggagagagtgtgttgcggtatcttgccagttcaaacaccatggttttcggcacatccttcaggacattaaagcccccggccatatccccgtacagtgtggagtaaccgacagcgcactcgcttttattactggtggtcagcacaatgcggcggcgtttgttggacatcgccatcaggatcaccgcgcggcagcgtgcctgtaaattctcttcggtggtatcaaccggtgttccggcgaatttcggcgccagttcgtgcataaaggcttcaaacatcggctcaatcgacaccacatcaaattccacacccagcagctctgcctgctcacgggcatcgtggatgctgatatccgaggtgtaacggaacggcatcatcaccgcctgcactttgtctttacccagtgcatcagcggcaatggcgacagtcaggccggaatcaatcccgccggacaggcccagcaacgctccctgaaaaccatttttgcggacataatcctgcgttgccagcaccagtccctgataaacctgagccagaacaggtaacgacggtgccggatccgccattggcgtgatggttaaatccgtaaagtgacactgcgcgatctgctctgaaaatgcagcaaggcgatgtgttacgctgccatctgcggcgaaaacagcggaatcaccatcaaaaatcagctcatcctgcccgccgacctggttgagatagaccagcggcagcccggtacggcggcagtgtgcctgtatcagcacatcccgggtatcaattttatcagtggaatacggtgacgcattcagtgtcagaataatttccgcaccggccgctttcagggcatccaccggagcgtcagtccagatatcctcacaaatgagtaacccgagacgatagccgcgaaaatcaatcacacaggtttctgtccctgccgtaaaccagcgtttttcatcaaacacgccgtagttcggcagttcctgtttgaaataacgggcgcagagttcccctttctcaaagaaagagagggcgttataaatgtgaccgttttcctgccacggatgtcccaccagcacagcacagtcaccgctggcctgttggatccgggtgaggctctgcactatccgctgatgaaaatcgggacggaaaaccaggtcttccggtgaatacccggacaatgccagttcggaaaacatgaccaggtcagcccctgccgcctgctgttccgccatggttttcagaatacgttcaccattgccttcgatatctccgaccagaaaattcagctgggccagggcgatattaagtgtacgacgcataaaatcctgctctcccgggatagatctcaccgtgtgtaaaaattaataataaaacagctaataatgaagatgatagcaaaatgtgccggttcgcaccgattctttgcttattctttaaagtcggccgcatccagctcatgacgggacagtaatttatagaactctgtccggttacgccctgccagacgggcagcgttggtcacgttacctttggtcatctggagaagtttgcgtaaataattgagttcaaactggttgcgggcttccgcaaaggtcggcagcgccgtgttttccccttccagcgcctgagtcaccagcgcttcgctgatcaccggcacggtggacagcgccacacactgctcgataacgttaagcagctgacggacgttgcccggccagctcgcgcccatcaggcatttcatggcatccggagagaagctgcggacaaacggcttatgctttttcgccgcttcgcgcagaatatgattggccagcagcgggatatcttcagcccgctcatggagtgtcggaattttcaggttaaccacgttaaggcggtagtagagatcttcacggaattcgtgtttttccatcgccttgggtaaatcgcggtgtgtcgcggaaatgacgcggacatcaatatcaatgtcgcggttactgccgagcgggcgcactttgcgctcctgcagaacacgcagcagcttgacctgcagcggcatcggcatatccccgatttcatcgaggaacagtgtgccgctctctgccgcctggaacagcccttcccggctgctcaccgcgccggtaaaggcacctttggcatgtccgaacagctcggattccagcaactgctccggcagtgcaccacagttgatggcgataaacggttttttcgctctcggactggctttgtggatagcctgggccagtacctctttcccggtaccgctctgaccattaatcagtacactgacatcggattgcgccaccatacgtgcctgttccagcagacgcagcatcagcgggctgcgggttacaaccccctcacaccaggattcatcactgactgtggtggtggagagcgccagcgcatcatcaatcgctttatataaggcatcgcgatccaccggtttggtcaggaagctgaacacgccttcacgggtggcggccacagcatccggaatagagccgtgggccgtcaggataatcaccggcatgccggaatgggttttctggatctcggcaaacagcgccataccatccatttcatccatccgcagatcactgatgaccagatcgattttttctttattgagtaccttcagcgcttcagggccgctttctgccgttgatacccggaaaccttcactgctcaggcgcatacccagcagtttcagtaagcccggatcatcatcaaccaataataagtttgcgctgcggcgtgctgtcatgccggggttactcctttttttcctgtgccggttttgtttctgcggcttttgtttctgcggcagccggtttggcttctgccgtacctgctgcctcttctaatgcctcacggcgctcctcgagcgcattttccagttccgcatccgctttggtcggctgtttgcggccggccaactggcgctcaatgttgctcaggttatccagcttgcgggtggtattctgtaattcaaactgcaggcgggagttaaccgcacgcaactgatcaattttgccgtccgtatcgctctgcaggcggcggtagcgctggcgttcgtcactcagggcaatcgcctgtttcagttgatcacgccacagggtcatcagcggacgcagggagaccgggaacccggcactgtaggcattcagggtttccagcaccttacgcttgtcattggcggaggttccggtgttatttagcagaatactctggcgcagtgcagtatcccagctgtccggggtgattttccccgccataatccgggccgtgtcactgctgagcagatcagcgcaatccatcatccgcagccagtaaagcgcgttttctgtcgcggccgcagagttgagttcccagatagcgtggcagtccgcaatccggtaatccgccgtccgctcctgcggcaggacgacagaggccagcgcggagagatccggcggcgttgcggtttttacgcaaccggccagcaacagcgggacggcggcaatcagggacttaaatgtcattttcaagttaatgctgacctgttattccagtaaggtgtggaacggaagctgaatacggaagcacacatccgcaccttcagaaccgactaatatcagttcgccgcccatccggttaatacaatcccgggcaatactcagtcccagcccgctgcctttgacagcacctttgcgctgaagcgagccctgatagaacggttcgaagatcatttcctgctcttcttccgggatcggcgtaccggtattggcgacatcaatctgtatatgctgaccggctttccggctggttatccggatcttacccgattcagcgccatagtgtaccgcatttgagtagagattatcgagtacacgtgttaataagacgggttcagcccagacacttgtttcatccagagcaaggtctgtagtgatttctttgcttctcgccggtaagctgtgggcattgaccacctcatgcactaccgtatcgaggttaacccatttggcttctgtcgggctgtccaccagtgtgcggttatactccagcagctgttcaatcagcacctgtaaatggcggctgctttcactcagtattgataccacatctttctgatccgctgtcagcggccccgcgacttcatccgccagcagttcggtaccttcacgcatactggccagcggggttttcagctcatgggaaatatgacgcaggaattcatgacgctgggattccagccagtcgaggcgctcactcagccagacaatccgcagcgccagcgagcgcagttctctcgggccgttaaaattatcaaggcgctgtatcaggttgcgcccttcccccaggcggttaaccatccgctcaatcactttcaccggcccgataatcatgcgggtaaacaaaatgataaggccggtgctcaggacaaacaccagcaggctctgccagccgaatgactggcctttgcgggcgatggcattctgaagttcctcaccgcgccggaaattcgcctcacggatagcctgtaccagatcagcattactgcgggcaaaggcttccaggtgagtggtcatcgccgcgaccggttcaccgttctcgcactgcaggacagacaactgtccgaggctgttggcaatatcatcagtatagcgcggatccggggtggattgtttctggcgggcgagatagtcctcatagcggagatactgtttgtgccagacatttttcagggtttcattacccagcacacagtactggcggtagctgcgctccatttccagcgccaggctcgacatttcctcactgcgccgcgcatcctgtacggttgaaatactgatttgcgccgcctgattactcagctcatcaaaactctgatacgcctgccaggccagtcccagcaacggcagcaataccagacagaatgccaccacaaccagctgacgcagcgagcgcggaaataatcgccattttttcaagattgtcatctcttaacctgttgtcatgtgcatgatgctaaccggatccgggataagagaaaaggatcaggatgcatctgtgcgaaaaagagaacagaaagaatgcagggaaggtataaaatgatgacgggacgacagtttcctgccgtcccgtcagtgagattaaggtggtgcctcactcaacgtgtcgccctgtgtctgataaagcttgcgcagttatcggtattaacggacggtaggcaccttactctggcatcattcccgggcttatgtggcatgtttccgcctgttgcgggccgacataaaaaattgaatgagcaactgcagaagatattgcaactgctgtgccaactttgaaaaataaaattcaacacactgttattaaagagaaaatattttccatcgcccgctatttttttccggcgtgctgtcatacgcatcttatcttccggtttcttccccgttttataaaaaaacgtctctgatttgcgacagtcttttttgctcttttttaccctcttatatatcagtaagttaaatgtccccttttgacgacactcaaaaaccctgttgtcgccgttctgtgacacactgagcatttatacggcagacagataaaaaaaacggcggggataaccccgccgccgcgatgataactgaatgaaaaatcagcctaattgtttacgggcattgcggaagatccgcagccacggtccgtcctcaccccagttctccggatgccaggagttgctgacggtacggaaaacacgctccggatgcggcatcataatagtggcacgtccgtcatcggtcgtgaccgccgtgataccgtccggtgagccgttcgggttcgcaggatagcgttcagtgacctgcccgtagttatccacatattgcagcgccaccaggccgcgttccgtcagcgcctgctgatgtgccgcatcacggaattctgccagcccttcgccgtgagacaccgcaatcggcatccgtgaaccggccatgccgctcagcagcagtgacgggctctgtgccacttcgaccagactgaaacgcgcttcaaaacgttcagagcggttacgggtaaagcgcggccataaatccgcccccggaatcagatcccgcaggtttgacatcatctggcagccgttacaaaccccgagtgataaggtatccggacgcgcaaagaactgcgcaaattcatcccgtacctgcggattgaacagaatcgattttgcccagccttcaccggcacccagcacgtccccgtaagagaagccgccgcaggcaaccagtgcctggaagctgtccagcggaagatgcccgttcagcaggtcgctcatatgcacatcgatggcatcaaacccggcacggtggaaggccgccgccatttccacatgggagttaaccccctgctcacgcagcaccgcgacacgcggacgtacaccttttacaatatacggcgcggcgatatcgtcattctgatcgaatgtcagtaccacattaaggcccgggtctgtcagatcctgtttggcttcatgttcttcatccgcacaggccgggttatcacgctgacgctgcatctgccaggtggtttccgcccacatgatccgcagttcacggcaggactgatgatagacttctgtattgtggctgcggacaataaaatcatcccccggtacagcgtcaccaagaacatgcagcatatctgccagaccggcatcggtgaatgcctgcacaacgccatcaagatccgcttcacgcacctggagcacggcccccggctcttcggtaaacagcgcgccgaggatatcctcatcaaatgcactgatatccgcattcacaccgcagtgtccggcaaaggccatttccgccagggtgacaaacaggccgccgtctgagcggtcatgatacgccagcagtttttcgtcccgcaccagggtctgcatggtgtcaaagaatgcgcgcagcgcctgcggattacgcagatccgcgcctttctgtcccagttggcgatacacctgcgccagtgcggtggcaccgagggtattacggccttcccccagatccaccagcagcagacggttcggcacatcgctccgcagttgcggcgtgacggtccggcggacatcatccacacgggcaaatgccgtgatcaccagtgacagcggcgaggtcatctcgcgctcttcgccctgctcgttccagcgggttttcatcgacatggaatctttaccgaccgggatcgtcaggccgagcgccggacataactcctcacccaccgctttcaccgctgcatataacccggcatcctcacccggatgcccggctgcggccatccagttggcggataatttgatccgcttaatatcgccaatctgcacaccggcaatgttcagcagcgcttccgccaccgccatccgcgctgaagcggcaaaatcaagcagtgcgaccggcgcacgttcaccgatggacatagcctcaccgtagtaactgtcgaggctggcagtagtcaccgcgcaatccgccaccgggatctgccacgggccgaccatctggtcacgggaaaccatgccggtcacagtacggtcaccgatggtgatcaggaaggttttttccgctaccgccggtaaatgcagcacgcgttttaccgcttcatgcagattaatatcgcggcggtcaatcggtgtgccttccgcggtcagtgtggtgacatcacggcgcattttcggggttttacccagcaggatatccagcggcatatcaatcggctgattatcaaaatggctgtcattcaggatcaggtcacgtttttctgtcgcttcaccaatcaccgcatacggcgcgcgctcgcgctgacagagtgcctcaaacagcggcagctgctcaggcgagaccgccagcacatagcgttcctgggattcgttacaccagatttccagcgggctcatgcccggctcatcactgaggatatcgcgcagctcaaaacgtccgccgcgtccgccgtcactgaccagttccggcatggcgttggacagaccgcccgcaccgacatcatggataaacagaatcgggttgttatcccccagttgccagcaggcatcgatcacttcctggcagcggcgctccatttccgggttatcgcgctgcacagaggcaaaatccaggtccgcatccgactgaccggatgtcatggaggaagccgcaccaccgcccaggccgatattcatcgacgggccgcctaatacaatcagtttcgcccccggcgggatctcccctttctgtacgtggtcagcacggatattaccgatgccgcccgccagcataatgggtttatggtaaccgcgcagttcctcgccgttgtggctgctgactttctcttcataggtccggaagtagccgagcagtgccggacggccgaattcgttattaaacgccgcgccgccgagcggaccttcggtcatgatgtcataggcactgacaatgcggtccggtctgccgaaatcctgctcccacggctgggtaaagcccgggatgcgcaggttggagacagaaaacccggttaatcccgcttttggtttggcaccgcgcccggtcgcaccttcgtcacggatttcaccgccggagccggttgccgcccccggccatggggaaatggcggtcgggtggttatgggtttccactttcatcaggatatgagtctcttcctgatgatactgataactgcggtcttccccctgcgggaagaaacgcccggcagaggagccttccatcaccgctgcgttatctttataggcagacagcacatgatccggtgtctgttcaaaggtatttttaatcatcttaaacagggatttcggctgctcttcgccgtcaatcacccagtccgcattaaaaatcttgtggcggcagtgttcggagtttgcctgggcaaacatataaagttccgcatcagacggattgcggccgagtttcgtgaatgcgtccgccagataatcgatttcatcttccgccagcgccagccccagagaaatgttggctttttccagtgccgcgcggccctgacccgcgaggtcaatcacggtcagcggtgccggttcatggcgggcaaacagcgcctgtgcctgtgacagctcactgaaaactgtttctgtcatgcggtcatgtaacagcgcactcagttgctgatgttcattctctgtcagccctgtggtagtaatatagtaggcgatcccccgctccagccgggtaacggctgacagaccgcagttatgcgcgatatccgtggctttcgatgaccagggagataatgttcccgggcgcggcgtgacaagaaacaggatcccttccggcgcatgttccgccagcgacgggccgtagcggagcaactgctgtaatttagtgtgctcatcgtcggtcaggggtgcggaaagatcagcaaaatgcacatattccgcatagatgttggtcaccggcaggtggtgttcagtgaacgcgctgataaattttgatacgcgaaacgcagataacacaggtgagccacgcaaaatttccatagttgtcagttctctctttttaacacgcagagccatcggcccggaggggaaacgggcacattatagagcaatactgacgccgacgaaaccgtttgcgtgacgttttttcccggggggattttttccggatttcagccccggaaaacggaataaagttgcacagcgacaaaatgttgagcaaaatgtccgattactggaaatataaccatggtaatttatgcctcagaatgaactcttttgtgtcaccggtgagatgcgcctttggtacataaaaagctaaattatgtcgttatcgtcgtcgtcgcgctgttcgcggcggcgctgatcgccatcaatatcagctggccatcgcagcagccgcagctcaaccgtattctcgcgcggggggaactgcgtgtcagcgcggtggcatcaccgcttatcagctttaataagcagggacaggccagcggttttgattacgaactggcgcagcgtttcgcggactacctcggggtaaaactggtggtgcgggaacgcgacggcgtcaatgacctgttcagcgatcttgccaataatgatgccgatctgctcgccgccgggcttatctataatgaagaccgcctggacactgcgctgagcggcccgacttactacaccgtcgcacagcagcttctctaccgcatgggtaacaaacgtccgcgggatttgggtgatctcggctctccggtctgggtcacagccggcagtgctcacgcccgccttctccgtcagctcaaagcggataaatatccggatctggacatccgcgaagttgccgataaaaacagcagccatctgcttcagcggctggcaaaaggtgagattgattatgtcgtcagcgattctgtcagcgtggcacaggagcagcatattcatccgaatgtcacggtggcctttgaggtcacggaaaaccagccgctgacctggtatctgaaacgcagtgaagacagcagcctgaacgccgccctgctcgattttttcaaccagacacgggaaaccgacaccctggcgcgtctggaagagaaatatttcagccacatgaatcagtttaattatgtggataccaaaacctttattaatgccatcaacactcagctggccacttaccgcccgctgtttgaaaaatacgcgggaaaaatggactggcaggtactggcggcgattgcctggcaggaatcacactggaacccgactgccacctcaccgaccggcgtgcgcggcattatgatgctgacccggccgacggcggatttcttcgggattgaggatcgccttgaccccgagcagagcatcaagggcggcgggacatatataaattacctgatggacaaactgccggattccatccccgatgatgaaaaaatctggtttgccctcgccgcttataatatgggctacggtcatatgctggatgtccgcaaactgaccgagatgcagggggcggatccggacagttggctggatgtgaaatcccgtctgccgctgctgagcaaaaaagcctattatcagtctctgccgtacggctatgcgcgcggttacgaagcttaccgctatgtggaaggggtgcgtcgttaccagctcagtttacagggctatctcgatttacatcaggaagagctgctgttacagcagccgcaggaagaaacggcagagattctgacctctgccgcaccaaactgatcactcattctctgatttctgactttccgcatgctgttttttcagggcttttttctccgcacggcggtggcggaaaaattcactgagcattgccgaacactcctcccccagcacgccccctgtcacttccatataatgattgagacgcggtaaggtcagcaaatcaataaatgaccccgcagcaccggttttcggctctgccgcgccgtacaccagacgtttgatccggctgtggatcagtgccccggcacacatcatgcagggttcgagggtgacatacagtgtggcatcggtaagacggtaattttccagcaccgccccggccccgcgcaacgtaacaatttcagcgtgggctgtcgggtcatggctgaggatcggctgattgaaaccaccggcaatgcgctgattatctttcaccagcacagccccgaccgggatctctccggccagcgccgcctcttctgccagcgccagcgcctgcctcatccagaattcatcattattataaggtgttgtactatcagtcacgtggatacctgcttatttaaaatcaggcacagtatagcgtcacttttgtcaggcaggcagtttctttacgccgtaaacagcgccagtttggcggcaaagcccataaaaaacagtccgatggtgctgttgcccacttttgccgcctgttttttgtggcggaagaactgtgataatttagtgccgctgtaaattaaaaaggagagatacaaaaaactgaccgtttccagaatcagcgccagcacgccataactcaccgccggatgagaataattaaaatcaataaactggataaagaaagagacataaaacagaatcgctttcgggtttgtcaggctcaggatcagggctttattaaaggcattttccgctttcagcggcttatcctcatgatgccccttcttctgcataaaggtggcatagaggattttcagtcccagatacaataaatacgcggcaccgaggtaacgcacggcggtaaataatgccggagaggctttaatcactgaggccacgcccagaaatgacaacatgatcagtaccgcatcaccggtaaatacgcccagtgcggcctggtaaccttttttatatccgaatgtcgcactggatttaaggacatacagtgagttcggccccggcacaaggataataaaaataacgccgatgatataagtaccgatattcagtatgcccagattttcaaacataacgcctccgtggtgtgtgcaaatttacagctgttttttattattttgtgttcagattaataaatcacaaaatacatgccacggatatacccactctgttataaggtgattttcccgttttcctgcggcattttgcggcggcggggataaaatatcaggataaatacccatactgccgataatgctgcgcctgccattgccagattaaacccgcccgcaaaggcttcataaactgtattctgcactgcagccgtcagttctccgctctgtgcgccggtgataagctgctctgcggacggtaactgacggtgctgcgcaatactgaccgcccgctgtatcatcagtgtgccgagcagtgccacccccagcgtcataccggtctggcgcatcatattcagtgtcgccgatgccacgccggaacgcgccgggtcagcggcatgcataatcagcgccccggtggcgggaatcgataaccccatgccggtgccgagcataaacagtatcagccctgtcagcggatacggcgtatacggcgtcagcagggtcatcagcccgcaggccgctgcggtcagcagcagaccggtgccgaggatcagccggatactcagtttgcgggcgatccgcccgaaagataatgcaaacagcgccatggcgataaattccggcgacatccgccatcctgcctcaagggcattccagccctgcgctttctgtaaaaacagcgcgataaaaaacacattggtataagccgcaaagccaatcacaaacgaggccagattatagtgcagatactcgcggcgtctgaaatccgccagcggcagcagcggttttgccacccggttttcggtgtacagaaataataaaagaaaaataattccgccggtgacagtgagcagcgtcagcggatgcagccagccatgaatacccgcctctgtcagcccgtacgtcacacaccccagtgctgcgatactgagtaactgccctgccgggtcaaacgccgctttctccgggtccgcgctttcacggatgccgtactgcccgagcagaaatgtgattatgccgacaggaatattgatcagaaaaatgccttcccagccggtggtatgcaccagcacgccgccgaggatcggcccgacaatcagtgacagcgcactgaccgatgaccagataccaatcacacggatccgctgctgattatccgcaaaagtatgcgtgatcagcggcagggctccggggatcagtaacgccgccgctatcccctgcaccacccgtcctgacagcagcaacggcagtgtatccgccagtgcacagagcagtgagccgagggtaaaaatcagcacgcccgccagccacatctttttgcgcccgtaacggtcactcagcggaccggcggacaggataagggcagataagcacagtgcataagcatctatcagccactgcaatgacaccatcggtgcatccagatcatgctgaatggccggcagtgccacattcacgatactgatatccagcgttgccataaaagtgcccaggcaaatcgcggtggtaacggcaaaataacgaagtcggttcatagtgttctcctttcacagaagcagaatacacattgactgaccgacggtcaattgaaatgagaacgtatttcatttgcgtgtttttttcgccttcctgccccgtaaatggcataatcagggttttccgttatacaaggcgcgtttatgactcagtcagcagaacacaaaccccgttttaaacctgccgatgtccggatcaatgaactgatggatgctgccgaatcactgtttctcgaaaagggatttgatgccactacggtcagtgacattgtggcgcgggccggtgtcgccaagggaacctattatcactattttgccgctaaaccggacatttacgaggcattacgccaccgttatatggactggtttctgtcacagacccagcaggcgatggatgcctgtgcggcgggtgatgcggatgccagactggcagcctggtgtgatcgttctgtcacggcctatactgaaaaacaggaactgcatgatgtcctgttccatcagggatttcaccagcagggcaatgaccatgaaaatgccgtgctgaatcagctgcttgccctgattgcggaaggtgagaagcacagtcactggcgggtggcgcatccggatatcacggcgatgattatttatcacggcatgcatgcggcggtggataccctgccgcagtccggacactacaccgcacagacgctgggcggcgtgctgtatgaacagtttctgcgctttctgaaagcctgatctgctctgataaaaaaagcccggtcgcagccgggcttttcacactctgttgtttatacagataaaaatcagcgtaatgtttcatccgcacgcagagttaacacttcatagccggtcgcggtcaccagaatggtgtgctcggactgcgcggataattttttatcccgcgttaccaccgtccagccatcttttttggttttgattttcgcgccgccctggttaatcatcggctcgatagtaaaggtcatcccctctttcagttccgtccctttaccgcgcacaccgtagtgcagcacctgcggggcttcatgcatctcacggccgataccgtgaccgcaatactcgcgcaccacgctgtagccgcgtgattccgcgtaatgctgaattgcggaaccgatatccccgagcgttgcgcccggtttcacctgctgaataccttcccacatggcatcataggtggttttcaccagtttacgggccagcggtgacgcttcaggcatcacatacattttactggaatcggcaataaagccgttcttttccagtgtgatatccacgttaatgatatctttgtctttcaccagttcgtccgctttcggaacgccgtggcacaccacttcattcagcgaggtattcagcacatactgaaacccgtactgccctttactggcagggcgtgactgaagggtattcacaatataatcttcaactttgtcattaatcgccagcgtggaaacacccggtttaatgaaatcgtccagcatggcaaaaacgcttgccagcagacggcctgattcccgcatcagctcaatttcttcaggtgtttttataacgatactactcatgctgttctcctttccggctgacagactctttttccagcatttcgctgacaagcattgtgaaggttttatccggattcatttcagcctgcattccgattttgatccagaattctgcctgagcattgatagagcgcgacatcacagtgctcgcccggcgcagatattcatgtaattcatcggagattttaacaatacccacgtaaaatccttaactgataaaccatatataaaacagatatggttcatatagtagacctcccgcaaacgggaatcaatcgcatcctgcttattcagcataatccgcaaaaaaaaacgcggcactgcttaagcaggtgccgcgctgttgcgcaggaataaaattcccagcaaccgccgcgacggtgataacggccgttatcataatcatcgttataacggtatgactgatggcggttttgctgcgattccgcccggattttttcactgagtttatccgggtcattaatcagtgcagcggctttatcatccgtttccgccacaccttcatcatacagccggttaagttcggcccgtttctgacggaattcctgtactgcctcagaattgttatcagaataacggttgtgataaccattattatactggttatcgcagtacggacaggccattgccgctgcagagaaaaagagcggcagtgctgccagtaccgggatcagaattttagctttcatcattatgctatccgtaaaagtacctgtaattcatcaggttgatgaccgccggatgatagagcagcatacataacagaaagtgacaattcgtgcgatccggctcagaaaataagcagtcccattcctctttttacctggtccagcgtctgctgtgtcacttcccgtgctttttctgttccgctgcggataaccgaaagcagataaggtttatccgccatcagccgcgcccgctcctcacagatcggtgccagcagtgcctgcaggcattcgttcagcactaatttacactccctgtcgcctaaaccgcccgcctgataacgggctttcatctcagcaaccagggctgtatccggatgaaatgcatcaagatacgcaaacaccacattgccctcaatcctgccgggatcagacacccgcagatgctgcggatcggtaaacatagcattgacggcgcgcgtcagttcatccgcactgacagagagattaatggcatttcccagtgatttggacatcttaccgttaccgtcaatccccggcaggcggccggttttacctatttcagcacggcagtgaaccagtaattcctgcccggtaacatgattgattttgctgacaatctcattggtttgttcaatcatcggcagctgatcttccccgaccggcaccagatcggctttaaacgcagtgatatccgccgcctggctgaccggataaatcagaaacccggccggcagtgtacgggagaactgcttctgaatgatttcctgtttaaccgtcggattccgctccagccgggaaacggtcaccagattgagatacagcagtgtcagttcagccagtgcgggcagcgccgattgcagacaaatcaccgaacgggcgggatcgatgcctgccgccaggtaatccgccgccacatcataaaaataacggtttactttttcgggttgcgcaccgttatccgtcagtccctgcatatccgccatcagaatatactgcacggcagaatgctgaagtctgccccgctgttgcagcgagccggtatagtgtccgaggtgtaacggcccggtgatacggtcgccggtcagaataacggattgggtgtgatgaacagacatacgatttcctcttttattgtgatcagaggccgccggggtgaatgcaatatgtctgaaatgaaatcgccgcactccggcggcgatttttgcaattaaaactgaataacaaaaccggcgccgcacgttgtgagccaccagaaagcattgtgtgataaacagcctgaaattttattattcatcatgctgacaatgtacaacctttatatcttattgccactctttttttgctgcgacggatattttcatttctgctgtttttatttacatacttttttctttgtcagcacagcccggacaaagatgacaaatcatgacaataaatcagttttctttcattgagttaccggttttatccggtagaatcagtcagtgagaacacattatgatttatcaccttctgccggagaatgtttatcggatcagattaaagttatattaaggagaatatatgtttttactgacactcggatttattatcttgtcctgtctgtttgccaccgtcatgagcccgaaatgggatgattaaatgaacgcagacgtattgtctctctgaacgcctttcagtgttatatcaaaactgaaaggcgtttttatttatgatgctgtgcaataccctgttctccctttccttcccggcaaaagcacatttttttgatcagtcattttttgactaattcatataatttaactatctttaaggtgttaccaagctgaaagtaacacctgacgcctctgaaccggtttcgtttgttcagaggcttttttatttcccgcgaaaaaacctgatcaacaccctgtcagtatattgtatttactggataaattacgccaagacacataaatccggcctgatataaaccactacgtgtaaatactaaaaataaccgtaaatacatttttatgctgtacatcttccgtacggcgactatattgataagcagttttaattaattgatattcacattactgacctgctcctgactgtgcaggtacacgttctgacatgatttacccgcacactaacctgtgcgggtattttttattccccggacgacggacagcagcaggattttttccccgtcagcgcggcttcctgcaccggcgggcaagccaccgtgccgtaagaacaaaatacgcagcagtctcccgcaagcggttttaataatgtatggcagtgctcacattcataaaaccactgacaggcattcaccggcatcgtttctgttttttctgatccgcaaaccggacaacgcagtgtcgactgcaattcaattgctgctgaattttccatttctttatgcccctgattatggtgtgacatcgtataaaacaacacctgccaccggtttccctgtaacggccttgtgttgtgcttttgtttagacagacctctttattatacacacatgaactttccatactgttcatgattatcatacctatatcctttccgcccggtcacattttgtgtccgggctttttttattcttttcactttcctgcaggcacaaaaaaaggtcaccgcagtgaccttatttactaccttacatcagcggggaattttaatgatcccgccaatgaagacaccgacgataaacgggaatactccgaaacccagaccgatccccccgccgataatcagctgaccgccggttttttccggtgttaccggcggagaaacattaccggttcccggccggagaaaatcagcaattccgccgccactgacagcggcacactcacgaacagataattctttcatacggatatccttatcgataaaaaagccatataacgacataccggtttacagataacgtcatggtatgtgcacagatatactccgcattctttcagccttaatcaagaaatccttttttatgtcatgaaaaacaaaaatttgtcagtatatatcactatttgcgttaattaatctgtggtcttttctcttattccggctgacatatttcttaattaagaataattatcattaattaactattaaacctgaaacatatttgtggttattctgaacagtgtattactttaatatcctgccatcttatttcaggaacagtaaattactcgttatatgttataaagcctgaagacctgtgatacgcatacagacagcaccagccccccttctcccgaagtaacattcagatacatttggtctgacttttattgccattatatgatattttattaatacggagtgtttttggtatttatatctgtctttactatcatatacgttcaaaaacagccgaataaaccaaaacaataaacgggctattttttgattcagatcaaagaaaaatactgaacaccatgaatagtaacacttatttactatttcactgatatataacctgtccgttcacatttcttccattctcattctacacatattacgactattgcattaacaactaccgcaagtaaaataaacatcgtcgccacacagattattttattggtcaggtacggcatactaattaaattatttttattattcccggataacattgtttatctgcttataaggcacttatttatgcccgttaataacaaacgaaattccgctgccattaatcaggcagccggtgctgttattcgttcattacggaaagaaaaaaatttatcaggctatgacttaggttgtttaaccgggttaagccagcagcagatctcccgctatgagcgcggcagcaaccatctgacgctgaacctgctcattgagatattacttgctctggatacgacactggacgaatttctgtatcagatgaatattcattgcggctttactgacagtaaaaatatgctgtcagtattcagaaaggaacatagttttaattcatcatttaatgatgatgacactatattccacagctgatatttatcgctgaatatcagtaacattatatttgttgtataaaaacttcaatataattaaacaaaaaaacgatgacaataatatcactttattcattaagaataactgatgaatattctgtcacggatacccttttattttttattactattcgataggaattcaatatgacgttcaaaacaaaattactttccgctgccctgttcgccggcctgtctgccaccagcatgaatgcactcgcggcaccgtcagcagaagtgacgttacagggtattctgactgacaccacctgtgatgtaaccatcaacggcggtaaatcagtcctgaatgttggtgtgttcaacaccaaagtcggcggtgcggatgccggattcaccgcagccaatgccatcaccacacagcaggctgacatgccggttaccctgaccggttgtgccaaaggtgaagccggtgacctgatcatccagggtatcacctctgtcgggaacaatgagcagagcgtgtttgttgctcaggatacccagactgtcggttttatgattcaggacagcgacggtaagaccatcactaacggcaaaggcgctgcggttgcgctggatgcggaagaaaccagcgcacagtacaccttcaaagtcggtatggctaccaccaacgccaccccggcggccggttcttacagcgcaccaatcctggttgcttatatcgttgactgatagcagttaaccacggcagcgcgcttcaccgcgctgccttatcctattaattacctgacggaaaacgcatggaaaagtttaccctactcagacacgcagtcagcagcctggtattgctctccgcgacctccgttgccgggatagccattgacagcacccgcgttatttttcaggcggctgatgataccaccggcaaaagtgtcggtatcaccagttcatccggctcactgactccgtatctgataaaagcacagatcctgaaaacaccggccggtgagcaggcagataccccgtttcttgtcacgccgtcactgttccgtcttgagcccggcagtaccaatcaggtccggattatgaaaaaaaataccgcactgccgcaggacagagaatccgtattttatctgcgtgccattgcgacaccggcgggcgaaaaaaacaatacacagcaggaaaaccatatcggcggtaccgtacaggtttcatccggcaatatcatcaagttattttaccgtccttccgggctgaaaatgaaaccccagcaggccatgcaatcactgcagttttctgccgccgggaacggattacaagtcacaaatccgtccccgtatcacgtcaccctgaagtctctgacggccggcggacgcaaagtcccgctgagtattaaagcaggcaataccatgatcgccccgatgagcagcaatatctatcccggtgcaccacatcagggcagcgtggaatggaaagcaattaatgattacgggggtacggaggtctttcatgggcagattcgctgactggttaccggggctgtgcctggcactgtactgcctgtctccggcgctccgggccggaacaaccgaactttccgccgttattacggatgatatcggctgcgggatgagcattccgtccgtattgcagtttacgcctcagcgcaccacggattttcagggcgcactgaaaacacatgaaatcaagccgttacaggccattttcagttgtacggacaaaacaggaaagctgacgccgaaaattacattacagggcaataccccctacagcgcagataccctttttcttgacggcacgcccaacagtgccgggtttatgctgcgtttgtatgacggttcacaaccgtccctgaatgatttttacgacaccgggaaagccattgcccggggtaaacaaatcgctctgacgccgctgaatgcggaaaaccatttccggacagaagaaacattcctggtcggactggtcggcccggttgatggaccggcaaccccgggagagttttcggcagctctgatttttaatcttatttttcagtaaatgttaaaggttgcgcactatgttacttatcagaaaacccgtttttgcctttttactgcctgtgatgatgagtatgacagcagcacacagtgcggtggctgccacctctgcatccaccgaattcaaagccaccattgtcggcgggagctgtgatatcaccgttccggcaaccgtatcagtgaataaaggggcggtgatcccgtcagaagatattattgccggtaacagcccggttgaatcattcaacctgagactggccggttgcaaagggtatggcctgacaccggaaatcacccttgaaggggatgtggataacacctccggtatgccgctgttcctgaccaacaccagcagcaccaaaggctacggtattttgctgacctttgccggtaacagcaattttaaagcgagcaccaaccttgctgccgacctgaagctggcggctgccggtaaaacctggtcaaccacgatggcatccgtgctgaacggcaatattccgttaaaagccgctgtcagttgcggtaattgtgcagcagatgcggatattcagggcggtgaactgaaagccaatgtcacctttaaatttgcttacaactgatagccgcacagaatcagctctttcctgaaaccacgggttaacgatgaaaataaatactctgtacaaagcattagccctgtcagcaggactgctccctgcggcttttcagacagcagaggccggcagcctcacacagacgattaattttaatgccactttttacggcggaagctgtgaaattaccgcaccggctcagttgccttataacaacggtaacccgattccggataacacgattgccggtgaccagcattaccaccagttcagtatcactctggctggttgtcagggttactttatggcacccaaaattgctgttaccggcaataccattaccaccagcgacggtgtgaaattatttgctgatacaaccagtacctcaaaaggttacggcgtacgcctggcgacagaaggcaatgagagctttaacgccaacagcaatgctgccgcctccggggcaatcagtgccctaaactggcctgaagacggcgctaagaacgccgcatcgctgaacggcccgctggaattcagaggctatctctcctgcggagcctgcacaccgggcacagaattacagggtggcgagctcaaagccacggtgacattcacatttttatataactgatccccggagcggctatgaaacattcacttttaccccgtacatttttactgatggctgcatttattatgctgtcacccgttcctgcggcacaggcagccgaaggtggcctgcgtctggcgcaaacccgtgttatttttaatgcagataataaaaatgcgaatgccgctatcaaaaataacggtcagcaggtttatctgattaaagcggctgtgatgaatacaccggaaggaaataacccggcattacctgccgcaccgtttatggtgacaccgccgatgtttcgtctggaaaaagagagtcagagcacagccctgattgtccgtaacggcaccgcacaattaccggcggacagagagtctgtcttctggctgagttttcttgccattcccgctgtcagcaaaaacggtaatacgccggataacatgaccagcgcgcaggtgtctgtcggtatccgcaatgtgattaagttgttttaccgtcccgccgggctctccccttcttttgaacgggcacaggaaaagctgacattccgccgtgagagtcgcagcgtctcggtgaataatcccactccttattacctgacgctggcggcactgtcattcaatggcagagatgtcagtcttcaggatcacaatccgatgatcgcgccgttttcttctgcggttttcccggcagatggtgcggtatcacaggctcagtgggcggtgatcaccgattacggtgatataggacaaatacacactgccgctgtcagtgcaggagagtaatgatgatccgccgctgccttctgaatactgccgcattattatttgctgttactgccgcacaggcgggaaacctgccacagggacaggacggtatcacactcagcaatacgcgggttatctacccgggcgatgcccgtaacggcatcacttatacactgaccaataacacaccacgcccgtatctgctgcagtcacgggtactgccgtacggtgacagcacaccggaagatgagaccgggaaagcggaaaaaatcccctttattgtgctgccgccgttaacccgttttgaaccggatactgcgctgaccttgcgtatccgcctgactcagaatgcattaccgcaggatcgggaatctgtgtttacgctggcactgaatgccattccggcacaaacagaagccggtgagcaaacccgtctgatcatgagcacacagaacaatctgaagctgttttaccgccctgccggtctgccgccggcggatgaagcagtacttgcggagcagccggtattccggcgcagcggtaatacactgacagtgaaaaatccgtcaccgttttatatcacgttcagttctctgtcagccggaaacacggatatcgatctgcgtaatgcccggatggtcgcgcctttttcagaacagtcatggccattacctgccggtgccgccggtgatctccgctggcaactgataacagatgacggaaggcccggcgaaaccgtcacccgccctgccggctgaccacacacaacaataaaaacagatgataaccccgcttcagatgaaacgggaggagccctgcatccgcaggccagaggaagtctatgaaaatacctcataatatgaataacataacatcacagcgctcgtttttccattaccgcccgctggcatggctgctgcttgcggccacaacgccggtgatggcggacgactattttgaccccgggtttctgaatattgccggagataattcagatgttgatttatctgcattttctcaggccggcagtgtggcggaaggtgaatatacggtttccgtttttgttaaccagcaggataccgggcagtacacacttaatttcgttaaaaatgcacaggggcagattgcaccggagataacccctgctcagttggaaacctggggggtaaatgttccgcaggttccggaattaaaacatctgccaaaagatctgccgctgacagagttaagctcgcttatcccggatgcatccgcacgtctggagctcgggcgcctgcgtctggatctcagtattccgcaggttgccatgcagcctgctctcagccgcaattctgatcctgcattgtgggatgacggcattccggcactgatgatgaactataacctcagtgccggacggacaaccaacagctatgacggcggcctgaaaacacacaacgacaacctgtttgcctctgtccgcaccggtgccaacgccgggccgtggcgtctgcgcagcaccatcacgcatacccgttttcaatacagcggcgggcgtaatgaaccggcaagcagccagaacaggacatcgtttaccaatacttatctgatgcgggatatccgtccgctgcgctcctcggtgcagctcggcgaaaccagtaccggcagtgatgtgtttgacggattttccttccgcggactgaaactcagttccagtgaacagatgctgccgggcccgatgcgcggctatgctccggcaatcagcggagtggccaacagtaacgcccgtatcacggtccgtcagaacggtaacattatttatgaaacctatgtcgcaccgggcgcgttttatatcaatgacattcagcaggccgggttatccggtgactatgatgtcaccgtgacagaagcggacggcacagagcgccagttcgtggtgccttactcttccctgccggtcatgctccgccccggcggatggaaatatgaggtggcggccggacgctatgacggcaacatcaccaccagctcacgccgttctgattttatcaccggcaccctgatttacgggctgcacaataatgtcacactcttcggcggcgcattgctggcaaaagattatcaggcactgaatgccggaagcggcatttcaattggtgatttcggggcggtatccgcagatgtcactcattcaaccgcgaaatttaccagtgaaaatcatcagaatgatgaacggaaaaccggccagtcataccgtatccgttattcgaaaagtatgatgtcaaccggcacgtcggtggatttaacagcgctgcgctattcaactgaacacttctataacttcagtgaattcaacagccagggataccgtcttgaggaaggcgtcagtccgtggaccttacagcgccgccgcaccagtttccagactcagctcagtcagcagatgggaccgtacggctccctgtatttccgcgccagccgggatgactactggggaagtgatcgcacactgaccgggttatcgctgggctacagtaacagcattaaaggcgtcagttacggtgtgaactacaacatcgaccgggtcaaagataataacaatcactggccggaaaaccgtcagttatccctgaatgtcagcgtgccgttcagtctgttcagctcaggacagaatatgcagtccatgtacgccacctattcggtcactcatgacaataccggcagaacacagaacagcaccggcctgagcggcagtctggcggacggccggttctcttacggtgcatcacagaattggggaaataaaaatcaggttgccaacaccagcctcaattccggctggcagggtgacaaaggcagtatcagtgccggttacagctacagtgatacctcacaggcactgaatatgaatgcctccggcggcgtacttgtacatccggaagggataacgttcagccgctcaatgggggattccgtggcactggtcagtgcaccgggtgcggagggtgtcagtgtgaacggcggcagtgccgttaccgacagccggggttatgcagtcgcaccttatttgtctgattacaacaaaaacagcatcggactggatccggcaacactgccggaaaatgtggatctggtgcaatccaacgttaacgtttacccgactcagggcgcggtggtgaaagctgattttgccacccgtgtgggctaccaggtcttaatgacgctgaaacagggtgccaaaagtgtcccgttcggcgccattgctaccctgatcgacagccattccggtgaggcgatcagcggcattaccggtgatgccggtcaggtgtatctcaccggcctgccggaaaccgggaaattacaggtgaaatggggagaaacagcggcacagcaatgtcagatcagtttcgacctgcgtcatctgactaccagcgacgatatgcctgtccgtcaggtgacgtatcagtgtgagggcggggaagcagagggtaagaaagtaacactacagtctgaatttgatgctgttcagaaaaataaattacctctgacttcatctgaacttcgtatgctaaataaaaataactaatatctaaatgagaataaccatgaataaatataaaaagataatcaaaaacacatttcactttgaaaataaaatattctatgctttaacttcttttttattattttccgggcaaaatgcttttgctgcatgggaattaaaaccgggaagccgtcaggatattcccgtaaatgtcacgtcgaattatcccaataaatcaaagacagaagctggcagaaaccaaactgggcaaataacacctttaactacaattaacaaggacgaactatgtgaccggggtctgaatgttggcctgtccagcgataactctgtccgcgggttagttatcgcgcctgatatattgttaacattttcaggggatgcaaaaagctcggtggcaacaccatctttccaggcatcctggacggcgacagatggtaacgtacgttttaatagagaaaactatccttccggccaatatataaccggcattgtaaccgaagggtcattaagctgtatcggcacacttggttattgggtagcaacaaactcaactgccagttttaacgggaaaattactatctatgttggcccgactgctaaattaggaacgtatcagttacccaaattatactggaatgtaatagctgcaactaaacaaaccatatttagtggtggtacacttattgttaataatccccgtgtttgtacagtcagcactgacaacaccattaccttcccggcagcagatattaccgatgctgtcaacgcaaaagcactggcaaataaaacaggtaacttcaccgttacctgtgacgatacaaccaatgcccctgttacggtggaaatgcagggactcaaaggacggtataccgataccatggcgctgaccatgacggacggcacgaatgcaccggccgaagtccgcggatttatcggtccggatatcccgcttggcggtgaatgtaatggccgccttaacggatataccggtatcgtttatttcgttccgaatgccggactggaaaaaatgccgttcaaaccggggtcgtataaatataactgggtactgtgcagtaccggtgcatataaaaccggcaaagccaccggttccgctaaaatggtcgtcaactgggattaatcgtgatgcctgtatattctccgcttgtcccagccgggctgtgtcattgtataaccgcagccatattatcgctggctgtattacccgcagtttccggtgccgctgacaataatgccggaacaatacatgaccttggcgttcagtatattaacggcgatggtgttcccgccgatgcggaaaaagggcgttatcatattcaccgatccgcccttctgcattttccgctggcgcaatatcatctgggggttttattttataccggcgaaggcggtgacaaaaataccgcctgcgcccgctggtggctgggaaaatccgcgcttgccggtggtgacattaatataatggcacaacaggcactgaccgatatttatcaggaaataacggacaatcctgctgagcatatattactgactcagccgacggatattgttcgttgtgaaaaattaccggagcgcgctgctgcaaaaatggctgttcaggctgtacagcagattgtttccaccgcagaagctcttccggttactctgccttttctggcccggataaagcagtttacccgactctcagaccatctgacagattcactggtaatacaggttccgcagctctggtctgtactctccgcaccgccggtaccggatgaaatcaccattacgattatgcagccggttaaaacagaaccggaaaccacagcaccggtgattcccccggagccgccggtcaccatttatccgtctgaaacgattattccggatagtcttatcagtccctctgtaccggataaccatgcagctccgcgcagagagaataaaaatacacgcccggcatcacgcaataccggccgggatctgcgtaccgctccggcgcatcactacacattacaactcagcagtgccgcaacaccagacggcctgtaccagtcagcccggcatcataagttatcaaattaccttgtgtatgaaactgtccgccatggccgccaatggtatgtgctggtttacggtgattatcctgatttgtcatcggcaaaatcagcattacactcactgccatctgccttttataacaataagccctgggtacgcagcctgagacaggttcagcgtgaattaccctgaccggtgataatgccggatttattaccggcattatgacatcgtgcattatttatgcagatgaaggggatgtttcaatatatctctttattttcttgctgatgaacaaaaataaattccggaaataattaaagcaccacttaaaaaatggaaactgtgtaatttttcactgaggaaaagaacaccaaagaaaccaccactcagcgggatcaggtgagagaaaatctcccctcttgttgcgccgatagtcagtatgcctttattccacagcaaatatgagagccatgacgggaaaatcaccagataagcaagcccggatataaacagcggcgaggcataattacctatattactgatctgaaaatcatgtgaaaacagataaataatcagtatcggcaacatcatcaggctgccggtcaccgagctgatggccacaaatgcattacctttcacctcacggggtttcagtcttaaaaaagcacaatataacgcccaactgatagctgatcccagcgcccacaaatctcctttattcagatgactgatcacttctgaaaaattcaggttacctttaaatatcagataaatcacacctgacgtactcaataatacgccgatataatttttcccctgaattttttctttaaacaccagtgcattgatcagtaaaacaattgacggtgttgccgacatataaatggcggcattaagtgccgtagtatattgcaggccgatatacaatgtgacggggaataaaacctgtccgcataacgacagaaacagaattatcccttttgcctttttcataaatgcccactgctgtttcacctgactgaaatacagcgtcatcagtaaaaccgccgtcaccagccagcgcagttgcgataaaatcaccgggtcggcttcagttaccaaaagatgcccgacaacatagttcccgccccagaaacacgccgccagcgttaagaataaataaggcatatcccgctccagcctggtcaatatttatccgaccgtaacatggtggccacaacgcaggcttgttatttatcaaaatagttgtgggttttaaaataatttttaatgagtacgagccggagtggacgctggttctgtgcccggggacgtcgtaatcatattccgcccgctgatttctctgcgggtcatgctgggtaaaccggcctgtgtccggatcataataccggaa

SEQ ID NO: 30 - DNA, 12758 bp, unknown
  Altogen 322075 strain
  misc_feature (8724)..(8735): n is a, c, g, or t
aggaaatagacggatcgaagtttgcccccagccagccgatataatcttccagtttggtcggcgcgccgcgatagaccgagatattacccagatcatgcggtttgcccagcacgccgacatccagcgcccagcgcgggtgaaccatcgcctgtaacacacggcgcatggcggcattcgggccgctcatcccggaatgggcatcacggtaacgcgctcccggcaccggcatatcgacggtaaagaccagggttttgaccccggcggctttggcgcgctcaagggcatttttcataaaaccgcgatcgcgcagcacatagagctggaaccacatcgggcgctcaatcgccggggcgacttcctcaatcggacacacggagaccgtggacagagtaaacggaacgcccttattggctgccgctttcgccgcctgcacttcaccgcgccgcgcgtacataccggtcagcccgaccggcgccagggcaaccggcatcgccagtttttccccgaacagttcagtttccagactgagagacgacatatcgcgcagcacccgctgacgcagggcgatatccgccagatccgccgtattgcgcttcagggtatgctcggcatacgccccgccgtcaatatagtgaaacaggaagggtggcagtctggattcggcagccgcccggtagtctgttgaagcggaaataatcatcttaaatacctgtatatgtatgtaacaaactcagcactgtgcccggttacagggtcagtatcagtgccatcacggcggcaatcacgccgtagataaacatcggaaccactgtctttttgataatggacccttcggcgttggtaatgccgaggatggtgcagacagcgataatattattcagacacaccatgttccccatagcaccgccgacagactggagcgcgagggttaaattgacattcaggccggtggtctgggcaatggattgctggatcccgccgaaggtcaggttagacacggtattggagccggagaagaacgagccgagtgcgccgaggtaagaggcgaagtagatccagctctcgccggtggctcccgccagtgagcggccgataatgtaaaccggcgcattttcgccgccctgcatcatcaggtttaccataatcagcgcaccaaacagggcaataaacggtttgttggtctgttgtgcggtctgcacaaacatggtttttacctgtgtccgtttcaggcggaacaggaaaataccgataaacaccacgaggaagaacgggatcagcgccgggacgtacagggttttataatccgccgcggccggggtgccgaacacattgctcaggcggacaatcagtgcatcactcagcgtgatatggccgaggaaaccgagtgtcccttcccaaatcacattagtgctgttgagcagtcctttcaggccgagctggtggatacgggtgacaatcagaatgccgatcagcagcagagtcggggtcatcgctttgataacctgcccgaacgggatcacttttttctctgttttttgttcagtgcgggtcaggccgataccggcacgggcggtcacgacagaaatcccgaggccgattgctccgccgagcagtgccgggaactcatagttgacctgggccagcagcagatacggcacggtacaggcgagcacgctgatcagaataaacacgatattacggcggatttcctgccagctgacaataaaacgcagcgccagcagcgggatcacaaatgcagccacaaagtggatcagcgccgagtagtggcttatctgataaacactctcttcattcagcccgaggttggcaaaaccaaaccaggtcggtgtaccgacggcgccgaacgagaccggcacggagttcatcaccagggtcagcagagcgacacgcatagccgggaagccgaggcccaccaggattggtgcggcgatagcggccggggtgccgaacccgcttgcgccctcaatggtaaaggcgaatgcccagccgataatcatcagctgtgccaccggattggggctgatattttccagccagctgcgtaccacgttttccgcgccgctcacctgcatcagcttattgagcataatcgccccggcaatgatggtgatcggtgtcagcacagaaataaaggcggtgataatattggcgctcagcagtgtgagatccgttttaaaccagaacagctggatacagaacaccacggcggccgtgaaaggtaatgcaatgtaggaagggatactgcggcgttttgtcatcatccagattaacatcacgatcggtgcaagactgaaaaaaatagccataaagccctctgacattattattgttttaaaaaattaatgttgcatgcaggattcgttaaattttcattacggaattattttaatcacaaccaaaaagaattatctatgctgcatttttttaacaattgaatgcgggcgggaaatgacgaaaaacgcagaaaatcaggtgaaaaaaggaaataaaaaaatgttatttatcagtaaattaatgggttaatttgtatgatgaaaggacgaggtcacattaattaggccactatggtcaatagagaaattccaaaaatcgactaatcggcattacagatatataacaatcctgaatctgtcagccgaaataaggacggattgcctgatatgactgctgaatatgatcgatcagcagacggattttgaccggcagatggcgggtgtaaggatacacggcatatacaccgagttttttaccgctgtaacccggcagaacttccgtcagcagcccggcttccagatcttcatgcaccatacagcgcggcaccatagcgataccgtggccgctgagcagcgctttgcggatggcgcgggcattattgaaggcgatattgccgctcacctgcaattcatagatttcaccggtatccgggcggcgcatcagccagtttgaggtgccgctttgctgataggtgtaagtgaggcagttgtgtgtcagcaaatcttccgggttctgcggcgcggggtgtttttccagatagcggggggaggcgaggatcacccagtgagaatcaatcagcggacgggctatcaggctggagtcactcatcatgccggtgcggatagccagatcaatccgttcattcaccaggtcaacaaatcggttctccagatgcatttccactttcacattcgggtatttttcgcagaattccgccacgctgtcgctgagaaccagttctccggagatagtgggtactgacatacgtataaggccggtcagctcatcactgttggcactgactgcctgtaatgcgctgtgaacctggccggtgagggatttggcatgctgatacagtacacggccgttttccgtgacagacaggctgcgggtggtgcggtagagaagacgggcgccgagggctttttccagccgtcctacccgcttgctgagcacggagccggtgactccggccatttccgccgctttactgaatgagccgcaatccacaatcagcgcaaataaaatcagatcattggcgtattcgtgggcgggcagcatggtaaaacctccggcagtgaatgaaataataaacagcattcactatatcaaaatctgtgtaacagtgataatcacgccggagacagacaggttaaagcgggtacaccatgtgatcaaaggcaaacaccgtggccgggaaaatcgcctgacactcgcgaagtaaacgctcacaatcttcttcgctgtagcgtccgctgaaatgcgtggcgatcagcgtaccaaccccggcatcacgcgccagggtggcggtctgcacggtggaggagtgtccgcggctgttggctttttctgtcatggtgccgtcaagtgtggcttccagcacaatcacatctgcattctgtgccagtttcagcgcattttcacacggtgcggtatctccgaaaatcaccagatgacgtccgcgctgcggctcgccgaggtaatccgccccgcaaatcacccggccatcgtccagtgtcacttcgccgccctgtttcagggtctgcatccacgggccgccgggcacgccttcggctttcagacgctgtgcatccagcgcgccgggtttgtcatgctcttcaatccggtaaccgtagctgatcaccgggtgctcgagtgagtaagcactgactttcagttgtccgtcatcgtaaatcaccccttcctcatctatctcaatgatctccagggggaaagtcagatacgagccgctgagtgtcagggcagtttcaacaaactgcgccagcccctgcgggccaaaaagagtaagtgggtcctcacatccgcccatggagcggctgcataacaaaccgggcaggccgaaaatatggtcgccgtgcaggtgggtgataaagattttttccagtttcgggattttgaccggacttttcaggatctgatgctgagtgccttcgccgcagtcaaacatccacaagccgcgctgtaatgatttgagatccagcaccagactgctgacgttgcggttgtttgacggaacaccggcaccggtgcccagaaaaattaactccatgttgttccctgtattgcagttgccgccgcgcggaggccggtattacggaatacggcgcagttgcggcgagcgggtaatattttccggtaagattaacggttcttccgccagcggtaaactcagacgggttttgccggtgatgatcgtgaccccggccgactgccaggcatctgctgccagttgtgtgcagtacagcccgtcctgctggttgatgctgaaaggcgtaccgagccgcgcaaaggcattatcacgggcgcggcggtgattttcactgtcggcctgtacggcataccaggctacctgtccgtctttggcgtgttcaataaagaaatcaaggggatcgcggttcacgccgctgataccgcccgcgtgctcctgcggggtggcgtggataacataagtgccttccggcgtgatatcaacaataccgacatggctgaaaccgctgttatcgatacttctgacaatgtcactgatggcttcgccgccgtcacggaaaaccaggtcgccgctctgaatgccgggcggcggtactgccgcccgcagcggcagtgcggctgtcagcagcgccgggagcagaaatccggcgcggagagtgtgtctcatcagcgcaggatgattttccagtcgccttcatcttttgtcagcatgaaacgctcatctttctgtttgccgtctttgaaattgactgtcaggatcacggttgcgcgttttttgctttcatcaatatcgacggatttcacttccgtgctttccacgccgccgttgccttcaatgcggcgcgccatatcaccgacaatcatctgcactttgcctttgatttccatctcatttttctgtttatctttttccgggatggcgagcagatcataagctttatccgcatcttttttctcaacagcactgtagaactgtttaacaacatcctgcggggaatcactgccgcaggcggtcagcatcatactgccggccagcagcatcagggtgagggcgatttttttaaacatagtttttcctttaaaagacaacaggtgtttttattattttctgatgaaaataccggcagtatacggacatccggcggcttggcaatcctgtatataacgctgacggcggattcagggaaagatagcgcagtgagggcgacactgcgcaggttattatgcggatacctgttcaggaaaaccccggcagaggattatcagggcgtatcactgagcagactctccagcaccatcgcgccggctccctgagaaaccacctcataggaatcaaacgcgggaactatccgtgtattaatctgcgggaatccggccagtttttgtgccacagttttctgcacagtggcaaagaaagtgtgtttcggggtcagtgtcccgccgcagaccaccacatccggctggaaggagaggatggtattggcaattgccagaccgtaataataagcagcctcttcgagtgcatcggtacagattggatcggccagctcaagggctttaaaaatcacatggtaatcaatttcctgctcatcactgaccagtgaggtgataacggacgctttgccgcgccgcagatgctgaatcacggttttgcggatagcttccagcgaactgtactgattaagacaaccaaacgagccgcattcacaggtgcggccgtggagatcgagtgtcatatgcccgaacgcattttccgagcccggcggcataaagcggacaggctcgctgagaatggtactactgcggatctccgcatcacaggtggtgaaaaacaggcggcggctctctttgtggcgcagccggtattctgccagcgcggcaaaattccccccgctgccgatagtcacctgacacccggtgcggctttccgccatctcacgcagtaacgggatcagataatcattcatggcgcggcggtcactgccgggaggcagggtgtaatccgccgcaatgccgataccgagcagatcatccgtactgaggtgatgctcctccagcagcgataacagccgtgtgagcagccgctccagcagcacctgcggtgtttcctgcccggcggctttgattttacaggtcgccagcacatccagcttcaggttttgcagcacaatcgtggaatagatattgctgatttcaatcccggcaagccgccccctgtccggattgacactgtagagaatcggtttgcgcccgccggtggattgtcccagttctgccgcgctgataaggcccagcctgctcagctcatccagcagccgcgcacaggtggcgccattcatgttggctttttctgacagcgtttccgctcggataggcccgtcattcagaatcagctgccagagggttttcagtttccgggttttggagtttttggatgacctgaattcactgagtatgccggataacgtcataagcccgaatctccttttatcacggggcactgtctgttattcatcattgtatccggatcctttttctcatattgagaagaagatcctgtttccgtgtttacatctgatctacaatcgcggcatacatttcatcaattgttacatcccggataaattcaggagataaataatgcatctcaccgctgatatcgcagaaagcaaagcgttcgtcgaagcgcagatcactgttaaaccgactatcggtatcattttaggctccggcctgggaccgtttgccgatactctggagaatgctgtccgcattccgtacaacgatattccgcatttcgccagctcttccgctgtcggccatgccaatgagctggttatcggcacgctgggcggcaaaaccgtggtggcgatgaaaggccgtttccactattacgaaggcgtgtcgctggatcaggttaccttcccggtgcgtctgatgaaagcgctgggtgtcgaaaagctgatcatcaccaatgcctgtggtgcagtaaataccggttttgccccgggcgacctgatgctgatcacggaccacctgaatctgacagcaaataatccgctgatcgggccgaataatccggatctgggtgtgcgcttcctggatgtcagcgaagtgtacagcaaaaatctgcgcggtatcgccaaagcggtagccgcagagcagggcgtgaccatgcgcgaaggtgtctacgcgtggtggaccggtccggtttatgaaacaccggcggaaatccgcatgatccgcacgctgggtgcggatgcggtggggatgtccaccgttccggaagcactggtggcgcgtcacgccggaattgaaaccctggggatttcctgcctgacgaatatggcgtgcggtattctcgaccagccgctgagccacgacgaagtgattgaaaccgctgagcgggtgaaaagcactttcctgaagctggttaccggtattatttcccgtttttaatcagataatcatcagctaagcgtggttttctttttctcagtataacattaagaaaaccgtcgttcagaggccgccctgacatcatgggacgtcggcggcctttttttctttatctcagcggagatacccatggatataaaagtcagactgaaagcgatgctgttcctccagtatttcatctggggtgcgtggttaatcaccctcggctcgtatatgatggcaaccctcaaatttaccggtgccgatgtgggctggatctacagcaccaaagggctggcggcggtgattatgccgggcctggtcgggattatcgccgataaatttattccggcgaaccggctttacggcctgtgtcacctgatctgcgccggtgcactcttttatgccgcaactgtcaccgatgtgaatgtactgttctgggtgatgctgctgaatgcgatggcctttatgccgaccattgccctgtcaaactccgtcagttacgcaagcctgcaaaaatataacctcgatcctgtcacgcatttcccgtctgtccgggtgttcggtactgtcggttttatcgcggcgatgtgggcggtcagtctgatgaaattcgagctgagcaatatgcagctttatattgccgccggcgcatcattgctgctcgctctgtattcactgacactgccggcaattccggtggtaaaacagaccggcacgaccacctgggcacagcgttacggcctggatgcctttgtgctnnnnnnnnnnnntcggcgcagtgctgcaaatcaccaatacattcggtaacccgttcctgcatgatttcggccgtatcgcggaatataaagacacgctggtggtgcagtatccgtctgtgctgctttctgtctcacagatggcagaagtggtgtttatcctcgcgatcccgtatttccttaaacgttacggcatcaaaactgtcatgctgatcagtatgattgcctggacactgcgttttggtctgtttgcctttggtgagccggtatcaatcggtttcttcttcctcgtgctgtcgatgattgtttatggctgtgcatttgatttcttcaatgtctccggctcgattttcattgaaaaaaccgtcagttccaaaatccgcgccagtgcgcagggactgtttatgatgatggttaacggtgtgggagcctatgccggtgcgattgtcagcggtaaggttgtggatatgttcacggtggacggtgtgaaagactggcagtcaatctggctgatattcgcctcttatactgtggtgctggcgattattttccagttcactttccgctatgaccataggactgaaaaagccgcagaaaaagcggtggtataaagaaacagcataaaaaaaccggccttaagggccggttttgtcattctgtactgtatggggtatcagaaactgtaacggatacccaggttaccgctgtaaggcgtttccacatggctgcctttggcatagttgaactctgcataggcggaccactgattattcatctgtgcagtcagacccacaccgtacttaccgacggtccctgacatatcattgctgaatgattccgtgtcattaatcaccacgtcattgttctttttgaactcgtggctgaccgccaggcgggcataaggtttaatcagaccgccgctttcagtgacaaacgtcttaccgaaggtggtaccgatttcacctttaacagattctgctgcgtccgctttcactttcatatcgctgctgaaacggtaggctgttttttcgccgcggaagtaagatcccagcacataaggctcgataaagtaactgcctgcggtgatgtgtttaccaccttccacagagaaaccgataccgttggtattatctttggcggtggttttgccgtcattaaactgtgcgctgtttttggttctgaaatggttggctttcagcacgccatccacatagtaaccgctgttgtgcatccaggtggtgtagacaccaagacctaagctgtccactttgccgtcactggtgcgggcatccagttctgaatgggtataggagaacattcccccgaccagcaggcggccgttttccagcgcaatcgcgtggtcgccgcccagcatcagcccattcatatcctgggtgtaaccgacattactggttgagatgcggttacggctgccgatatatttgccccacacaccatcctgtgccgtctggttatcacgcagatcacccagccgggttctcagtgtggataattcgctgttccagatagtcggcgtcacgttggccatcgcgatagcgtttttaccgctttcagagatttcaggcttcggatcagggcccggctccggatccgggtttggtgccggatcggttgctttcggtgataaataccagttgtcgctgtcctgctcatcaccctgtaccaggtaatatttataagcgcccagatcaacactgccgtttaccagtgcaaagctgttgctgtcactgccgttggcaaagatcagatgatggggattcactccgccgcggcttttcagttcctgaccggaatccattactctgacattaaactcaccgctgatactgttactgatattcaggaagtcaccggtaccaccgttaatattggtgttcatcacaaaggtaccggaaccggtcagatctgaaatctgtaaccggctgtatttaccggcgtcagtgccgtcgctgctgccgaataccacggtaccgttgttagccagtgtttcaatcgttgcttcggattcgctggtggtgtcattatgcttcagatacataaacgcattgtcaccggccagattaagacgggtaacataagcgcctttgccgtcgagagctccggtccagctgtgaagactaccgccttccatcgttactgaaccgtcattaacattcaggtcaccggtggagtaggcaccgtaagcgataaaagatgaacctccgttctcaacggtagtatcctgaatatgaccaaactccttgaccagctgtgtgccgccgttaaccagcgtaccaaccgcatcggcatagtattcaacaatctgttcaccgccctggtggatcacagagccggtcgcaacctgatctttgccaatccaggcatcctgctcaacccattgtccgccggtccagccgccttttctgccgctgacaatctgctgtccgtaaacctgggtatcaatggcttcgccggtctgaatacgctgcacaccgccggcataaatggtggcatttttggctgtctgctcatcaatccggaaagaatcgtcggatgtccacccgccgttttcccattccccgtcaacaccggtaataatctgggtaccgtaaacacgggtatcttctgtattaccgtgggtcacaaactgtaatgcaccgtggttaacgatggtattgcggtcagtcacaccatctttcccggcataaatctgctgaactgcaccgtcatacagcacggtatctatcgtgttgccgctgctcatctgatagctgccgctgccgatatggctgttggttgccgtaccgccgtagataatatgctgtccgccattcacgacaatgacatctttggtatttgaggtgctggtaacggattgctccagataacctccgtcgatcagaattgcctgcgcatagccccgtgtgccgacaaccattctgccgccggcattcactgtggtgttatacgctttggcgtcatttcccaggctaaggctgccgttatcttcaacaatggtgttatacgctatggagtcttccatcatcgacataaagccgcgatagactttggaaggatcagacggattggtaattccgcctttgactatatttccgatagcgacactgccgctccggaatgtggtctgaaaggaatcaatggtgttattcaggctgtaagaattattctcaacataaagaaattgttccgggaaccaggttctggttaatgtctgaccattaatatattggttaccggtgataattgactgatatttattatcccacttatcttttgcggtcggccagccatcagtggcactgctgagaatggtattaatatcagggacttcaacttctgactgataaggtggtggtggttccgtggcataagcgctgaaagaagcggaaaacagtgcaatcagcactgaattattaaatgtcatatccaaatccttgctttaaaaagcgaattaaaattatttatcagattgaatgtggtgctgtgagctgtaagaaaaccgtccggaaataaaacggaatattatttataaataggtaataaaataatgaaacaggcggtaaataccgtctgccggaattaattcagatatacagctcgttaataagaaaaataccactcagacgcgtatgtctctactcacctgtgttgtaataaggcgctaatgtgtaacaatttgagaatagtaggggaataacagtgacaggtaaaaaatacgggatggtttatccggctatatttgtttttataaattacttttatgggcaatgaaaaatatcccgttgtggcggagtagtgttgaggatatatattcggcggggcaggaatttctgctcagggattgaaaatccccgtgtccttgctggcggtgtatacagttgtattactgattgcatgataactcgttggattctctgcaggaaagcccggctgacagagaagaactgaatatgatttttatccggcagggttcggaaaatacgtttacattagcctgaaaagcaaaaacccgccata

SEQ ID NO: 31 - DNA, 77040 bp, unknown
  Altogen 322075 strain
  misc_feature (6901)..(6993): n is a, c, g, or t
  misc_feature (26012)..(26117): n is a, c, g, or t
  misc_feature (54267)..(54303): n is a, c, g, or t
gattccgttcggggcgtcaatcttatttccttcaaatttaatcaagtgccggttttttctgcaatttactgaagttttaatcaataacgtctgtttttacggcataacacgtaaaattaccggcggacaactgcggatgctgtccgccggaaagcttaacgacggtagcctttttgcaggtcgtttactttgcgcaggtaattgcgggattctccggacgggtgtttcgtcgtcagggtttcatacactttacccggctccataccgctgataatgcgggcggcctgtttcttatcactgtggaagacacgcagcacactgcctgcaccgccgttgtaggcagtgatcaccgcatagcgccgtgatgtcgggttgcttatctcaccgaggtaggtattctgcagaatcgccagatatgcggtaccggtatcgatgttgcttgccgggtcaaacagatagctgcggcttggcacaccggagcggccctgagatttaaacacatcacgtccggcggtgttcggcataatctgcatcagccccagtgcatcagagcggctgaccgcgtacgggttaaagctggattccgtctgcataatcgcaaggatcagagactcttccacgccgtatttggccgatgcctgacgaaccagcggcaggtatttgtgagcacgctgatccagatggttcggtaccagtttcagagtgatataggtgatcatctgtgagccggactggcggcgctgcaggcggttggtcaccagataatccgcgaatttggtggcgcgccactcccagcggatcggctgcccggtatgatccagcacctggccgaacaggaacggctctttactgatggtgacatcgttggcatctgaatagaggtcaaccgatcccggatcctctcccatcagcagggtattgataattgcctgacgcagatgcgcttccggctcaacccccgccagcgtctcaatagtgacggtaccggcatcaaagttgatatgggagcgggtgtagtactgatcggtgtatttgacataatctttcggaccggcgatcagaacttcttttataccccagatattttcaatgttatgggcaaactggcccatcagaatatcaaatccgttggtatccttaacatattcaggacggtaatccgtctgttcctgtgaaccggtacaggaagccagcagcggcgcaataatgatcagtgcagcaagttttttcatgggtataaatacggtgtgatccgggttcagatacaacatcagagccgggaaagggctctgatgacagggttatttttcaggcggtgtatagccttcaatgtggatatcgtggccttcaaacaggaatttgaccatctcctgttccagcagtttgcgatcatccgggttcatggtgctgagttttttctcgttgatcagcatggtctgtttggacatccactgttgccaggcttctttggaaatctcattaaaaatacgtttacctaattcgcccggatagagctgaaaatcctggccgtcagcctcacgctgaagaaaagtgcaaaaaattgttctgctcatgtaacatcctcaaaaatggggttctttacccgatctgcttaagcaaggtttccaccggggcggccaggccgatcgccggcggattttggctgttataccaaatcccgtcgctgtcgtcatggactgctgtgcgatcggtgacgtttgcggcaacgggcacaatatccagatgaaaatggctgaatgtgtggcggaaggcaatcagctgctgtaatggtgaatggctgatgcggcgttgtgccagccagtcgtgcatggcgtcttccgttgcaaactgcggaaaactgtataatccgccccaaatcccttttgccggacgcttttccagccagatctcattatcatgctgaatgataagaaagtaagctgttttttccggaattgattgtttcggttttttgccgggatacgccgccgggttgtgctctgcatacccaatgcagccggactgcagcgggcacagctcgcacttgggtttgctgcgtgtgcagaccatcgcgcccagatccatcatcgcctgattaaaatactgcacaccatcagccggggtcacatcctctgcaatatcccagagacggttttcgacctcttttttaccgggccagccgctgacggcgtaacagcgcgccagcacccgtttgacattgccgtccagaatcgggaaatgctgattctgagagagggacagaatcgcgcctgcggttgagcgcccgacaccgggcagggcaaccacatcctcaaacgtgaccgggaactgtccgccgaattcagaggcgatagtctgtgccgctttatgcagattgcgggcacgggcgtaatagccgagcccggtccataaatgcagcacttcatcaagtggggcggcagccaggtctgtgaccgccggaaaccgttcaataaaacggttaaaataaggaataaccgttgccacctgggtctgctgtaacatcacttcagagagccagacatggtaaggcgttttctcctgctgccagggcaggttttttctgccgtagcggtgataccacgtcagaaccgattgcgaaaattgctgtgcttccatgagaataaaataataattgaatagttttaattgacgggaattccagcacactgttttgcgactgtaaaccaacttttgcctgaaattgtgcgaaagaggatgattaaccggtgcgaagtcggttgtctcttgctaaacttgccgcactttgcgtgtgtcagcgcagcccgttgtgccggacacattatgatttatttttgccgggatactgacagcaaaccttatgatcaacaatgtaatttcgccggaatttaatgaagacggcagagccctgcgccgtgtccgcagttttgtgcgccgtcagggacggctgaccaaacgtcaggaagatgccctgacagacctgtggccgtcagcgggggtggattttaccccggaactgctggattttaccgcgctgttcgggcgtgatgcaccggtcacactggagatcggtttcggcatgggcgcctccctggtggagatggcgaaacagaatccggataaaaattatctgggcattgaagtgcatgctccgggtgtcggtgcctgtctggcggatgcgcaggaagccggggtgacgaacctgcgggtgatgtgccatgatgccatcgaagtgctggataaaatgatcccggataacagcctgcatatggtgcagctgttcttccctgatccgtggcataaggcccgtcacaataaacggcgcattgttcagctgccgtttgcggaaaaagtgcggacaaaactgacgcagggcggtatcttccatatggcgacagactggcagccgtatgcggggcacatgcttgaggtcatgactcaggcaccgggttaccgcaatctgtcagcaacacaggattatgtaccgcgcccggatacccggccggtcacgaagtttgaaaaacgcggccatcgcttaggccatggcgtctgggatctgatgtttgagaggatgaaataatggcaacacaacgtagtcgtcgtttacggaaaaaaatgcgtatcgatgagttccgcgaactcggtttttccttcaaatgggacttcccggaaggcactgatgtcgacactatcgaccgcaccgttgaccagctggttgaggaagtgatcgagccgaacggcctggcgctggatgccagcggttacctgagctgggaagccatggtctgtttacagaaaatcggtgaatgtaccgatgagcaccgtaagctggtgggtgactggctgaaagccaaagggatgcagaacattcagatgtctgaactgttcgatatctggtgggactgagataaatttcttaccacgctaattatgaataagggcacctgaaaaggtgcccttatctctctccggcctccggagttgtggcgtgccgagctttggagtaacaaccttgaccacacactttagtaatgaactgctggacgatatcttacaccgtgtccggccgctgattggctccggtaaagtggcggattatattccggcgctggcggaagtctcacctgacaggctggggatcgcggtgtgtaccgtggacggggagatttttgccgccggtgatgcgtatcagcgcttttcggtgcagtccatttccaaagtgctgagtctgacactcgcgatgacgcgttataaggaatcggagatctggtcgcgggtcggcaaagagccgtccggtctgccgtttaattcgctggtgctgctggagatggaaaagggtattccgcgtaatccctttattaatgccggggcgattattatcgcggatatgctgcagtcccgcctcagtgcaccacgccagcggatgctggagtttgtccgcaaactgaccggcagtcaggatatcacctatgatttgcaggtggcacgttctgaactggaacacggcagtcgcaatgccgccattgctttcctgatgaaatccttcggcaattttgagaataatgtactgactgtgctggagaactattttcactattgcgcactctcaatgaactgtgctgaactggcaacctgttttgcttatctggccaacggcggcgtaccgctgggcggtcaggatcctgtgatcacgccgttgcagtcacggcagataaatgccctgatgctgacctgcgggatgtatgacggctcgggggagtttgcttaccggataggcatgcccggtaaatcaggggtcggcggcggaattgtctgtgtggtgccgggggagttttctgtggtggtctggtcaccggaactggatgattcagggaactctttggccggttgcgctgccttagaaatgttatctgcaaaaatcgggcgctctattttctgaacccgccgggttcagcgtccgctgtctgagaatcaggagtgtttatgttacgtaaatggattgccgttctgagtctgggtgccgcgtcactggcatcggcggaagggtatcagtgcagtgtcaccccgcaggatgatttggttatcacaccggcctatgtgcaggtgatcgggaaaagcggggaaatgaagatcacccctgacgggcagatcacccgcgacggcaaatccctgacactcagcgccgcacagagtgcggatgcaaaacgctaccagtcaggtgtgcgtcaggatgtgccgtggataaaacagcaggcggtgaaccggatcggtaaatcccgtcaggctgtggacaaggtactgatcaaagagatggggcaggacagcaaactgcgcggccatctgacaaccctggaagcggatctgaataaacaggttgaccggatcattgaaacccgtccggatggttatgccttccatcatcaggcgattaagcaggtggagcaggacggacgggcgcagatccagcagcgtctcggcggtatgcttcaggatgctatcaatgaaatcggccgcaagcagttgcttgccgggctgaccggtgacaaaagcgccgccggtgcggcactgagcgggctggacgggttacagaaatccttacagcaggccgtacgtgaacaggaagatgattttaaacagttcagcaaacaggtgtgcggcaaagtcaccaccctggaacagcagcgtattcagctgatgaattcccttaaataatataaggttaccggtgcattctgtgccggtaactgcttttttagccgatcaggttcaaataaatggtaattgttatgataatgattcttatttgattgacatgtttcggcttctgcctagaatgaactgcgacgttaaacgcatttaatcaggcaggaacatgaaaaagatcattccgttagtgttaattccgtttttaggctttgcctccgcttccgcgctggctgactccgcgccgaaatataccccgaaccatattgccgccgtggcggataaaagcccgcagctgaccatcgaacatcagtccggctctgcgaaagtggcacagaagccatcccgcgtggtgctgtttgactttggtgtgtacgacaccatgaataagctggggctggctgacaatgttgtcgcgctgccgctgggtaatctgccgtcatacctgaaaggtcaggtggacagcaaagtcgcggatgctggcggaatgaagacccctgacctggcaaaaatcgcggaactgaagccggatctgattgtgatcaccggccgtcagggcaaatcatttgatgaactgaacaaaatcgcgccgacagtgaatctcggtaccggcggtgatgattatctggcagcggcagaggcaaatattactctgatcggtcagctttatgatattgagaagaaaaccgcagaagaactggccgcactgaataaaaccgttgctcaggctcaggaaaaagccgccaaatccggtaaaaaagtactggtgatgctgcataatgacggcaaattattcccgaataaacagccggttgtctatcaggtggtgaaagcggctgctgttgatattccggttgacccgaaagcagagaaagataagcgcccgctggtgacaccggaaatggtggcagagctgaatccggatgtgattctggtgattgaccgcagtgcggcaattggtgcagggcagtgggataaagcggcctttgaaaccgatggcgtgaaaaagaccaatgcctttaaaaatgacaagattatcgtgttacagccggatctctggtatctctccggtggcgggctggacagtctgaaccgtcaggtgcaggctgtggaaagcgcgctgtaatccgccgattcatataaataataaaaacccggacgtgaaagcggccgggtcaggccgttgacaaacccgcannnnnnnnnnnnnnnnnnnnnnnnnnnnnnnnnnnnnnnnnnnnnnnnnnnnnnnnnnnnnnnnnnnnnnnnnnnnnnnnnnnnnnnnnnnnncccggacgtgaaagcgaccgggtttttgttttataaaaaccgttccagcaacgtattgaggaataacttgccgtgttcggttatctgccagtgggttgcggtttcagaaatctcaccggcattcagtgccgcttcaatctgcggacgaaccacggattccggcagtccggtgtaatcggtgaaatcccggcgcggcatcgcttccagcaggcggaaccggttcataaagaactcaaacggccggtcttccgttgccacctcattttgctgatcaaggtagcgtccttccatatagccgcgcggatgtttggttttgactgtccgcagaatgcgtccgtcagcaaacgaaattttgccgtgcgcaccacagccgatcccgaggtaatccccgaaacgccagtagttgaggttatgctgacactgaaatcccggttttgcatacgcggaggtttcatactgcacataaccggcctgtgtcagtaactgatggccctgtgagaaaatatcccacagaagatcgtcatccggtagcaccggcggacgtgagccgaagctggtgttcggttcaatcgtcagctgataccaggaaagatgcggcggggcgagttcaatcgcctggcgcaggtcactgagcgcttcgccgagatgctgctccggcagcccgtgcatcaggtcgaggttaaaactgcgcagtccgagtgtcgctgcgagccgggcagcccgtttggcttctccggcatcgtgaatgcgcccgaggcggatcagtttgtcatcaccgaagctctgcactccaatggaaatgcggttgataccggctttctggtagccgctgaaacgatcggcttccacggtgcccgggttggcttccattgtcacttccgcatccgccgcgacaggaatacgggcacgtacaccgtccatcagtgtctgcatcgcttccgcactcagcaggctgggggtgccgccgccgataaagacagtgcggatttcgcgaccggcaaccagtggcagatcagcatccagatccgccagcagatgtgccacataatcatcatgcggcacttcacctttcagcgcgtgagagttgaaatcacagtaagggcacttctgaacacaccacggaatatgaatatacagactgagcgggggaagcttacccattacgcagggcttccgacagcagtgtcagcgctttgccgcggtgagacatagcctgtttctcttccggacgcagctgcgcggcagttttattcagttcaggcagccagaagacaggatcataaccgaaaccgccttcgccctgcgcctgctctgcaatcacaccggcccagcggccgtggcagatgatcggtgtcgggtcattttcgtgacgcatatacaccagcacacagttgaagtgcgcctgacgctgtgtcgccggtacgccgtcaagagcggccagcagttttacgatattggcgccgtcgttgccgtcagttccggcatagcgggcggagtagatccccggcgcaccgccgaggtaatcgacggaaatcccggagtcatccgcaatagccggtaaaccggttacttttgctgcgtgacgcgctttgataatggcattttcaacaaaggtcaggccggtttcctcaacggagccgactcccagttccgtctgtgccaccacatccataccggcatccgccagcagtgaggccatttcgcggacttttccggcattgccggtagctaaaacaattttgcgggtcatatcagcgcctgattacataaatatccactgaacaatatcgttatagagatagcccagtgcatacagaataaaaatgacaatcattgcagagaaatcaatgccgcccatcggcggaatgatacggcggaacggcgacatcagcggttcggtcagctgcatcagtacataatccaccgggttgcggccctggctgaaccagctcagcagcgcgcgggcgaggatcacccagaataccgtcatacctgcaagataaagaagattaaagaaagcgactaacagcatcagcccgccgagttgtccctgaaaaccggccagaaaccacggaaagagcagtttcagcagtacgacaacataggccaccagcacagaagccgtatcaatcgggccgatagccggaataatacggcgcagcggacggacaaccggctgtgtggctttcacgacaaactgggcaaacggattataaaagtccgcgcgcgcccattgcatccagacacgcagcagtaaaatcgtggcataggcatgcaggagcgtggtgacaacaaaattcagtgtttgcatcggtgaaatccttaacagaaaacaaattaaccggtttgtgataacgcactaaggtaccggaaggtcatgatacagaatgatcaggatacagaatagttacgtgcaccgaaaattgcagtgccgatgcgcaccatggtggaaccacaggtgatagcggcgtccatatcgtcggtcatgcccatcgataaggtatccgcctgcgggtatttcccctgcagctcacggaaagcggtttccatctgacggaaaaccgcagactggcgctcaggatctgtttccggtgcaggtattgccatcagtccgcgcagacagacgttcggcagtgcggcaacctgctctgccagtgccggtaattccgcaagggtgataccggacttgctgttctcatcactgatattgatctggataagcacattcagcggtgctttgtctgccggacgctggtcactcaggcgctgggcgattttcagccggtcgatggtatgacaccagtcaaaatgctccgcaaccagacggcttttattagactgcagcgggccgataaagtgccattccagattttgattcgcggagaaatactgaattttttcaacgccttcctggacgtagttttcaccaaagcgggtttgcccggcagctatcgcttcttcgagcgcgctcacaggtttggttttactgacggcaagtaaggtcactgtgtgtggatcgcggccgcatttttgcgccgcagcggttatacgttctctgatttctgtcagattgtcttttattggtttcatgatgatccgggagataacctaatgaatatggataatttaatcgcccttagtgtaaagcataatgcatccgatctgcacctctgtgttggtcaggtgccggtgttacgggtggatggagagcttttttcgcagacacactgtgcggcggtaaccgatgacgcactgcgcggctgggtaaagacgatcctcgaccaggcaaattaccacagattgatgacaaaagggcaggcggatcttgcgttgtttatccgcgatcaacctttgcgggtgaatatttttatggcggggggattgctgaacgccgcactgcggctgataagccccgcggttccttctctggaggatatcctggcgccgccggtgtttgccgggctgctgtcaaaaacgcaaagcggcctgatcctggtcaccggggcgaccggcagcggaaaatcaagtacgctggcggcgctgctcaattatatcaatcagcacttccggcggcatgtgattacccttgaagacccggtggagttccgtcaccgcagcaggcagtcgctgatccgccagcgggaaatcggccgtgattgtgaggattatcagcaggggctgacggctgcgctgagacaggatccggatgtgattatgctgggggaattgcgggatgaggcggctatccggcttgccctgacggcggcggaaaccgggcatctggtgctgagcacgctccacaccagaggcgcgattgcggcgatcgagcggctgactgatgtgttcagcggtgcggagaaaaacagggtgtgcagccagctggcaggcagtctggtggctgtgctgagccagcatctggtggctaaacagggcggcggacgctgtgcactgtttgatgtgctgatcaataccccggcggtggcgagccttatccgtgataataaagcgtatcagattgcctctcaccagcagtcaggcgcacagtccgggatgatgacggaggaacagtgcctgcaatggcggcgcggcagaggggagatagccggggaggcgggcgcggtaccggcatggtaaacagtactgcgctccgggtacgggataatcagccgtaaagctgttcaaaccagctttcaaggataatcacggcagaggcggaatccactttgtctttgccgagggcgcggtagccgccgtctgcaaacagattggcgcgggcttccactgtgctgaggcgctcgtcatggagttcagcgcggatgccgaaacgcccgtgcaggcggttggcgaattttttcgcctgattagtgaccagctgcggcgtgccgtccatattgagcggcaggccgacaaccacataatccggctgccattcacggaacacggcagcgatcagctcccagtccgggatgccctcacgggctttcagtgccgccagcgggcgggcggtgccggtgatggtctgaccgacagccacaccaatgcttttggtgccgaaatcaaaggcaatcacagtattgctgctcattatgcgtgtccggcctgttgtgcgatggtgtaaatattcacgccgataccggcggcagcttcgcgccagcggtcgggcatcggggtacggaacagcaggcgctcgctggcatctgccaccagccagctgttttccatgatttcccgttccagctgaccggcagtccagcttgagtagccaagtgtcatcaggtagtgctccggctgttctgcggttcccagcgtttccagcacgtcttttgaggtggtcagaaacaggtcatcggtcaggcgggtacttgcggcgtactctttatcaccggagtgcagaacaaagccgttctcttcggaaacgggaccaccgaccagaaccggtttttccagcgactggctttcatcacggatgtccggggagattttcagcttctgcagaattttaccgacagacagctgttcgatcggtttgttgatcaccagtcccatcgccccgttttcattgtgttcacacagatacacaactgaacgcgcaaaatacggatcatccagcgagggcatagcaatgagaatatgatgttgtaagttcataaccttcttttcagtctgcccgcagaccggaaaaaacggcctgcgggtgtgaatgtacggacacagcgccggctgttaccggccgaggcgtttttcaatggcatccatcagcataccggtgacagaaacgtccggttgtgcggcttcaatttcacgggcacaggtcgggctggttacgttgatttcagtcaggcggtcgccgatcacatcgaggccgacaaaaatcagacctttttctttgaggaccggtgccacgctgcgggcgatggcccagtcgctctcactcagcggacgcacttcaccgtgaccaccggcagcgaggttaccgcgtgtttcacctttggccggaatgcgcgccaggcagtaaggaaccggctcaccgtccaccaccaggatacgtttgtcaccgtctttgatggcaggcaggaagttttgcgccatgcagaaagtatgaccgtgatttgtcagggtttcgataatcacaccgacgttagggtcatcctgtttcagacggaaaatagacgcaccacccatgccgtcgagcggtttgaaaatcacatcaccgtgtttctggtggaattcacgcagacgttgtgcactgcgggtgaccagagtgtccggggtcagatcggcaaaccaggcggtgaacagtttttcgttacagtcgcgcaggctctgcggtttgttgacgatcagggagccggcactttccgcgcgctccaggatataggtggcgtaaatgaattcagtatcaaacggcggatctttgcgcatcagaatgacgttcagtgtgcccagcgcgatatcctgctcactgccgaactgataccagcctgccgggtcttctttcaccgtcagagtgcgggtacgggcacgggcaacgccctgatgcagataaaggtcattcatctccatataatggatttcataaccacggcgctgtgcttcgagcagcatcgcgaaactggtgtctttcttgattttgatggaatcgataggatccatcacaataccgagcttgatcattttttctccttaacccagatcgccgaaacgcacctgcaatgcggtgattgcagtgagcgcggtggtttctgtgcgtaatacacgcggccctaataatatgtcggtaaactgatgaccggcggtcatcgcgatttcctctgccgacagcccgccttccgggccaatcagcaatcgcactttagcggtttctgcgggcagtgtattgatactttgtgatgcgcgcggatgtaaatttattttcagagcatcatcattttccgcacaccatgcttccagggtctgcaccgggcggatctccggaatcacgttacgtccgcactgctcgcaggcggcgatggcaattttttgccactgctgctgttttttgtccagccgttcaccgtccagtttaacaccacagcgttcagagatcaggggggtaataatctgaacacccagttcaacggatttctgaatggtgaattccattttttcgccgcgtgaaatcacctgtccgagatggatggacagcggggattcgcggttgtcgtcctgctcatctgttacacggacggacacactttttttgctgatatccgtaatttcggcgttaaaaatccggttggtgccgttaaacaggatcagggaatagccggttttcatccggagcactcgggcaacatggttggcgccgtcatctgtcagttctgtcaccaggccgggggttaaagtgccggggtgataaatgcgcgggatccgcatgaaaatatcctttacgttctgccggcacgctgccggttgatacacattgccccatgataatagaggggggatcctcactgcaagcatcagccgggatcattacatgccggggcaactgtcaatattgcgtgatggcccgaaaaaaaatgtaattcagctgtaatcagggaaaaaaacgtgtctttcccggggtggtcaggcaggctgcggatatcgcaacagggaaagacgcggggaaaacatggagtggctgattatgattatctggggagtgtttttgccgctgccggtaaaagccgggacggaatatattctgcgccattactatcagtatccgcagcggttgccgggcgggtggctgtatctgcactgcctgttatccggtgtgctgatagtgttctggtcagacgggcagagcgtgtatgtcctgtttctgacactgctgtttttatgtctggtgatgctgtttcatattgataacgcagtattttatctgccggataaactggtgttcccggtgctgtgggccggattgctgtttcagaatgaggtccggctggtgacactctcttccgcgttgtacggggtgatcggcggtttttttctgctctggagtgtggcggaaggctatgcctggtgccggaaaaaaagcggcctgggcggcggggatatcaaactgttttctgcctccggagcctgggtgggggcggaacagctcgcgttgttactgatgctggcctgtgtgtctgcgctggtggtatccgggatgcaatatttacgtcaccgctgtcttcatcacccgcgatgcggcccgcgcattattgccttcgggccgcatttaattgcggggatgattatggtgatgggactgatgtcaggcagtcgttttcagtaacgggatcagccgttcccaatgtgattccgcacccaaaacggcctggttcgggatgtgctgaaatgcgccgtcctcttccagtaacaaggtcgggaagccgccggtcgggttatgcacaaataactgacggctctcattaatatgctgctcagtattatcagactgaatatcactgatacccagtttatccgccagcctgcgcaaagtatcgcggttaagcggcagcccgtcctgataataggctttctgacaggcttccagcatgtcaatgcctttaccggactgcgcctgtgcactgagaatggcggcaatcggcggcacggaatccatcacccactcctgatttttcagcagggcataaaaggcatcggtaaacggttgtccggtcaactgagtgatgcgctgattgtgactgcggatcatttcccgcatgctgtcatctgccgggcggcgctgtgagccggtgatcatcccgccgccgtgcagggcgatcgtcacgccctgcttatgtgcggcctgaataaacggcgcgataccataacaccagccgcagagcggatcataaatatagtgcagcgtttttactgacattctgttttccttaaatcagattactgcggccagcgcatttcgcctttgagtactttggcactcagttcgaggcttgattcatccgccagggccgggtaagcggctttcagtgtgctgatcatctgctgtgagtccttactctctttcagagcggtttccgcacgggtcagataatctgcggtaaaggtaatggcagccggtgaaaaatggctgttaccgacataatgaccgggcaccacggtggccggatgtttgtcctgcatacttttcagcgactgctgccagtactgacgggattccggggtttgcgtatctgccagccagacatggatattctctgaaaccagcacgccgcccatcactgcggacaatgacggtacccatacataactgcgctccggcgccgggctgtccagcccttcaatcagaatactttccccttccagcataatgcggttgccctctaacggctccggcacaatgatactctgcggggcattctctttcagaaccggtccccagtaagccagtttgccgtctttgctctctttaatcagtgcgacggtctgcggagtggcgacaatcttagcctgcgggaaggtttttttcagttcatccagtccgaaatagaaatccggatcagaatggctgatataaatggtggtcagcgttttaccggtcgcacggattttatccgccagtacctgagcatcatctttctgaaactgggcatcaatcagaaccacctcatttttgccgctgatgatttccgaggaaaccgggaagatacttttttcgccggggttatacacttccagcgacagcggtgcggcggcagtgacaaaagaggcacccatcagggcgctgaataccagtgaggtacggattgcagaagtcatagtgttatcctttttgcaggtgagtcgttaagatgacgctataataagttgcataatccgccggaaaaaccccataatccggtcttcattgttgcataaaccggacaaataaaatggacaggatcactgccgctcaggtttttattgctattaccgaacagcgcagcatgagcaaagctgcggatatgctgggaatgtcccgcgcgatggtcactcgctatctggccgaaatggagaactgggccggtgtgcggttgctgaaccggacaacccgcagcctgacgctgacctctgccggtgaagcggtgctgacgcaaagccgggaactgctgtcactggcaacggcgattgcccgtccggtggtgactgaagatgaagcggtcagcggcctggtgcgtgtcacctgtgctcagtcactggcgatggtggcactgtcgaaggcgcttgtgcagttccgggcccgctatccggctgttgctgtcgatgtgcaggtcacaaacaaggcgatcagtctggtggaggagcggattgatctggggatccgcatcaccaacaatctcgaaccaaacctgatcgcgaagccgctttcccgttgcgattctgtggtctgtgcgtcaccggcctatctggaaaagtacgggtacccgccgtcacccgaagcgctcagtgaactgacctgtctgacctataatttttacggccgcagtctgtggctgtttgaacgggatgatcaggtgatttctgtcccggttagcggggcgctcagtgccaatgaatccacgtttctgctggaagcaacgctgaacggggaaggtattgcattgcagccttattgttcggtgtatgagcatctgaaaaccgggcgcctggtgcgtctgtttccggaataccggctgcctgcgctcggcatttacggcatttataccagccgcgagcatatggcgcggccgctgcgcctgctgctggattttctggcggagtggtttgcgcattcgccggactggctgccgtatctgctggatgaaaaaactaaccggtaacccgctttaactgccgcaaaacagcctgcatatgctggcggagatgggtgataaaaatatctgtcagtacagaatgcggcctgtgcagcgggcggatcaggctcacagtgaacggaatatcctcactgaacgggcggacacaaattccgctgcaatccatggcagtcagcgggttaacgacagacactcccagcccctccctgaccatggcacataccgaggccgcactgtgtgtttccatgatcatccggcgcgggatctgcttttcactgaacaatgcatcgattttctgccggtaactgtccgcaacggacagactgataaaattctgctgcgcaaaatcagcaggggtcagtactgatttgctgcacagcggatgcgattccggcagtacacagacttcactgagcgtgagcagggtttcctgcagggtgccgggcggcgtcagctgatgttcggtgatcccgagatcataacgctgggcggagagccactcttcgagcagaggggattcctgcggggcgatttcaaaattcacatccggatactgtgcatgaaatgtgcggcagacagcaggcagtaacgactgggcaaaggcgggcagacaggttatcgccagctgggcatgctgaaactgacggatactttccgctgcccggctgatgcgctcgagcccgtaatacgatcgttccacttcctcaaataaccgcagcccctgttctgtcgggtgcagacggcctttgatgcggtcgaaaacacggaacccgagaattttttcgaaacgggcaagctcccggctgaccgtcggctgtgaggtatgcagcagttgcgcggcatccgtcagactttttgttgtcataacggcgtggaaaatatcaatgtgacgccaggagtagtgttccattattcatcgaatccatatcagtaatgaatagaccttagcaaatcagatattttaaatcccgcagaatttttgtcacgatggaaaaaaatgagatcacgatcaaaaagagcacaacatcatgaccatcgcaaccaaaacactccgcgccccgtttaccccggatgccctgcgcagcctggctcagcagtacggtaccccgctgtggctgtatgacagtgaggtgattgtcagccgcattgcccggctgaaccgctttgatgtgatccgttttgcgcagaaagccaattccaatattcatattctgcgcctgatgcatgagcatggtgtaaaggtagattctgtatccgcaggggaaatcgaacgggcactgaaagccggttactgtccggatgagatagtttttactgccgatatgatcacagaagaaacgctggatcgcgtgctggaactcggtattgcggtgaatacaggctcggtggatatgctgcgccagattggtgcccgtcgtccgggacatccggtgtggctgcgcattaatccgggttttggtcacggccacagccagaaaactaataccggtggcgagaacagcaaacacgggatctggtttgcggatctcggtgaagcactggcggagatcagccattatcagctgacattaaccggtatccatatgcatatcggttccggtgtggattatgagcacctggctacggtctgtgatgccatggccgaattggtgatcactaataatctggatatccgcgcgatttctgccggcggcggattatcgaccccttaccgtgaaggggatgaaattattgatatcgataattatttttcactctgggatgctgcccgggcacgtatcgcccgccatctcggccgtgagatcaccctggaaattgaaccggggcgttatctggtggcggaatccggtattttgctggctcaggtacgggcggtcaaagggatggggagccgccactatgtgctggtggacagtggttttaatgacctgatgcgtccggccatgtacggcagttatcaccatatttcagtgttaccggcagcgggagagctgcaaaacagcaccgtgcgggaaacgattgtcgccgggccgttatgtgaatccggggatgtgtttacccaactggaaggcggaatggtggtgccgcgcgcattaccggaagccgccgtgaatgattttctggtgtttcacgataccggggcatacggtgcgtcgatgtcatcgaattacaacagccgtccgttattaccggaaatcttatttactgacggaaaggcaaaactgatccgccgccgtcagaccattgatgaactgatggcgctggaaatcacggaataatatattatccgttatcgtttttatctgatatttaaaattcccgggaataacatcccggggattttattttttatactccccgggagtatattgttgttatttttatatcacataaaaataacaatataatgatgattattaacgcaataactgcatccggaggtgatattccggcagagtgtgacagacgttataaaacagattgcctgtcatagagtctccgcactgttacctctattatcccttcagttactttattatttatcgccggtacagtttttatataacagtgtcggtcagctttttccggggacgtgtgtgttatgaatttaatgcagccatttgtatcagaaaaattaacacttaaaaataaattagtttatccgccggtcagaataaaacgcgctactgacggctacgcgaattactttcatttggcgcattatatgtcttttgctgtcggtcaggtcgggctgattattatggaggagtgcgcggttaccgctgacggtcgtctgggcagtggcgcactgggtttatatgaggacgggcatgttccgatgctggcgcagattgtggcgatgctgcaaaatgaaggcagcaaagtggcgattcagcttaatcatgcaggcagcaagtcacggctggaatccggcaatattattcaggatattaatgcattaaccgcagacgatattacggcattgtttgactgctatacacgcgcggcggcacgggcagataaagccggtttcgatgccctggaaattatggcatcccatgagtttctgatttctcagtttattgacaggcggacaaatcagcgcagcgataaatatgccgatccggttattttcctgactgaattactgacctcagtccgcaaatcctggccggaagataaagcgattattttacgtatcggcacccgttactgcgaagaagacagtatttcatttacacaaaaaatcctgcgtaatattaatccgcttattgatattgtgcatatatctaatggcggcagtcagatgcacggaacaaataaaggtgttgcttatcagctggaagataccaaaggggtaaaaaaaggctgtgaaaaaccggttattgttgtcgggggtattcgtgatcaccaactggccgatgatatattagaacatcagtatgcggatttaattgctgtcggtcgcgggttattacgcaatcctaactggtatctggaatatttactgaaatatgatcgtaaattaattccccgtccgtatatccgggcatttcgctgataacagtagatacaatgacaggaagataacatggcaatatcagtcttaaaacgtattttcagcgccggtgtattactgttgtttttcaattgtgccggggcaaaagaaatcaccgatctcgccgggaaccgggtcactattccggataaggtacagcggattgcggttgtgcctattccgtggatgtcgatgatttatgtggtggatggttcagatgcaaaaattgcggggatgcatccgtcagcaaaagaggcttaccgcaacagtattctgaaaacactggcgcccggtattgagaaggtgaacagcacctttgtgaataaagatttcacgattaacggcgaagagctggtcaggttaaatccggatctggtgattatctgggattaccagaaagaagaaaaagagaaactggataaactcggtatcccggcggtggcaatcagatacggtgatttggatgatgtgaaaaacgggatccggctgctgggcgatattctgggcaaagaaaagcgggccgcagatttactggctttttttgatcatcagattgagtcagtgaacacggtgacaagagactcaaccccggtgactattcgtgaaatgccatacggaaagccgggcattttgtatgtcagagacaaaaatctgacggtggccggtaagacttctgtaaacagcctgatgatcaaccgggccgggggcattaatctgacagatgatatgccggtgaaaccaaactggatcacggtgccggcagagcaggtggttaacctggatccggaaattattattctgagccagtttgattcatttgtgccggaagatgtgtaccggaatacggtcggctggccgggcacagaaacgatttcagccgtgaagaacagacgtgtttataaagcccctatcggtatttaccgctgggatgcaccggggatcgaaacaccgctgatgatgaaatggattgaagcgcgggttaagcgtaaaccgatagatgatgcggcaatacagcaggatatccgtcagttctttaagcagttctttgataccgatctgacagacgcacaaatgcgggaaatcctcagcctggatgccaatatgaccggcaacagcagcacaggacggtaatacagagcacagtaatggcggagcagggaactgctccgccgtgttatttatgcgcccggattttcacctttgcggtaacggtgagaattggcgtgtgattttaagccgataatctccggtgcaaactcatccacattaatcgaacgcagacggctggcttccgctttacgcagaatatctgcctcttccggtgtgacttttccgtcttccagggcaatatctgccagtttatccaaccgggagaaatcaatatgtttttcagccatgcggctcaggcgatccaccagcggctcggcggcaagaatatcactgagtgcggcattgagcagcccgtgcgggttgttgggctcaggtgccagatattgtccgcgtccgattctgtcgcgggtctctgacggttcctgcagcagacgggcgagtttgctgtccagtttgtctgacggcggacggtgatgacgccctgtcgggaatatggtcaggcgcagcagggctgccactttgcggtcagggaagttggtcagcagttcatccatcgctttttctgcttcatacaggcaatcctgtactgcccagtgtaccagcggtagatctgcctgcggacggccatcctcatcaaagcgttttaaggtggcggatgccaggtaaagctggctgagtatatcgccgagcctggcggagatccgttcacggcgttttaaactgccgccgagtgtcgccatggcgatatcagacagcagtgccaggttggcgctcagccggttgaggtgctgataatagcggcgggtggcatcccggaacggtgacgggctgaaatacccgcgtgataacccgagccagaaactgcgggtggcagcggttaacacatggccgacatgagcaaacagcgcgttatcgaaatcattcagctgattatccgccgctgcggccatctcagtcattacgtacgggtgacagcggatagcgccctgaccaaagataatcatactgcgggtcagaatattggcaccttcgacagtaatcgcgataggcgccccctgatagttgcgggccaggaagttggacggcccgaggcagatacctttaccccctgcaatatccatggcatcaataatggcgcgctgtccccggtgggtacagtggtatttcacaatcgcggacagaaccgccggtttctccccgagcataatgccggtggtgatcagcgtggcggcggcatccatcagataggcatttccggcaatccgtgccagcggttcctcaatcccttccattttgccgatcggcatccggaactgacgacggatgtaagaataagcgccaattgccatggccgcacttttcagcccgccggtggcattggacggcagggtgataccacgcccgaccgacagacactccaccagcatacgccagccctgtccggccatggccgggccgccgataatataatccagcggcacaaagacatcgttgccgcgtgtcgggccgttctggaacgggacattaagcgggaaatggcgggtaccggtttcaacacccggggtatttaccgggatgagtgcgcaggtgatcccgagcgaggttttttcaccgagcagtttgtcagggtcatacagtttaaaagcgagacccagcacggtggcaaccggtgccagggtgatatagcgtttattccagttcaggcgcatgccgagcacctgttcaccctgccattcgccggtgcagataatcccggtatccggaatggcgccggcatctgaaccggcttccgggctggtcagggcaaagcaggggatttcctccccggaggccagccccggcagccagcgttttttctgctcatctgtgccgtagtgctgtaacagctctcccggccccagtgagttgggaacgccgacggtaattgccagaataccggaaaccccggcgagtttttgcagcacctgcgcctgggcataggcggagaacgccaggccgccatattctttgcggatgatcatggcgaagaatttatgttcacgcaggaactgccataattccggcggcagatccgccagttcgtgggtaatttcaaaatcattggccatccggcaggcttcttccgccggaccgtcgaggaaagcctgttcttctgctgtcagttgcggggcaggatagctgtgcagtttctgccagtccggctgcccgcggaacagatcaccctcccaccaggtggtacccgcatcgattgcctctttttctgtctgcgacatcggcggcattactttgcggaacagcagcatcagacggctgctgaacagcgcctgacggacgggggtgataacaaacggcagggtaaccagcaccagtaaaacggtgacagtaaacggccataaacggaagatattcatgacgatactgaacagtatcagtgtcattacactgtacttcaggctgacccggtgaaacgagagcaacccggtgacggcgataaacagaataatgctgagtagtaacatgatgaacctccgtaagcggatattcgtgtcagcacaatgtattcgtgtcagcacaatgtgacatcagaggtctgacctgttgtgttcagatttagcgcaacggcggaataacttcaatgatttcacattttatttacaactcagctcacaaaattagcagaacaaaatgtgtcttatttgcagatgccacggattgtgacttctttcaccccggcagatccgttacactcaggacagacaaatccgattcattttcaggagcctatctctatgtaccaggaacttatccgcggtgaactgaccgaagcagcggcaaccctcgataactttttgaaagatgagaataatattgatgctatccgccgggctgctgtcatgctggctgattcttttaaagcgggcggcaaagtgatgtcatgcggcaacggcggttcacactgtgatgcgatgcattttgcggaagaactgaccgggcgctaccgtgaaaaccgtccgggctatccggcgattgccatttcagatgtcagccacttatcctgcgtcagcaatgatttcggctatgaatatgttttctcccgttttgtggaatctgtcggccgtgaaggggatgtgttactcggtatctccacatccggtaattcaggcaacatcattaaagccattgaagcagcccgcgccaaaggcatgaaagtgatcacgctgaccggcaaagacggcggcaagatggcaggcagcgcggatattgaaatccgtgttccgcattttggttacgcggatcgcattcaggaaatccatattaaggttattcatattctgatcatgctgatcgaaaaagaaatggtcaaataaccggatataagccggaacctgaaaaagcactctgccgccggttgagtgctttttttatggcgcaatgtctgtcttattcaccataagcataaatcaccttacatataaccaaatcatctaaaagaatgatattttcgcgattgtgaaactatcagattgcgggtaacaatagtcctcagtcatcacaaaaacgggtaagggagaaaggcgatgtgtgaattgctggggatgagtgcgaatgtcccgactgatattcatttcagtctcagtggcctgatcccgcgcggcggcgaaacaggtccgcataaagacgggtggggaattacgttttatgagggaatgggctgccggacattcaaagacgcccgtgcctgctgcaactctcccgttgcccgttttgtccgtgactatcctgtcaaatccgaagcggtgattgcccatatccgccaggcaaacagaggggtggtatcactggaaaatacccacccttttacccgcgaactgtgggggcggaactggacatatgcccataacgggcagctcagcggctatgaacatctgccgaccggtttttttaccccggtcggccagactgacagcgagcatgcattctgctggttactgaatcagctgaaagaaaaatccccnnnnnnnnnnnnnnnnnnnnnnnnnnnnnnnnnnnnnnnnnnnnnnnnnnnnnnnnnnnnnnnnnnnnnnnnnnnnnnnnnnnnnnnnnnnnnnnnnnnnnnnnnnagacggtgttccgtgaaattaaacggctggcggatgtgctgcgccagtttggtgtctttaatatgctgctgtcagacggcagctatgtactggcgtactgttcaacgaatctgcactggatcacccgccgcgcgcctttcggtaaagcgcggctggtggacagtgatgtggagattgatttttcgcagcatacccggccggacgatgtggtgtccgtgattgccacgcaaccgctgaccggtaatgagctgtggcagaaaatcgggcccggcgaagccgttctcttttattacggcgaacgggatgagtccgtgttctgagtcagcaaaccggtatccgctgccggtaccggtacagctgaatgtgccgcggttacataacggccgttaacaaccgcaacgactgctggtatctgattatccgcgaaatactgataagcaggctgtaactgctgccagaacgccagatgtgcggaattccggtggcggttcaggttctccggcgtcatccggaaaggataaatcgcgatattcagatccgtctgtccgctcagcagggcgctttccacatagcggtaaatctcatcaatataagcatccgtcatggcgtagcagccgacggatttgcagtctccgtgaaccatcagataatccccggtatagccgtgcgcacggtcgaattcattgggaaaaccaaggttgatagctcggtaaaaccgactattcgggttaagctgtgacaagctgatacggtaaaatccctccggactttttaaatcaccggtcagttgctttggcccgaggccgccggaaaactgacaaaccgggtagcgttttaccagtttaaaacgtccgttattttcccgtttataaagctccagctctttttcttctttaaatatctgtataaatacctggatgttccggacatcactcaccggcgcagtgagccataatgacgcggatttttccgtgtttgctgacgattgtcccgcaaaaaacagcaggccgatcatcataaaaatgatatgtcgcattcttagtattcagggtggcaataagttggtgaaaaaagtaacaacagattgccatgatgcagataatttgtgaatggtttcctgtgagaataaaatcggttgttacaaatattgttgtggttaaaaaacgaacagcaatcggtaaagatgacttaactactcggtaaaggcgagttattaggctttttctgatcacaataatcccatttgcttgaaccaggtcactcgtttcgccggacagaattgttgtgaagtggtaaaataatgcggatctgatttacgcaaaatcgtgacatacatcagagaaaacagcccggggcgacaataacggcccggagtgtttttattgttgagttgtcatacgctgctgcggcagtaatgacgtgggtttaacaaaaacttgtgcaaattttatgattaaaattaaaaaaggccccgccctgccgatcgcaggagcacctgctcaagtcacagaagatggcccttcagtccgccacgcagcattgctgggtgaggaatacatcgggatgcgtccgtcgatgctggttcaggaaggtgaatcagtgaagaaaggacaggctctttttgaagacaaaaagaaccctggtgtgatttttaccagccccgcctgcggagtggtaaaagccatcaatcgtggtgagcgtcgtgtattacaatctgtggtgattgagatacagggagacgagcaattaacatttgacagttatgaccgccgggatctgccgtcactgacccgtgaacaggcagagaaaaatctggtggcctccgggttatggactgcgctgcggacacgtccgttcagccataccccaaaattaggttccgtgccggccgctgtttttgtcaccgctatggacaccaacccgctgtcagctgatccgctggtgattatccgtcaggaacaggcgtcgtttgatgacggcttacaggtactgagctgcctgacggaagggaaggtacatgtctgccacggtacagctgatttcgcaaaagttaccgataacaatcgtgttagttatacacaatttaccgggccgcatccggcaggccttgccgggacgcacatccacttcctggaaccggtcagcgcaacgaaaaccgtctggtctctgaattaccaggatgttatcgccatcggtaaactgttcacgaccggctttttatataccgaccgcattgtggcgctcggtggtccgcaggtggaaaatccgcgtctgctgaaaacccgccttggcgcagatctgtatgaactgaccgaagggcagctgaaagccggtgaaaaccgcattatttccggttctgtcctgtggggcgtggccagtgatgatgctcatcactatctgggccgttttaccaatcaggtctctgttctggaagaaggccgtgagaaagagctgttcggctggattatgccgggcacagacaaatacacggttacccgcaccacactgggtcatttctttaagaagaaactgttctcattcacgacatcaatgaatggtggcgaacgttctatggtgccaatcggcagttatgaacgtgttatgccgctcgacattatggcgacacatttcctgcgcgatctgctggcgggtgatactgacagtgcccaggcactgggtgcactcgagctggatgaggaagatctggggctgtgtacctatgtctgtcagagtaaatatgagtacggcccggtgctgcgtgacgtactgaccaggattgagcaggaaggataatcatgggtctgaaaaaatttctcgaaaaaattgagccgcattttgaaccgggcggcaaattacagagatggtatgcactgtatgaagcagccgccaccatcttctacaccccggggacagttacccgcgggcgttcacatgtccgtgactccatcgaccttaaacgtctgatgatcctggtctggttatccgttttcccggccatgttctgggggatgtataacgtcggtaaccaggcaatgccggtactgctggatatgtacagcggagcggagcttcagcaggtgattgccggtgactggcattatcgtctggcggagcttatcggggtgtccttcacacaggatgcgggctggatcagcaaaatgctgttcggcgctgtctatttcctgccgatctacggggtgatttttatcgtcggcggcttctgggaagtcctgtttgcgatgatccgcgggcatgaaatcaacgaaggtttctttatcacctccattctgctggcactgattgttccgccgacgctgccgttatggcaggccgcgctggctgtcaccttcggtgtggtggtcgcaaaggaaattttcggcggtacaggacgcaacttcctgaacccggcactggccggccgtgctttcctgttctttgcttatccggctcagatttccggtgacactgtctggactgccgctgacggcttctccggcgcaaccccgctgtcacagtgggcggtcggtggtgagcatcagctggttaataccatgaccaaccagccgatttcctggatggatgcctttatcggtaacgtcccgggctcgattggtgaagtctccacgctgatgattctgatcggtggtgcagtcattctgtttgcccgtattgcctctctgcgtattgtggccggtgtgatggtcgggatgatcgcgatgtctgctgtctttaatatgattggttcggacaccaacccgctgtttgctatgccgtggtactggcatctggtcctgggcggttttgccttcggtatgattttcatggcgacggacccggtttcagcctcatttaccgacaaagggaaatggacttacgggatcctgatcggggtgatgtgtgtcctgatccgtgtggcaaacccggcatatccggaagggatgatgctggctatcctgttcgccaacttattcgccccgttatttgattatctggtggttcaggcaaacattaaacggagaaaagcacgtggctaatgaaaaaacgaaaaacaaggacagtgtcgcaagaacgtttatcgttgtcttcgtcctgtgccttgtgtgttcgatagtcgtggccggttcagctgtgggactgaagtccacgcagcagactcagattatgctggataagcagcgtaacattctggatgtggccgggttactgacgccatccatgccggcagacgaaatcgatgctgtctataaaaaattcatcagagcaaaaatggtgaatttaaaaaccggtcagatgagcgacagcaccggcaagtacgatctcaacgatgaactgcgcagtgatgagagcagtattgccctgtcaccggaagaagatctggcgaaaatccgccgccgtgccaacagcgcggaaatctatctggtacagaatgagcagggtgaaaccagcaagattgttctgccggtttacggctccggtctgtggtcggtgatgtatgcctttgtcgcgattgatgtcgacggtatcacctccgaggggatcacttactaccagcatggtgaaacgccggggctgggcggtgaggtggataacccgcagtggcgtaaacagtggattggtaaaaagctgtttaatgaagaaggtatgccggctatcaaaatagtccgcagtggcgccactgacagcccgtacggcattgatggtttatccggtgcgacactgacctcaaacggcatccagcatatgtttgatttctggctgggcgacaacggttttggcccgttcctgaaaacagtacgcgaaggagcgttgaatcatggctgatagtaaagaaattaagcgcgttcttctcggaccgttattagataacaacccgattgccctccaggtactgggtgtgtgttcggcgctggcggtgaccaccaaactggaaaccgcactggttatgaccatcgcggtaaccctggtgacggcattctccagcatgtttatctcgatgatccgtaactttattccgggcagtgtgcggattattgttcagatggcaattatcgcctcgctggttattcttgttgaccagatcctgcgggcctatgcctacggtatctccaaacagctttccgtgttcgtcggtctgatcattaccaactgtattgtgatgggtcgtgcggaagcgtatgccatgaaagcgccgccgcttgaaagctttatggacggtatcggtaacggcctgggttacggtgtgatcctgctgctggtgggcttcttccgtgaactgatcggctccggcaaactctttggcgtgaccgtgctggaaacggtacagaacggcggctggtatctgccgaacggcctgttcctgctggcaccaagtgcattctttatcatcgggatgcttatctggggaattcgtaccctgaaaccgtcacaagtcgaggaggattaagatatggaacattatatcagtctctttgtgcgggctgtgttcattgaaaacatggcactggccttcttcctcgggatgtgtacattcctggcggtgtcgaaaaacgtcaaaacggcgtttggtctcggcgtggcggttaccgtggtgctggggatttcggttccggcaaacaacctggtgtacaacctgctgctgcgcgacggcgcactgatggaaggcgtggatttaagcttcctgaacttcattacctttatcggggtcattgcggcgctggtacagattctggagatgattctggatcgctacttcccggcactgtataacgcgctggggatcttcctgccgttaatcaccgtaaactgtgcgattttcggtggtgtgtcctttatggcgcagcgcgactacaactttacggagtctgtggtttacgggttcgcttccggtatcggctggctgctggcgatcgtgctgatggccgctatccgcgagaagatgaaatactctgacgtaccggccggcctgaaagggctggggatcacattcgtgaccaccggactgatggctctgggctttatgtccttctccggcgtacagttataagggtgaaacgcaattatggatatcgttattttaggcgtggcaatgtttaccctgattgttctggcgctgaccgcgttgattttgtttgcaaaatcaaaactggtgaacacaggggacgttaagattgaaatcaacggcgatgcggagaaaagcttcgacgcaccggccggtgacaagttactgaatgtgctgtccggtcaggggatttttgtctcctcggcctgcggcggcggcggaacctgcggccagtgccgcgtgaagatcaaagaaggcggcggtgatattctgccgacagaaatgtctcacattaataaacgcgaagcccgtgaaggctgccgtctggcgtgccaggtgaatgtgaagcaggatctgaaaattgagctgccggaagagatcttcggggtgaaaaaatgggagtgcgaagttatctccaatgataacaaagcgactttcattaaagagctgaaactgaaaattcctgatggcgaaagtgtgccgttccgtgccggtggttatattcagattgaatgtccgccgcatgtggtccgctatgatgagtttgatgtgccgcaggaataccgcgaggactgggacaagttcaacctgttccgctatgtgtctgatgtgaaagagccgacagtgcgtgcttactctatggcgaactatccggaagagcacggcattatcatgctgaacgtgcgtatcgccacaccgcctccgcgtgtgccggatgcgcctccggggattatgtcttcttacatctggtcactgaaagctggtgataaggtgacaatttccgggccgttcggggagttcttcgcaaaagatactgacgcggaaatgatcttcatcggtggtggtgcggggatggcgccgatgcgttcgcatatcttcgatcagctcaagcgtctgcactccaaacgcaagatgtctttctggtatggtgcgcgttcaaaacgtgaaatgttctatgaggaagattttgaccagcttcaggctgagaatgaaaacttcacctggaacgtggcgctgtctgatgccctgccggaagataactgggacggatacaccgggtttattcataatgttctctatgagcattacctgaaaaatcacccggcaccggaagactgtgagttctacatgtgcgggccgccgatgatgaacgccgccgtgatcaagatgctcaaagatctgggtgtggaagacgagaacattatgctggatgacttcggcggctgatttccgcccctgtcataacgaaactgcgcccacacctgtgggcgcagatgatctgaaatcagactggattttgtatggtaaaaataaaacgggcttttctgccgctggcactgatggcattgttactgagtgcgtgcggtgataacacaccggaaacacagcaggtaaccctgaacggcaaaacgatgggcacctattacgcgataaaatatatcgctgacccgaaagacccgtcggcggaatcactgcagaaaggcattgatgtggtgctggaagaggtcaatgaccagatgtccacctaccggccggattctgaactcagccgttttaatcagagccgtgaggtgaatacgccgtttccggtctctgccgcgactgcaaaagtggttcgtgaggctatccgtattaaccagctgacagacggcgcactggatgtcaccgtcggcccgctggtgaatttatggggttttggtccggaagggcgcgtgactcatgtgccgacagagcaggatatagaaacccgccgtcagtggaccggaattgataaactgaaggttgaaggtaataatctgattaagaccgtgccggaactgtatgtggatctgtcctcgatcgccaaaggctacggggtggatgcggtggcagaatacctggaatcacagaatatccgtaattatatggtggatgtgggcggcgaagtccggactcagggtattaacggcaaaggcaaaccgtggcgtattgcgattgaaaaaccgtcgtcacaggggctgagccagtctgcacaggagatcattgagccggggaatgcctctgtggccacatcaggggattaccggaattattttgaagagaataatgtccgttattcacataccattgatccgaaaacagcacgtccgattaaccataatctggtatcgattacggtgattgctgataattgcatgagtgcggatggcttttctaccggactgaatgtgctcgggccggagcgtggccttgaagtggcgaatgcgcaaaatatccctgtttttatgattgtcaaaacagagaagggatttgaagaacgttacagtgaggcatttaagccctacttgcagcaaaaataaaaggaggtggctgatatgatgataaaagtatttatcgcaacctttatcctgtttctggtcgcgtttctgggaatgtctcttgggtatattattaagcgcaagagcattcagggaagctgcggcgggctgagcagcattggtgtcgagaaagtctgtgactgtcctgaaccgtgtgatgcccggaaaaaacggatggcgcgtgaagctgcccgcgaagagaaactgaataaaaaccggattgtatagattcggaagatataacaaaggcgcgttaacgcgcctttgtttattaatggcagaacaacaatacggaatcagtaataacgatagtctgatgtcacaatagcggtatttatcacaataatattattggcctgattcccttcagagatactctgccagagtgctttttcacaatttccgtaagtatctgtctgctggcagatataaatggtttttacccggcccagcggcgtatgttgtgtctgtgtctgccggataacctgaccatcatcattataggcaaactcatagttcagctgaggaagcccgttactctgggacataatcgcatttatctgccgatcctgacgccagtcgtagcggatttcaccgccggtgtctgcggagtcccctgtggatactgcatgcgagattaaaccgttttcataaaaaaaatcggtttccatatgcgatttttgggtattgccgccactgttactttcagattcggcacggacgatttgcttctgattattatagaaaaggcggcttcgggcatgaatcagcgtgacgggtgcttttccgttgccatgcagttgtgacgtgaataataaggtatatccgtgttctgtcttcttaccttcggaatacatccggttttgcaaccccgggtagtgctcggtaacttccagcgaaaagtaactcagttcaccgcacggtgtcaggtcatattgcccgttaatcataatattgctgtttttgttgtccggggaatgtgctgttgtgatgacggattttaccgggccgttaatcataccggcacccagaataataaagttactgctgcgtgtttcatctgaatacaaattgcagtctgcgtaagaataaacactgaataacagaaaaaataatcccgtaaaaacaaagagggattttgggggtgaatttaaatcgaagaacaggttacttatcaccgcatggcctcccggatgtttcttatagttataacaaaagtggcctgataaataaattactataattaattaggtttgttgagattataaaatattatgtaaggattacagagtaaattgcaggaagagacagaatgtattaaataagagtgatattcatcatctgttaaatctcactcttatttttcaggctgataaaattaccaagtaataataccttgattaattattttattttcatattgagcagcgaatcgaccatcacaccatctgcacccaattctgtcgccagttgtaaatcggctggtgtttttataccgaacagaacaacatggttttgattatttttacgaaaacagtccattgcggttttatcccaggtcagcacaaccggagagcgtgcttcacccagtgtgaaggtttcaaccacatccacgttacggtgcagttcaaagccataccagcgtggctgcggattgtccgccaggtcacaggtgtgtgtgatcaggctgccggccagtgcattacgggtggtatcacggctttcaaaaacggggattgacggcggcagagcagccagataatcctgaccggttgaatagacgcggacacggtttttagcgttatgacgggtcagtactgaatccagctgttgtgcaaaaactgccggtgaggcgtccggagatttgatatcgaggtagaaaaaagtatccgggtaacggctcaggacggcatccagtgccggaacagaagccttgatatgggttttatttttctgattataatcccgggctgcatcggtttgtgccagttctgcggcgctgtaaccggaaaccggaccggttttgtctgtcagagatttcagatcagaggggcggtataacaccacctggttgtcctttgagagctgaagggtgatccagatggcatcggctttgttactcagcgccttatcgatggcataaagggtattttcaggggcatccgccgtggcggcgcgatgggcaataatttgtggtgctgcatgggctgtcataacaatgccactcaggaaaagggctgatagtatttttttcataatccgtccgtcagaaagaatgagaccaggtgtgatgtcacgctgttgtagcggagtaacatgacaaccggatgtaatcacagaaaaaaagcacaaacctgcaaatttcagcccactgattgatttggtgaataataagcaaattaaccgatttgaattacattgattttaactgtatatttaaacagtatcattggtgagcaggagaggcggatgcgtaaaataattcatattgatatggattgcttttatgcggcgattgaaatgcgtgacgatccccgtctgcgcgatattccgctggctatcggcggcagttccgaccggcgcggggggattgcgaccgccaattatccggcgcggcgcttcggggtgcacagcgcgatgtcaacggcaaaagcactgctgctgtgtccgcatctgaaagtgatcccggggcggatggagctgtataaaaccacctcccgccacctgcatgaaattttcgcccgatatacttcactgattgagccgctgtcactggacgaagcttatcttgatgtgacggacagcccgcagtgccggggttctgccacactgatggcggaagagatccgcaaaaccatttttaccgaactgggactgacagcctctgccggggtggcgccggtaaaattccttgccaaaatcgcgtctgatctgaataaacccgacgggcaatacatcatcacgccggagcaggtgacggattttgtgctgtcactgccactgcgtaaaattcccggcgtgggaaaggtgacagcaaaacgactggctgatctcgggctggagacctgccgggatgtgcagaattatgatcagatatcgctgctgaaacagttcggaaaattcggacagatcatctggcagcgcagtcacggtaccgatgagcggccggtttgtccggacagggaacggaaatctgtcggtgtcgagcggacactggcggaagatatcgcctcgtgggatgagtgtcagacgattattgatgagctgtttccggaactggagcgccgtctgactaaggtgtcaccggatctgcggatcgcccgtcagggcattaaactgaagtttgcggattttcagcagaccacacaggaacatgtccatcaggtgctggataaagcggatttgctgaaaacggcggaactggcctgggagagccgccgggaagggcgcggcgtgcggctggtggggctgcatgtgacactgcgggatccgcagcttgagcggcagttgctgctcgggttctgaatcacatataaaaacggcgggataattatcccgccgctgagctgaataaggcgattacgctttctcagggatcgcttttaagatagcggtcagtaactgccagtactgcccgacactcttgatatgcacctgctcatcaggggagtgagcaccggtaatggtcggcccgatggagaccatgtccatgtccggatacggttttttgaataaaccgcactcaagaccggcgtggatcaccatgatgttcggggttttgtcaaacagctgctgataggtttcgctgaccagatgcatgaccggagagtccgcatccggctgccagcccggatagccgccttcggcaacaatatccgcaccggacagtgctgccagcgaggtcagcatgctgaccacagaggatttgccggattcaatcagggaacgtaccaggcagataatctgcacacggtcgtcactcattttcaccacacccacgttcagtgaggtttcgaccacgcccggaaccacgtcactcatgcggatcacgccgttcggcatcacattgagcatattgataaagcgggactgcacatcagcggtcagtgcgccctgagcagcggttgctgcttccagggtgacgaccaggtttttctctttctgcgccagttcttctctgagcagcgcttcaaaggtctgtgccagcgatttcagctgtgcggttttatctgccggtactgccagagtgatatggccttcgcgcggaatcgcgttgcgcagtgtaccgccctggaaatcaaccagacgcgcaccgagttctgcggcgtgaccggccaggaaacgggccagtaatttgttggcgttacccagaccgaggtgcacatcaccgccggagtggccgcctttgagacctttgagggtcagggtgaaggtgctgtaaccggccggaacggcttcacggctcagcgcaagagttgtggtgacgtcaataccgcccgcacaacccatatagatttcaccttcttcttcggagtcggtgttgatcaggatatcagcctgtaaccagtccggctgaagaccgaatgcgccgtccatcccggcttcttctgtcatggtcagcagaacttccagcggcccgtgtttgactgaatcgtcagccagtactgccagcgcggaggccataccgatgccgttatccgcacctaatgtggtgcctttcgcggttacccagtcgccgtcgatgtacggctgaatcggatctttttcgaaatcgtgtgctgtatcattatttttctgcggcaccatatccaggtgcgcctgcagaacgaccgctttgcggttttccaggcctttgctggccggtttgcggatcaggatattaccgacgctgtcgcgttcaacgtggaattccttttcttttgcccattcaataatatgtgcagccagttgctcttcgtggtaggacggatgaggaatagagcagattttggcaaaaatatcccacagcggctgcggaaataattgtgatagttcagacacgttcgatctcctgttactgcatttttcattattagggggaggatacccgaaggcggccggtaacgctgtttaaaatgagcggtcgcgaatatccgatgtccggagaatagcaaattcttacgcaaagtgcgtgtgtcataacagggaattatgatgaatttgtcagatactctggtctttggcggctcaagtcactataatctcgcgcaaccttttttccgcaaaaaagactcttttctgtaaatcatcaagccgggatcaatctgatatgagcgaaaaatacgtcgtaacgtgggatatgttgcaaatgcatgcccgtaaactggcacagcgtttaatgccaaccgaacaatggaaaggcatcatcgcggtaagccgcggtggtctggtgccgggggccttactcgctcgtgaactgggtatccgtcatgtggatactgtctgcatttccagctatgatcatgaccatcagcgcgatatgaaagtcctgaaaaaagccgacggtgacggcgaaggatttatcattgttgatgatctggtggacaccggcggtactgctcagatgatccgcgatatgtatccgaaagcgcatttcgtcactatttttgccaaaccggccggacgtccgctggttgacgattacgtggttgatatcccgcaggatacctggatcgaacagccgtgggatatgaccgtcagttttgttaaaccaatctgcgatcagtaagcgaatgccatgacacaacagaacctgtcagagaaactgtttaagccgaaaatcaagcatcctgagacatccgcactggtgaactttacccgttccgggatgaaggaagtcaggggcagcgtcctgagcggatgtacacatccgggctggtatcgcatgattaaccgcttaatgtgggcctggcgggggatcccgccgctggaaaccgaagaggttctcagccggatagcggcatctgatgccccccgcagtgatgatgcactgctggatacggtgatcggctaccgccgcggtaactgggcttatgaatggtctcagcaggcgatgttgtggcagcgcaaagcgctggaatttgaatccggcgaaaaagcctgtgaagcctggctgcttgccgcaaatctgtacagtattgcgggatatcctcatttaaaaggggatgagctggcggatcaggctaccgttctggcaaatcaggcgtatgaaaactccgcccggtttgccgcatatgaactgaaaaaaattgaattcaaaatggagagcggcggaaatatctgcgctttcctgcacctcccgccggggaaaggcagtgcgtttccggtggtgatgatgtgcggcagtctggataatctgcaaagtgattactgccgctacttccgtgactatctggcaccgcagggcattgcactgctgacgctggatatgccgtcaatcggttattcctcaaaacagactttaggccaggaaagcagcctgatgcaccagcaggtgctggatcagctgcgcaatgtgccgtggattgaccacacccgtgtggcggtgatggggctgcgtttcggggccaatgtggcgatgcgtatggcatacctgtccgcacatcagctgcggggggccgtgctgttcgggccggtggtgcatgatctgtttgtcagcccgcagcggcaggataaaatccccggcatgtatatggatgtgctggccagccgtgcggcggcacgctgtactgaccttgataccgtccgcacccgcctcggctgcctgtcactgaaaaatcaggggctgctcggccgccgctgttcactgccggtgctgagcatgtgctggaaagaggatgtgttcagcccgaaaagtgaatcggagctgattgtccgctccagcgctgacggtaagctggtggaattcggccataccccggtttttgacactttccacaaatcgctggatgaggccacccgctggctcaccagaattttatcctgaacagcataataatcattgataattcctgtctgtttgctacaactaagccttcgctgaaaggaggcttaatgatggcactggtttcagattacacacgcggcaggttgctgcgatgtttcactgcattgggtccgtatatccgtgagccgcagtgtcaggagggtcactatttttttgactgcctggcggtgtgtgtgaatgcgggggtcgcgccggaaaaacgtgagttttttggctggtggctgacactgatcccgcaggaaaccgggtttgtctctgaataccataccggggtatttgataaaaaagggctctggcaggaaaaatccctgtctgacaaagaggcccgtgatgcagtcagcaaaaccctgactgatttttatccccgtttacaggccgttcttcaggaactggatctgtccctgaccccgtcaccggtatcaccgccccccggaaagcagccggattaatgtccggttttgcgttgtgcctgttggcatgacgcgcatcacctgttaaaacaggtcatcttttcttatcccgcaaaatgaatggtagaacgcaatgaatagcagccaaacgctggttgtcaaactgggcacaagtgtgctgaccggcggatcacgacatttaaatcaggccaggattgttgaactggtccggcagtgtgcgcagcagtatgcaaaagggcaccgtattattattgtgacttccggggcgattgccgccggtcgtgaacacctcggttacccggaactccccgccaccattgcgtccaaacagttgctggcggctgttggtcagagccgcctgattcagttatgggagcgcctgttctcgatttacggcatccatatcggccagatgctgctgacccgtgcggatatggaagatcgcgagcgtttcctgaatgcccgtgacaccctgaccgcactgctggataacggcattgtgccggtcatcaatgaaaatgatgcggtcgccacagcggaaattaaagtcggggataatgataacctctccgcgctggcagcgatcctcggcggagcggataagctcctgctgctgaccgatattgaagggctgtatactgccgatccgcgcagcaacccggacgccaccctgatttctgaagtgcatgacatcagcgatgaactgcgcagtgttgcaggcgacagtgtctccgggctgggcaccggcggaatggccaccaagctccaggccgcgacggtcgcagggcgtgcagggatcgatgtcattattgctgccggtgatcgcgccggggtgatttgtgatgtgattgatgatgttccggtcggcacccggttcttcgggaaaaaagcgccgatggaagcgcgtaagcagtggatcttcggggcaccgcctgccggcgagattattgtggatgacggtgcggagaaagcactgaaagataagggcagttccctgctgccgagcgggatccgtactgtgaacggcaatttctcccgtggtgaggttgtccgcatccgcgcgctgaacggccgggatctggcacacggtgtctgccggtataacagcgatgcgctgcgcctgattgccggacggcagtcacaggaaatcagcacgattttaggttatgaatacggcgcagtggctgtccaccgcgacgatatgattgtcagttaaggatatcagcatatgttagaacaaatgggtaaagcggccaaagccgcctcctgggcactggctcagctttccggaaaacagaaaaatcaggctctgacccgcatcgccgatctgctggaacagaacagtgcaccgatccttgctgctaatgaacttgatattgccaaagcccgtgagcagggcacctcagaggcgatgcttgatcgcctgctgctgacgcaggcgcgtctggaaagtattgctgcggacgtgcgtaaggtgtgtcagctggcggatccggtcggggaagtgatcgacggcggcgtgctggaaagcggtctgcgccttgagcgccgccgtgtgccgcttggtgtggtcggtgtgatttatgaagcacgtccgaatgtgacggtggatgttgcctcgctgtgcctgaaaaccggtaatgcggtgatcctgcgcggcggcaaagagacacacaatactaatgtggcgatggtcagtgtgatccagcaggcgctcagcgaatgcggtctgccgcaggcggcgatccaggcgattgataacccggatcgtgcactggtcaatgaattgctgaagatggatcgctatgtggatattcttattccgcgcggcggtgccggtctgcatcgtctgtgtcgtgagcagtccacgatcccggtgatcaccggcggtatcggcgtgtgtcatatttttgtcgatgagacggcggatctgcataaagcgctgccggtcatccgcaatgccaaagtgcagcgtccgagtgtctgtaatgcggtggaaacgctgctggtgcatgaaaaagtggctgcggaattcctgccgctgctgagtgatcacatggcggcggataatgttaccctgcatgcggatcctgccgcgctggcgctgctgaaaaacggcccggcgaagacggaagctgtaacagaagcacagctgtcagatgaatggctgtcacttgatctgaatgtggtgattgtgaaggacattgacggggcaattgaacacatccgtcattacggcactcagcactcggaatcgattctgacacaatccatgtctcaggctgattatttcgtctcaaatattgattcatcagcggtctatgttaacgccagcacccgcttcactgacggcggtcagttcggactgggcgcggaagtcgcggtcagtacccagaaactgcatgcccgcggcccgatggggctggcggcactgaccacctataagtggatcggggtcggtgaccacacgatccgttcataaacaggtcgttatgcatccgcaggacgttttttgtcagatgacagccacgttctgcggatcgcgctttagctttttatctgagtacgctatgataggccatcttaatttacacttatgtaaaatattatgaacacctgcggagaaagcggatagtatgaatcatcaggatgagaaaccgattatttatcttatcggcgcccgcggggctggcaaaaccacggtgggtaaaccactggcgcaggcattactgtacgattttattgacactgatgcctgtgtgacagaacagtgccggatgtctatctcccagttggtggaacaatcgggctggcgcagtttccgcgagctggaaagtgatgtgctgcgtcaggtcagtaaaccgcaccgtctggtctccaccggcggcggcattgtgatggcaccggaaaaccgggcgtttatgcaatcttccggcaaagtggtgtatttgcgcgccagtgccgaaaccctggcggaacggctgtcacacacccctcaggcacatcagcgcccgagcctgaccggcaagtgcattgtggaggagatggcggaagtactgagcaaacgcgagccgctctatctggaatgcgcggatatcgtggtggatgccacctgtccggtgccggaactcatcagtcagatctgcacccgtatccacgccgcagtatagtgcctgctgctgtattattgtgaacagtgacacaaatcgaataaaggtaattccgtaccgctctgtcagttggttaatcaatccgctgtgttattattaaagcgtctgcccgccgaactgattggcggaataataaatacacagggaattcagtatgttgatgaatgtgttacgtgcactgctccgcggattattccgcattcgtgttacaggtgacctgagtaatcttaatcaaccgcgaagtgttatcaccccgaaccacgcctcttttatcgatggtgttctgctggggttattcctgccgacccggccggtgttcgcgatgtacaccaattatgccacgccgtttttcatccgctgtttaaaacccattgccgatattattccggtggatccgcgtaacccgctggcgttgcggcatctgatccgtgaagtggaaaaagggcgtcagatagtgatcttcccggaaggacgggtgacgatcaccgattctctgatgaagatctacgacggtgctgcctttattgccgccaaaaccggcgcaaaagtgatcccggtgcggattgacggcgcggaactgacgtatttcagccggatgcggaaagttatcaaaagtcactttttcccggctatcaccatccatgttctgccgccggagaccattccgatgccggaggcaccgcgtgccgcagagcgccgccgtctggcgggggaacatctgcgcgacattatgatggatgcacgcatgacgtgccgcccgtcactgacactgccgcaggcatttctcggcgcggtaaaacgttacggccgtttccagcggatcattgatgacatcaatttcagtgaggacagttatcaggggctgctgaaaaaatccctcggactaagctgcattatcagccactacaccaaagagggggagcgcaccggtttcctgctgccgaatgccaccgtgatgggtgcggcgatcctcggtgcttccatgcgccgccgtattccggcactgcttaactacacggcgggtgtcgccgggctgcggaatgccatgaaagcggcggggatcactaccatcatcacctcgcgccagtttctggaaaaaggcaaaatgacacatttgccggaacagctgacagaagccaactgggtctatctggaagaggcaaaagcatctgttaccctgaaagataaactgtgggtgatgcgtcacctggtcacgccgcaggcggcactgctgccgcaaaagccggaagatgatgcgattattctctttacctccggctcggaaggcacaccgaaaggtgtggtgcacagtcacgactctctgctggcgaacgttgagcagatcaaaacggtggcggatttcacgccgaaagaccgttttatgtccgcactgccgctgtttcacgcctttggcctgactgccgggcttatccccccgctgctgtgcggcagccgtatcttcctctatccgagtccgctgcattaccgcatggtgccggaactgacatatgaccagaactgtaccgtcattttcgggacatccaccttccttgccaactatgcccgttttgctcatccgtatgattttgcccgtgtccgctatgcagtggccggagcggagaagctggcggaaggcaccaaacaggtctggcaggataaattcggcctgcgtattctggaaggttacggggtgacagagtgtgcgccggtgatttccattaacgtgccgatggccgcccgtaccggtacagtcggacggctggtgccggggatggaagcgcggctgctgccggttgccgggattgaaaacggcgggttgctgcaggtgcgcggcccgaatgtgatgaaagggtatctgcgggtggaaaaaccggggcagattgaaccgccgtcagcggagaatatgcagggcgaggttcagataggctggtatgacaccggcgatatcgttacacaggatgcagccgggtttatcactatccgcggacgggtcaaacgctttgccaaactggccggtgaaatgatctcactggagagtgttgagcagctggcactgagtgtttcgccggacaaactgcatgctgtggtgacgaagccggatgcaaaacgcggcgaagcgctggtgatgtttaccacggacagtgaactggatcgcgcacaactgctggcagaagcgaaagcgaaggggctgccggaactggcggttccgcgtgatatccgttatatcagacaactgccggtactcggcagcggtaaaccggattttgtcacactgaaacaacaggcattacaggagccgcaggtatgacagcatccgccccgttactgaacaaaggcatgaaagcggtactggtttcccagtttattacggcatttgcggataacgcgattctgttcgccatccttgcacagctcagcgcccggcactatcccgaatggagccagccgatgctgcagatggtctttgtgctgacctttattgtgctggcgccgtttgtcggacagattgccgacagcttcccgaaagggcgggtgatgctgctgtcgaacgcctgtaagctgttcggcgcggtggtgatctgcttcggcgcggatccgttcctgggatacgggctgatcggggtcggggcggcggcctattccccggcaaaatacgggatcctcggtgagctgactaccggtgaacagctggtgaaagccaacgggctgattgaagcctcaactattgtggctattctgctggggtcggtaaccggcggcttcctgtctgattaccatattacaatggctctgattttatgtacggtgatgtacgcactggcggcggtgaccaacatctatattccgcgtctgccgccggcgaaaaccggcctgagccgtaatccgcgcacgatggtggtcactttcttccgggccgtggtatcgctgtggaaaaatcaggaaagccgtttttctctgaccggtaccagtctgttctggggcgcgggcgtgacactgcggctgatgctggtactgtgggttccggcggcgctgggcattaccggccagaccatgccgacactccttaacgcgatggttgctatcgggattgtggcaggtgccgggctggctgcccgctttatcaccctggaaaccgtgcgccgctgtatgccggccgggatcctgatcggggtgatggtcattattttcaccttccagacctcggtggtaccgaccaatatcacgctgattatgctcggtgtgttcggcggcctgtttgtggtgccgctcaatgccctgctgcaaaagcgcggtaaagagacggtcggggcggggaatgctattgcggtacagaatatgggggaaaacggcgcgatgctgctgatgctggggctctactctctggctgttaaagcaggtgtgccggtggtggtgatcggtgcggcgttcggcagcctgtttgccctcgccatcggcggattatggctctgggatatccgccgcaaaaaacagatttcacaacaggagtgaccgatgcatgatgaacaggctctgacccggcgcagtacggaactgggagattatctccttgaagctggtctgagtgtcacaacggcagaatcctgcaccggcggggggattgccaaggggatcacagatatcgccgggagttcggcgtattttcagcgcgggtttgtcacctacagtaatgatgccaaacacagtatgatcggcgtatcagaacagtcactgtccgcttttggtgcggtcagtgaggcggtggtccgcgaaatggccgccggggcgctggacaccgcgggtgcggacttagccgtctctgtcagcggcattgccgggccggacggcggcagtgatgaaaagccggtcggcacagtctggttcggctgggcatggcgggaagaaacaggaataaaaaccgctgcccgcagatggtgttttccgggcgatcgtaatgcggtgcgctgtcaggcggtgctgaaagggctcgacggattaattgcaattctgacgaaaaaatcacttgatactgtatgattatacagtataatcagttcaacagattcagttgaaaccattttaataacccgggcggtgtctcaggggttgagaagggagtttacatggctattgatgagaacaaacagaaagcactggcagcagccttaggtcagatcgagaagcagttcggtaaaggttcgatcatgcgtctgggtgaagaccgttccatggatgtggaaactatctcaaccggctctctggcactggacgttgcactgggtgcaggtggtctgccgctgggacgtattgttgaaatctacgggcctgaatcttccggtaaaaccacgctgacattacaggttattgccgctgcacagcgtcagggtcgtgtgtgtgcgtttatcgatgcggaacacgcactggatccggtctatgccaagaaactgggcgtggatattgataacctgctgtgctcccagccggataccggcgagcaggcactggaaatctgtgatgctttaacccgctccggtgcggttgatgtcatcattgttgactccgtggcagcactgacaccaaaagctgaaatcgaaggtgaaatcggtgattctcacatgggtctggctgcccgtatgatgagccaggcgatgcgtaagctggccggtaacctgaaaaactccaacacactgctgattttcatcaaccagatccgtatgaagattggtgtgatgttcggtaacccggaaaccaccaccggtggtaacgcactgaaattctatgcctctgtccgtctggatatccgccgtatcggtgcggtgaaaaacggtgatgaagtggtcggcagcgaaacccgcgtgaaagtggtgaaaaacaaagtggctgcgccgttcaaacaggctgaattccagatcatgtacggcgaaggtatcaacaccatgggcgaactgatcgacctgggtgtgaaacataagctggttgagaaagccggtgcatggtacagctacaacggtgaaaaaatcggtcagggtaaggcaaacgccacaatttacctgaaagaacatccggaaatggcggatgaactggataaaaaattacgtgagttattactgaatcacagtggtgaattcagtaccgcagcagaaagtttcaacgaagaaagtgaaactgaagatgcgggcaacgaagagttttaattcgtaaaaccacactgattttaagatttaaagtaataaaatcattgagttattctgaaagctgtatccgtgacggatacggctttctttttatctgcggataaccgcctgtctctgtccctcataccgtgttctttatacaaaaacccctctcccggccggatgaacgccgtttgtacgaacagactttcagaaaaagtttattcgctttacaatgggtacagcgaatggatttatctgggaattaatgttcaagggaaacccttaaatttctctccgccttgattgatccgaaggttgaatcggagcggcttcacagtctgtttcgcaattcataaatcttattatttcagcttgatttcgggataaatatgagcaaaagcaccgctgagatccgtcaagcgtttctcgactttttccatacaaaaggacatcagattgtccagagcagttcgctggttccgaacaacgacccaacgctgctttttactaacgcagggatgaaccaattcaaagatgttttcctcggtctggataaacgtccttacacccgtgccaccacagcacagcgctgtgtccgtgccggcggtaagcacaacgacctggaaaacgtcggctacactgcacgtcaccacactttcttcgaaatgctgggtaacttcagcttcggcgattacttcaagcacgatgccatcaatttcgcctgggaactgctgaccggcaaagaatggtttaacctgccgaaagaaaagctgtgggttactgtttatgccacggatgatgaagcgtacaacatctggaaagatgaagtcggtgttccggctgagcgcattatccgcatcggtgataacaaaggtgcccaatacgcctctgacaacttctggcagatgggcgataccggcccttgcggtccgtgtactgagattttctttgatcacggcgaccacatctggggcggccctccgggatcaccggaagaagacggcgaccgttacatcgagatctggaacatcgtctttatgcagttcaaccgtcagtctgacggtacattagagccgctgccgaaaccatccgttgataccggtatgggtctggagcgtattaccgctgtcctgcagcatgtaaactctaactatgatatcgacctgttccgcaaactgatcgccgatgtggcgaaagtgaccggtgctgacgatctgaccagcaaatcactgcgcgtgatcgccgaccatatccgctcctgtgctttcctgatttgcgacggcgttattccgtccaacgaaggccgcggttatgtgctgcgccgtatcatccgccgcgctgtccgtcatggctacatgctgggcgcgaaagacaccttcttctacaaactggttgcgccgctgatcgacgtgatgggctctgccggtgaagaactggcccgccagcgtgtgatggtggagaaagtactgaagtcagaagaagagcagtttgcccgtacgctggaacgcggcctgcaactgctggatgacgaattagcctcactgaccggggataccctgagcggtgaagcggctttccgtctttatgacacctatggtttcccgctggatctgaccgcggacgtctgccgcgagcgcaacctgaaagtagatgaagccggttttgaagccgcaatggaagaacagcgccgccgtgcccgtgaaaacagcggctttggtgcggactacaacagtctcatcaaagtggacaagcgcagtgacttctccggttatgaccacaatgaacaggcggcaaccattgttgcactgtacaaagaaggtcagccggttactgagctgaatgccggtgatgaaggtctggtgatcctggataaaactgcattttatgcggaatccggcggccaggtcggtgataccggtgtgttgtcgagcaacgatgcacagttcagcgttctggacacacagaaatacggccaggctatcggccatgccggtcgtgtggacagcggcaaactgacggtgaaccacaaaatcaccgcgaaaatcgacgaagagcgccgtaatgctatccgtctgaatcactcggcaacgcacctgatgcatgccgcgctgcgtcaggttctgggtgagcatgtgtcacagaaaggctcactggtaaacgataaatacctgcgttttgacttctctcactttgaagccatgacaccggcacaaatccgtgaagtggaagccctggttaacgccgaaatccgtaaaaatgagccggttgtgaccgagctgatggatctggaagaagcgaaagccaaaggtgcgatggcactgttcggtgaaaaatacgatgaacgtgtccgtgtactgagtatgggcgacttctcaaccgagctgtgcggcggtactcacgcggcacgcaccggtgatatcggtctgttccgtattatcagtgaatccgccactgcggccggtatccgccgtattgaagcggtcaccggtagcggtgcactggaaagcgtgaatcagcagtctgacgcactctctgcggtggcacagctggtgaaaagtgatgaagccggtgtgagtgagaaagtcaaagctgcgctggataaaatccgaaccctggaaaaagagttacagcaactcaaagaacagcaggctgcgcaggaaagttcctccatgaccaaagatgccgtttcagtgaacggtgttaaactcctggtgaaacaactgactaacgctgaacctaaaatgttacggacgatggttgatgatctaaaaaatcaattaagctctggaattattgtgctttcaactatcagtgatgataaagttagtctcattgcaggtgtaacgaaagatctgaccggcaaagtcaaagccggcgaactggttgcctttattgctgaacaaatcggcggtaaagggggcggtcgcccggatatggcccaagccggcgggacagataccgctgctttacctgctgctatggcaagcgttgaaagctgggtggcatctcacctgtagtctgagtaaatctgaacaggagcgcgctccggcgtgctcctgttattggtgataaggtctttgtatcactaacgttaggtcgcaatttttaactacactaaatattgcaatgtgtctaaaactacatatagtttacaaataatcattgctatacgctttcacggtgttggatggataatggcgggtaaactcagaggcccgactcttttaatatttcaaggagcaaagaatgcttattctgactcgtcgagttggtgaaacactcatgataggcgatgaggtaacagtgactgtactgggtgttaaaggaaaccaggtacgaattggtgtcaacgcccccaaagaggtttctgttcaccgtgaagaaatttaccagcggatccaggctgaaaaatctcaacccaataacaataactattaagttgtgaggcgcgctcgttaccgcgacgggcgccttcttcttttcttcctgccgctattatcccggcttctcactttttttcctgcaaaaatcgcccgtcattctgtcactttctctgttcactgccggattttttcctcaccgccgcgttatgctgatgtggatcctgctgccgtaaaaacacacgtatcgttgtgaaaatcaacatagtgcgcggtaattgtgcaaacgatcgtgagatcttaaaaagttgggaaaaattgtttgacttctcagtgggggaaagtaatatgtgcgccacacgacgacgagataacggaaacggaaatcatcgttgtgtggtctgaaacaatggtgagatggccgagaggctgaaggcgctcccctgctaagggagtatgcggtcaaaagctgcatcgagggttcgaatccctctctcaccgccattcagattgcacccgtagctcagctggatannnnnnnnnnnnnnnnnnnnnnnnnnnnnnnnnnnnnttaaaccccacgatactgtcatggggtttttattttggcaaaagaaaatgctaagataaaaaatcagttctgaaaagatgttttaaggtacgcacccgtagctcagctggatagagggcccggctacgaaccgggcggtcaaaggttcgaatcctctcgggtgcaccatcttatcaccttatttcaaaactgatttccggtaacagaattagtatgcgatgcacccgtagctcagctggatagagtacccggctaagaaccgggcggtcagagggtcgaatcctctcgggtgcaccatataaaaaccccgctctttgagcggggtttttctttttccgtttttcccgtcactgaatcgaatccgtttttacgtcatactcgttatctgaagtacagatgcttctgaaactgatcttaataacaatgacgtgtaagagggataatgtattgtcgcggcagtggtttctgctgttccgtttgtgtggggcagggttgaatcacagcgacaataacccggctttgcgataaagtatccctcttatgaataatatccattatcaggacgggaggtcgatttgatcccggatgtatccaaagcgctctcatggttagagacgcacccccggattttaaaaggcatcaaccgcggcattgagcgcgaaacactgcgtatcacgccggatggtgctctggcacgtaccggtcacccggaagggctgggaaaatcattaacccataagtggatcaccacggactttgccgagtccctgctggaatttattaccccggtggattcgcgcattgattacaccgtgaaatttctgcgtgatgtgcaccgctatactgcgcgtcatctgaacaatgaacggatgtggccgctgagcatgccatgcttcattgattctgaagaccatatcgaactggcgcagtttggcacatccaatgcaggccgtttcaagacgctgtaccgtgaagggcttaaaaaccgctatggtgcgctgatgcagaccatttccggtgtccactataacttctctctgccgatggaattctggcaggcgtggagcggtatcagtgatgcacagagcggcaaggataaaatctccgacggctacttccgcctgatccgcaactattaccgtttcggctgggtgatcccgtatctgttcggtgcatcgccggcgatttgcagctcgttcctgcgcggccgcaaaaccaatctgccgtttgaaacgctgccgaaaggggcgttatacctgccgtatgccacgtcactgcgtttaagtgacctcggctataccaacaagtcacaaagtgatctgaacatcaccttcaaccatctggacacgtatgtcgccgggctgaagaatgccattcagatcccgtctgaagaatttgccgcactgggattaaccaaagacggaaaacaccttcagattaacgccaacgtcctgcagattgaaaacgagttctatgcccctatccggccgaagcgtgtgcagaaaggtgatgagtcaccgtctgacgccttacagcgcggcggggtggagtatatcgaagtccgtgccctggatatcaacccgttctctgccaccggtgtcgatgaaacacaaatccgtttcctcgacctgttccttatctggtgtgtgctggcggatgcgccggaaatgagcgcagatgagctggcctgtgcccgccataactggaatcgtgtgattctggaagggcgtaaaccgggacaggaaatcggtatcggctgcggccgtgaaaaacaacccttgcaaaaagtaggtcacgcactgtttaatgatctcctgcgtgttgccgatgtgttagatacctgctcaggcacacagtatcgcgaagtgtgcgaagcactgaaagtgcagtttgatgatccggaactgacgttctcggggcggatgctggcactgataaaagaagcaggtatcggaagttacgggctggccctggcagatcggtatcatgaagaactgactcacgagccgtatgaagtgatcagtgaagcagactttgctgaacaatggcaggcttctgtcgataaacaaaaagcgatggaagagagtgatacgataagttttgatgagtatctggcgctgcatggcggtcgctgatttctgacagataagaaaatggccacaatcaatgtggccaaaataaatctctcagagaatagggatgataacaatttgcgcgtctttcaatacatcagaccagcgtattcagaaaaagtttcattcgttcggcattttttacaaaaaaaagaggagcgggaattatgcctttgctggatagttttttagttgaccacacacgcatggcggcacctgcggtacgcgtagcgaaaaccatgaccaccccgggtggcgataccatcactgttttcgatctgcgtttttgtgttcctaatgaagagattctgccggaaagaggaacgcatacactggaacacctgtttgccggttttatgcgtaaccatttaaacggcaatggtgttgaaatcattgatatctcgccgatgggctgccgtaccgggttctatatgagcctgattggtgcgccgtcagaaacccgtgttgcacaggcctggaaagacgccatggcggatatcctgactgtcaaagatcaggcgaagatccctgaactgaacctgtatcagtgcgggacgtataaaatgcattcactggaagaagcacatcagattgcaaaaaacatcattgagcgcgatgttcgcgtcaacaaaaatgatgaactgctgttatctgatgatgagctggaaaaactgcatccgtaatttttcagccccggatacaaaaaaacctgcgcgcattgctgccgcaggtttttttatgtcttttatctttttcagatatcagcagcgatatcggcaccggccggtttcagcggtgacagttttaccgttttaatcacattttcgccgatggcaaccacttcaaactggtagttaccgacagtgacaagggtattgagtgtcgggatatcaccgagttcttccagcagaaggccattaatggtacgggcaccttcttccggcagggaaagattcagggctttattgatttcacggatattggcagaaccttcaatcagcagcgtgccgtctggctgacgggtgacttcctcggccagcgatggtgacattgaggtggtaaaatcaccgacaatttcttccaggatgtcttccacggagataagcccctgaatatcgccgtactcatcgacaactaatccgactttttcattattgcgctggaaattgaccaactgtaagttcagtggtgtgctgtccggcacaaagtaaactttatcagcggccttgataagcatttgcttggtgaattcctgcttctcaatcatcagccggtaagcttcacggacacgcagcataccgatggcatcatccagcgagtcgcggtagagcactatccggccgtgcggtgagtgcgtaagctggcgcagaatggatttccattcatcattgatatcaatcccgatgatctcagtgcgcggcaccataatctcatccacactgactttatccagatcgaggatggagatcagcatgtcctggttgcggcgggacagtttacctttggactcattaacgatggttttcagttcttcttttgatactgcatcactgcggatcacggtgccgcggataccgatgcagcgcatcagaatcagggttattgcgttaaatgcccagaccagcggcagacagatttttgccagcggacgcagcagaaaactgctcggaaaggcgacctgctgcggatagagtgcggcaatggttttcggcatcacttcggcaaacacgaggatgacaaaggtcagcaccccggtggcgatagccacaccggcgttaccgtacaggcgcataccgacaatcgtccccagtgcggaggcgacaatattcaccaggttattaccgataagaatgaggctcagcagacgatccggtttctccagcaaccgctcgacacggcgggccgcccggtttccccgcttggcctgatggcgcagccggtagcggttgattgtcatcatcccggtttcggatgcggaaaagtacgctgaaattatcactaataaaataagaataataatcagcgtacttgttgagacgtgctccacagcggtgttcctttcttttgtgatgagcggaaaagggcgttacagagaccggctgttatgcatacagcatcagttcctgaaacagacggtgcccgaaaaatgccagtgtgagaataaaggcaccggcgaagttaaaccagataacccgtttgccgcgccagccttcatgatagtgcccccacagcagcacgatgtagacacaccaggcaaccatcgacagcaatgatttatgaatattatctttatcaaagatgttatccataaacacaatgccggtggcgagtgtcagtgtcagcagaatcacgccgacctgcgtgatatgaaacattttacgctcgataaccattaacggcggcatatccggcgtaaacttaagacgtttgtttttcagctgatgatccatccagccgagctgcatagcatacagtgccgcaataatcagtgtcgcgaagctgagcagcgccagtccgatatgcacaaacagcggcacactggcctgcaggtgggtgataaactcgcccggcatcagggtggcaagaatcaggttgaccatcgagaagctgtaaacaatcgggataaggaaccacgcccggccctgaaacgcgacaatcgtcataatgacggagaccagcaggctgaccaccgaaccgaggttcagcagtgtcaggttctgaccaacgccctgaaaaatctgtgatttaatcgccacgccgtgacacaccagagcgataacggcgaagataagcgccagcttccggtagccgcgctgatagcggagcacgcccggcatcagaaggaccaggcttaacagatatgcgctaattgcaacaacagagatttcaggcatggttttgtgattattcagtcagtaagatgaaacaaaattcatacgtcagtataccgcagcccgcagatcactccaatgattacacgatactttacgtaaatcggttcgctgatttgctgcggtgcgtgttataatcccgggtatcttttctatttttagctcagttttggcagagtcgatgacatgtttgataatttaactgacagactttcgcgcaccttgcgcaatatcagtggtcgcggacgactgacggaagacaatattaaagaaacgctgcgcgaagtgcgcatggcgcttctggaagccgatgttgccctgccggtggtacgggatttcatcaaccgcgtcaaagagcgtgctgtcggccatgaggtgaataaaagcctgacgccggggcaggagttcgtcaaaatcgttcagggcgaactggttgcggcgatgggcgaggaaaacaacgccctggatctctccgcccagccgccggctgtggtgctgatggccggtctgcagggtgcgggtaaaaccaccagtgtggcgaaactcggtaaactgctgaaagaaaaacataagaaaaaagtgctggtggtctctgccgacgtgtaccgcccggcggcgattaaacagttacagacactggcagagacagtgggaatcgaattcttcccgtctgatgtgtcagaaaagccgattgatatcgctaaaaaagcgctgaaacatgcgcagctgcaattctttgatgtcctgctggtggataccgcgggccgtctgcatgtcgatgaaggcatgatgggcgaaatcaaagacctgcatgcggccattaacccggtggaaaccctgttcgtcgtggatgccatgaccggtcaggatgcggcaaacaccgccaaagcctttaacgaagccctgccgctgaccggtgtggtgctgactaaagtcgatggtgatgcgcgcggcggtgcggcactgtctatccgccatatcaccggtaaaccgattaaattcctgggtgtcggggaaaaaaccgatgcactggagccgttccatcctgatcgtgttgcctcccgtattctgggcatgggcgatgtgctgtcactgatcgaagagattgagagcaaagttgaccgcgatcaggcggagaaactggcttccaagctgaaaaaaggtgacgggtttgatctcaacgacttcctggaacagcttaagcagatgcgcaatatgggtggtatggccgggatgctgaccaaactgccgggcatgtctcaggtgccggacgcggtgaaatcgcagatggatgacagcgtgctgaccaaaatggaagcgatgatcaattccatgaccaaaaaagagcgcgtcaaaccggaaattattaaagggtcccgtaagcgtcgtatcgcggcgggttccgggactcaggtgcaggatgtcaaccggctgctcaagcagttcgatgacatgcagcgcatgatgaaaaagatgaagaaagggggcctcgcgaagatgatgcggggcatgaaaggtatgatgccgccgggtatgatggggcggtaaaacaaagaaagtcacaaagaataatcactttggattgattttttcgctaaagtgagtaaacttttcgggctttttctatgacaaccggacgccattcctcgatggggtctggttgtttgtcaattcaatgaggatgttatggtaacaattcgtttagctcgtggcggcgcaaaaaagcgtccgttctaccaaatcgtcgtaaccgacagtcgtaatgcacgtgacggtcgtttcatcgaacgtattggtttcttcaaccctatcgctgccggtaaggctgaaactctgcgcttagatctggaccgtgttgaacactgggttggtctgggtgcgactgtctctgatcgtgttgctgtactgatcaaagacgcaaaaaaagcagcctaatctgtcacggtggtaacaatgagcaagcacactaatccgcaagccccttctgatccgattgtactcggcaaactggggtcatcttacggtattaaagggtggctcagagtgttttcttccaccgaaaatactgaaagtatttttgattatcagccgtggtttatccagcgtaacggggtgtggcaacacatcgaaccggaagactggaaatcccacaatcaggatatgatcgtcaaactcaaaggggttgacgacagagatgcggcaaacgtactgactaacgcggaaatcgtggtagacagttcgcagttaccggaattagacggcgatgattactactggaaagacctgatgggctgccgtgtagtgaccaccggcggatatgatctcggcaccgtaaccgatttaatggaaaccgggtcgaatgatgttctggtgattaaagcaaatctgaaagatgccttcggcatgaaagagcggttagtaccgtttcttgacgggcaggttatcaggaaagttgatctcactgaaaaactgattgaagttgagtgggatcccggtttttaaacctccggtgatggttttgtcattaagtgggacacgaaaatgtggattggggttatcagcctgtttcctgaaatgttcctctcaataaccgggcatggtgtaaccgggcgggcagtaaaaaacggcctgatcagtgtagattgctggaacccgcgtgatttcacgtatgaccggcaccacactgtggacgatcggccctacgggggcggtcccggcatgctgatgatggtggagcctctgcgcaaagctatccatgcagcaaaagctgccgcaggtgacaatgcgaaagtgatttatctttcgccgcagggccgcaaactcgatcaacagggagtttgtgagctggccgccaacgagaaattaattctggtgtgcggccggtatgagggagtagatgaacgcgttatccagactgagattgatgaagaatggtcagtcggggattacgtgctcagcggtggtgaattaccggcgatggtactgattgatgcagtatcgcgttttgtcccgggtgttctcggacatcaggcatcagcaaaagaagattcctttgctgacggtttacttgaccaccctcactatacccgtcctgaagtgttggatggcatgtgtgttccgccggttttactgtcgggcaaccatgcagaaattgatcgctggcgtatgaaacagtcactcggtcgcacctggctcagaagacctgaacttctggaaagcctagctctgactgacgagcaaaggatgttgctggctgaattccaacgggaatatcagtccggagcaacaagttaatccaggtatcctgcgggatatcttttgaaatatcagtttacctagggtaagagatttattatgagcaacattattaaacaacttgaacaagagcagatgaaacaagacgtaccttcattccgtccgggtgacaccgtggaagttaaggtatgggtcgttgaaggttctaaaaaacgtctgcaggcattcgagggcgtggttatcgctatccgtaaccgcggtctgcactctgcattcactgttcgcaagatttctaacggcgaaggtgttgagcgtgtattccagactcactcacctgttgttgacagcatcagcgttaaacgccgtggtgccgttcgtcgtgctaaactgtactacctgcgtgagcgttcaggtaaggcagctcgtattaaagagcgtttgaacgcaaaataatgcgcaagcatccgatatgataataaaaggccagcctcgtgctggccttttttatacgctattttattttcctttcctgcctgttttccgttcgattctctgtattgtttatatgacattaattttttagtgtaaatatatatttacaccaaatctatattccaggctgctccacttttatcggttattttactcgtcataatttttatcagaatattttcttttatatcaatatattgattattaactaaagttagaggagatgattttatttctccggggagaacatcttatttttattttgtaatttaaaatgtacgaaaaattaaatattttacgattttggattgaattatttacgaaggatgttatggtgttttctcagacactcaacacgtaatccattttttgtaaaactcagcaggaaaacactatgatcatgcaaaaagacgcactcaataacgttcacatcagtgatgaaattgttttaatctcaccggaagaactgaaacaaaagtacccattgagtcgcaacgaccagcatgccatcgccggtgcacgtaagacgatcgcggatattgttcatcaccgcgacccgcgtttactggttgtctgtggcccgtgttccgttcatgacacggatgcagcgctggagtatgcccgtcgtctgaaagaattatctgctgagttgagtgacagtctgtatatcgtgatgcgtgtctattttgaaaaaccgcggacaaccgtgggctggaaagggcttatcagtgatccgtttatggatggttctttcgagatggagaaaggcctgcacatcgcccgcaaactgatggtggatttggttcagctcggcctgccgctggccggtgaagcgctggatccgaataacccgcagtacctcggggatctgttcagctggtctgccattggtgcacgtaccaccgaatcacagacacaccgcgaaatggcatccggtctgtccatgccggtcggctttaaaaacgggactgacggcagcctgagcactgccatcaacgccatgaaagctgcgtccatgccacaccgttttatggggatcaaccagtccggtcaggtctgtctgttacagacacagggtaacccgaacggccatgtgatcctgcgcggcggaaaacgcccgaactacagtgcggaagatattacggaatgcgaggcacaaatgaagaaagccggtctcaccccttcactgatggtagactgcagtcacggcaactcggataaagatttccgtcgtcagccgctggtggtggatgccgtggcagaacaaatttgtgccggaaatacctcaattaccggtattatgctggaaagccatattaatgaaggcaatcagtcatcagaacagccgcgcagtgccatgcagtacggcgtatcagtgacagacgcctgcatcagttgggaaaccactgaagcagttctgcgtcagctgcatcagcagatctcaccggcgctggcagagcgtgtggttcagttacagcaggcaggataataaaaacaggcagggtgtatgtccggtgcattaacacatttacgtgatcaaattgatgaagtggataaatcgctgctgtcactgctggcaaaacgcctgcagctagtggcggaagtcggggaagtgaaaagccagcacggcctgccggtctatgcgccggatcgcgaagccgcaatgctggcatcacggcggcaggaggcggaatccctcggggttccgccggatctgatagaggatgtgctgcgccgtatcatgcgggagtcctattcccgtgagaatgataaagggtttaaaaagctcaatgagcaggcccggccgatagtgattgtcggtggtgacggcaaaatggggcagttgttccggcggatgctgacactgtccggttataccgtgcgtattctggacagcggcgactgggcggatgccccggaactgctggcagatgcgggcatggtgattgtcagtgtgcctatccacctgaccgaacaggttattaaacaattaccgccgctgccggaagattgtattctggcggatctcgcgtctgtcaaagcgggtccgctacaggcaatgctggcagtacataacgggccggtgctcgggctgcatccgatgttcgggccggatgtcggcagttttgccaagcaggtggtggccttttgtgacgggcgtttcccggaacggtatcagtggttcctcgaacagattacagtctggggcgcacatttacaggggattaaggcgcaggagcatgatcgcaatatgcgctacatccaggcgctgcgtcacttcaccacctttgcttacgggcgttatctggcaaaagaaaacgtcgatctcgcgcagctgctgtcattgtcatcaccgatttaccggctggaactggttatgattggccgcctgtttgcccaggatccgcagctttatgctgatatcattatggcctcggaagataacctggatgtgatagaggattatcaccgtgagtttggtgaagccatgtcactgctggaaagccgggataaagcagagtttatttcgcagttctccgctgtcagtgactggttcggcgaacatgcgcagcgctttatgaaagagagtcagggattactgcaacaggcgagcgacagccgccgctgagtatcagacacaaaaaagcggatgatatcatccgcttttttatcacaccggtttcaccggataatcaggcgcgatcaaccgggaaagcgatcacatcactgatccgctctgcacccagtgcgagcataatcaggcggtcaatccccagtgccacaccggcacattcagggaaaccgtgttcgagtgctgccagcagattttcatcaatcggctgttccggcagacccatacttgcccgtttgcggttatcccgctcaaagcgctgacgctgctctgcggcatcagtcagttcacggaagccgtttgccagctcaacccctttgtaatacacctcaaagcgctcggccacgcggtgatcttcagagctgatctccgccagtgaggcttggcttgccgggaagtgataaataaaggtcggtttttccagcccgatatgcggctccacacccaccataaacagcaactgcaaaatggtatcgcgatcttcctcggtatcggcaatattgctgacatccagtttggccgcaacttcacgcagtttatctttctcggcggtcagcggatcgatatccaggtagcgcaggaaagcctgctggtaggataacgactctgcactttcacactctaaggtttgctgtaataaatcatcaacctcatttatcagacggtacatatcataatgaggacgataccattcgagcatagtgaactccggattatgatagcgtccggcttcctcgttacgataactgcggcccatctgataaatggggccgctgcccgctgccagtaaccgtttcatgtggtattccggactggtcatcagataaagcgttattccctgtgcggctccggggccggtaaactgagtttcaaaggcgcgcagatggacatcggtgacggtcgcctgactcatggtcggcgtttcgacttctaatacacctctgtctgcaaaaaaatgtctgatttcattaacaatttttgcgcgttttaatagattggctatcggggcagtcggctgccagcccgcaatatcactcatgccgtaagaactccgaataaaaataaagggtgcagtttacccgcaacctctgatggtgacaaacagatatgcagaacatgctacgtgtaaaacagtactctgaacaggcgtattgtgcggcggcggggcgcggcagcaccccgggcagggataatcagccgattaaggcaggcgggacatgttcccccggataactgccgagcaccttcaccgaacgggcgattgcctgtaacgctttgagcgcctgctgcatcggtactgaacgcaggttggcatgcacatcaatataaaacatctcttcccacggcgtgccgtgaatagggcgggattccagtttgctcatcacaatgtcatgctctttcaggataatcagggcatcgaccaatgcaccggcctgttgtccggtcgccatcagcaaagtggttttcgccggtacctgctctgacacatcaatcggctggcgggcaattacaataaagcgcgtcatattggtctgctgattggcaagattctgtgcgatcgcctgtaacccgtacagcgcgccgccggcctcactgccgagagccgcaacatctgtccggttgagagcggccactttttccattgccgccgcggtactttcgcagtattcaattttgtgatccgagaactgactgagatactggctgcactgctcaaatggctgcggatggctgtaaagagtggtgatcccggcaatatccgcgcccggaatggtcagcagacagtgattcaccggcaggcgcagctcgccgacaatggaaagcggggtggtctgcagcaaatcatagacatcgttgatggcgccggaactggtattttccagcggcagcatcccgtaatcggcctgaccgttttcaaccagctcaaaaatatcacggaatttactgcagctgaactcggtcatatgatcgaaatgacgggcggaatactggcgggcagccacatgtgaataagaccctctcgggccgaggaaggctatccgtgcactgttatccggtgtctgattcaggtgtttttgcagaatcgcctgctgggtcaggacggaatcctcaataatcagctggaacaggcgggtgatataaaatccgtccagtccgtgcggcttacctttgtttatcagcacatccagcagttcacgctcgcggtttttatcgcggatggggcgggtatcctgtaattttgtctgtgcgacagccacggcgagctgccgccgctttgccagcagatccagcaattgtgcatccagctggctgatttgttcccgtatagctaaaagatcattcatatgttgtcctcagaccctgtttcccggcgataaaaaaagcctccgcggagggaggcttttctgtgcgtcttcgttttctttctcacacgacaaaaagcctcattaacagaagcgaaaaaagaaaaagaagaagcggatacggggatacatagtcagtgcgttgtccgttgtgtcatcagatgatagttaatagacctgatgcaacccgttgtgtcaaccaaaaaaaaacgcgcccggagggcgcgcagagacaaaactcaatttattatattttttattctgcggattcttcatcagacacaaggttggcttctttaacactgttatccgcgcggcgcgcttcacctttgtgctgtgctttattcagctgccgttccagtttcgccagtaattcattgatggcggcatacatatcagcgtgtttggcgctggcaactaaatttccattcggtgtgctgatggtggcatcaaccacaaatccctgcggatctttcgcgaggataatgtgcgggttaattaaaggaacctgccacttactcagcttatcgagacggttttcaacatgctcccggattgccggggtgatctccatttgcttactggtgatattcacattcatagtgacctctctttgttacatccgtcttgttgatactcagaatacgttgatggcggcaagaaaaaattgatcgccgtcactaatattttttagttttttcaaaaggttataattttgtgactcaggctgagaatacagaggatacaacttgcgggaaaggactgaatcgtgcattatcgataagttggctgaccgcatattctcagagacgagaaggctgtcggccattttttatgcagtaacataatgataagacaataaaaaagccatccggagatggccttttcaatcagatgagtaaaacggaactcagtcgcgcgggttggcggcaatcagctgtgccacttttccggcttccgccgttaatcccagttcgttataggcattttccatcagcggcagcgcctggcgtgtcgccagtgtgtccggataatcacgcagcattaattcagcacgattaatcaccgcgacatatgccccgcgtttcgtgtagaatttcacaacggccagttcaaaggccgcaaggcgatctttgaggaataccagacgttttgcggagtctgttgcatagatactggtcggataataacgcagtaactggctgaaatcctggaacgccacacgcgcgttctgcgggtcacggtctgcacgatcgataccaaagaaactctgcagcatgttatcatcgagcgcctgagcggtcagaccgcgcatgtacaggacgtaatcgatgttcggatgtgtcgggttcagacgcatgaaacggtcgattgaggccagtgccatctgtaaatcacctgctttatagtaggcgtaaatcagatccagctgaacctgctgcgaatacgggccgaaaggaaaacggttatcgagggtctcaagctgcgtgatggcccctttatagttaccgtcctgtaatttttcctggccgacagtatacagctctgacggtgaggcatccgggagaatttccttgtttccggaacagccggacaacatgaggcttagcgtggcggcggccacgagatatttcatacgtatcatcacgtgttgattatcctctgaatattttttagggagcactccgtacagctcccgctggcgatcacgatacaataccacatagtttaaatgaaacggtgttaccgttcaaaatataactttctgaaacagagacaaacatggctcaagaaatacaacttaccgcaactattaatgaatcacagctcggtcagcgtttagatcaggctttggcggaattgttccctgattattcacgatcacgtataaaagagtggatcttagatgacagggttcaggttaacggccgtcttgtcaacaaaccaaaagaaaaaatgctgggcggggaacagatcagtattgatgcactgattgatgaggacatgcgctttgaaccgcaaaacctgccgctcaatatcgtttatgaagatgatgatatcctggtgattaataaaccgcgtgattttgtggtacacccgggggcaggtaatccggacggcactgtcctgaacgcgctgctgtatcattatcctgatattgccgatgtgccgcgtgcgggtatcgttcaccgcctggataaagataccaccgggctgatggtggtggcaaaaactgtacctgcccagacacggctggtggaatcactgcaactgcgcgaaatcacccgtgaatatgaagcggtggctaatggtcgtatgacggcgggcggtaaagtggaagaaccgatttcccgccacccgaccaaacgtactcatatggccgttaacccgatgggtaaacctgcggtgacacattatcgtgtgatggagcatttccgtgctcacacccgtctgcgtctgcgtctggaaaccggccgtacccaccagatccgtgtgcatatggcacatatcaatcatccgctggtgggtgatcagctctacggcggtcgtccgcgcccgctgaaaggggcaagtgataaattccgcgatgcactgcgtgaatttgaccgccaggctctgcatgccaccatgctgcgtctttaccatccgattaccgggattcagatggagtggcacgcgccgattccggatgatatggtgaaactgattgaagttctcaaagctgatgcacaagagcatcaggatgatatggactggtaaggagtcaccatgaccgcactgattaccccgcaatggccgctgcccgcaggtgtgagagcctgcagttcattacgtacaggcggtgtcagtcagccgccgtttgacagcctcaatctggggctgcatacgggtgattccccggaggacgtcgcccgtaaccgggcgattctggcagaggcggccgggttcccggatacaccactgtggctgaatcaggtacacggaacggatgttgccattctggatgacaacacaccgcgcggcccgcaggccgatgcggtgtatacccgcaccccggggaaagtctgtgcgatcatgacggcggactgcctgccggtactgttctgttcccgtgacgggcgcgaagtggccggtgctcacgccggctggcgcagtttatgcggcggcgtgctggaaaatacagtctcctgctttacggccgcaccggcagatattattgcctggctggggccggccatcggcccgcagaaatttgaggtcggcgcggaagtgcgggaagcgtttatggcgcacgccgcagaagcggcttcggcatttattccgtatggtgataaatatctggcggatatttatcaactggcccgtcagcggctggcagcagccggtgtgactgctgtttacggcggcaccgaatgcaccgtgacagattctgcccgtttcttttcttaccgccgtgatgcccgtaccgggcggatggcgtcatttatctggatcaccccgctgcaaaagtcataaccttcaggattacgcataatatttaatattttttcaaaatctggcttgaatatttgacaaaagtcctcatttagtacttagcgaaaattcaaagccattttttggaggtgttatgcgtttggatcgtttcacgaataaattccagcaagcgctcgccgacgcccagtctcttgcagtcgggcacagcaatcagtttattgaacccgtgcatttactgtcagcatttctgcatcaggaaggcgggtcggtgcgtccgttactggcatctgccggggcggatattgcgcagcttaatcagaagattgatgacaccatcagtcgtttaccgcaggtggaaggttccgccggggatgtgcagccctctcaggatttaatccgtcacctgaatatatgtgaccagattgcacaaaaacaaaatgatgcgtatatcgcatccgaaatttttgttctggctgtattagagagcaacagctcattagcagatgtattaaaagcagccggaattaataaacaaacacttaagaaggctatagacactatgcgtggtggtgagaatgtgaatgaccagggcgcggaagatcaacgccaggccctgaagaaatatacgattgatttaactgagcgcgccgaatccggcaaactcgacccggtcatcggccgtgatgaagagatccgccggactatccaggtcttacagcgcagaaccaaaaacaacccggtactgatcggggagcccggggtgggtaaaaccgccatcgtggaaggattggcgcagcgtatcgtcaacggcgaagtgccggaaggactgaaaaataaacgcgtgctgtctctggatctcggtgcgctgctggccggtgccaaataccgcggtgatttcgaagagcgtctgaaagccgttctgaatgaattatccaaagaagaaggcagtgtcatcctctttattgatgagctgcataccatggtcggtgcaggtaaagcggatggcgcaatggacgccgggaacatgctgaaaccggcactggcccgtggtgaactgcactgtgtgggcgcaaccacactggatgaataccgccagtatatagagaaagatgcggcattagagcgccgtttccagaaagtctatgtggcagagccgacagtggaagataccattgcgattctgcgtggtctgaaagagcggtatgagctgcatcaccatgtgcagataaccgacccggcgattgtcgcggcggcaacgttatcgcaccgctatatcacggatcgtatgttaccggataaagcgattgacctgattgatgaagcaggtgcaagtctgcgtatgcagatggattccaaaccggaatccctcgacagactggatcgccgtatcattcagttaaaactggaacagcaggcactgaaaaaagagtctgatgatgccagtaaaaaacggcttgatatgctggagcaggaattaaccgagaaagagcgcgaatatgcgtctctggaagaagagtggaaagcggagaaagcaacgctgtccggtacccagcacatcaaagcagaactggagcaggcaaaaacagctctggagcaggcgcgccgtaccggtgatctgaccaaaatgtcagaattacagtacggtaaaattcctgagctggaaaaacagctggccgcagccaatgcagcagaagataaagagatgaaactgctgcgtaataaagtcactgatgtggaaatcgctgaaatcctggcgcgctggaccggtattccggtatcccgcatgctggaaggcgagcgtgaaaaactgctgcgcatggagcaggtgatgcacagccgtgtgatcggccaggatgaagcggttgacgcggtagccaatgctatccgccgcagccgtgccggattatctgatccgaatcgtccgattggttcgttcctgttcctcggtccgaccggggtgggtaaaaccgagctgtgtaaagcgctggctgatttcctgttcgacagcgatgacgcgatggtgcgtatcgatatgtccgagtttatggaaaaacactctgtggcacggcttatcggggcacctccgggatatgtcgggtatgaagagggcggttatctgaccgaagcggtccgccgtcgtccttattccgtcattctgctggatgaagtggaaaaagcacatccggatgtcttcaacatcttattacaggtgctggatgacggacggctgactgacgggcagggccgcaccgtggacttccgtaacacggtcgtgattatgacctctaacctggggtctgaccggattcaggagcactttggcgaactgaattacgatgcaatgaaaggcgcggtcatggaagtggtttctcatcacttcagaccggaattcatcaaccgtattgatgaagtggtggtattccatccgctggcgaaagagcagatccacgcgattgcgaaaattcagctcaaacgcctgtacaaacgtctggaagagcacggctatcaggtcacgattactgacagtgcgctggataaactggcggaagccggattcgacccggtattcggggcgcgtccgctgaaacgggctattcagcaggagatcgaaaacccgatggcgcaggcgatgctgtccggcaaactgattccgggcaaaatgatcaccctggatttaaacgatggtgtgatcaccgcgaaacagtaataacagaagaaagcaaaacagaggggcgcgaaagcgccccttttttgtgcataatgcacaggaaatcagcgatatcttgtgtgtttgcccgtctgacttcatctgaacttcgtatgctaaataaaaataactaatatctaaatgagaataaccatgaataaatataaaaagataatcaaaaacacatttcactttgaaaataaaatattctatgctttaacttcttttttattattttccgggcaaaatgcttttgctgcatgggaattaaaaccgggaagccgtcaggatattcccgtaaatgtcacgtcgaattatcccaataaatcaaagacagaagctggcagaaaccaaactgggcaaataacacctttaactacaattaacaaggacgaactatgtgaccggggtctgaatgttggcctgtccagcgataactctgtccgcgggttagttatcgcgcctgatatattgttaacattttcaggggatgcaaaaagctcggtggcaacaccatctttccaggcatcctggacggcgacagatggtaacgtacgttttaatagagaaaactatccttccggccaatatataaccggcattgtaaccgaagggtcattaagctgtatcggcacacttggttattgggtagcaacaaactcaactgccagttttaacgggaaaattactatctatgttggcccgactgctaaattaggaacgtatcagttacccaaattatactggaatgtaatagctgcaactaaacaaaccatatttagtggtggtacacttattgttaataatccccgtgtttgtacagtcagcactgacaacaccattaccttcccggcagcagatattaccgatgctgtcaacgcaaaagcaaaattaccggagcgcgctgctgcaaaaatggctgttcaggctgtacagcagattgtttccaccgcagaagctcttccggttactctgccttttctggcccggataaagcagtttacccgactctcagaccatctgacagattcactggtaatacaggttccgcagctctggtctgtactctccgcaccgccggtaccggatgaaatcaccattacgattatgcagccggttaaaacagaaccggaaaccacagcaccggtgattcccccggagccgccggtcaccatttatccgtctgaaacgattattccggatagtcttatcagtccctctgtaccggataaccatgcagctccgcgcagagagaataaaaatacacgcccggcatcacgcaataccggccgggatctgcgtaccgctccggcgcatcactacacattacaactcagcagtgccgcaacaccagacggcctgtaccagtcagcccggcatcataagttatcaaattaccttgtgtatgaaactgtccgccatggccgccaatggtatgtgctggtttacggtgattatcctgatttgtcatcggcaaaatcagcattacactcactgccatctgccttttataacaataagccctgggtacgcagcctgagacaggttcagcgtgaattaccctgaccggtgataatgccggatttattaccggcattatgacatcgtgcattatttatgcagatgaaggggatgtttcaatatatctctttattttcttgctgatgaacaaaaataaattccggaaataattaaagcaccacttaaaaaatggaaactgtgtaatttttcactgaggaaaagaacaccaaagaaaccaccactcagcgggatcaggtgagagaaaatctcccctcttgttgcgccgatagtcagtatgcctttattccacagcaaatatgagagccatgacgggaaaatcaccagataagcaagcccggatataaacagcggcgaggcataattacctatattactgatctgaaaatcatgtgaaaacagataaataatcagtatcggcaacatcatcaggctgccggtcaccgagctgatggccacaaatgcattacctttcacctcacggggtttcagtcttaaaaaagcacaatataacgcccaactgatagctgatcccagcgcccacaaatctcctttattcagatgactgatcacttctgaaaaattcaggttacctttaaatatcagataaatcacacctgacgtactcaataatacgccgatataatttttcccctgaattttttctttaaacaccagtgcattgatcagtaaaacaattgacggtgttgccgacatataaatggcggcattaagtgccgtagtatattgcaggccgatatacaatgtgacggggaataaaacctgtccgcataacgacagaaacagaattatcccttttgcctttttcataaatgcccactgctgtttcacctgactgaaatacagcgtcatcagtaaaaccgccgtcaccagccagcgcagttgcgataaaatcaccgggtcggcttcagttaccaaaagatgcccgacaacatagttcccgccccagaaacacgccgccagcgttaagaataaataaggcatatcccgctccagcctggtcaatatttatccgaccgtaacatggtggccacaacgcaggcttgttatttatcaaaatagttgtgggttttaaaataatttttaatgagtacgagccggagtggacgctggttctgtgcccggggacgtcgtaatcatattccgcccgctgatttctctgcgggtcatgctgggtaaaccggcctgtgtccggatcataataccggaa

SEQ ID NO: 32 - DNA, 139243 bp, unknown
  Altogen 322075 strain
  misc_feature (25748)..(25794): n is a, c, g, or t
  misc_feature (113275)..(113364): n is a, c, g, or t
  misc_feature (127584)..(127688): n is a, c, g, or t
  misc_feature (131542)..(131542): n is a, c, g, or t
ttccacccggtaaaatccgttttcccggaacagttcgcggacagcgtctccctgccgccagccatgttccacaatcagccacccgccgggtgtcagataatgagcggactgcgcagcgatttccgccagatcggccaggccgttctgcggggcgaccagcgcactgcgcggctcgaaacggacatccccctgcaccagatgctcatcattctcatcaatatatggcgggttactcactatcatagcaaattgatgaatcggcagtgaagcaaaccagcgactttctttaaaggttgtattcgtcagtcccagacgggtggcattgcgctgtgccagcgccaccgcatccggctgaatatccgccccggtcacatggcaatccggccgttcagaggccagtgccagcgcaatcgcaccggtgccggtaccgagatccagaatatcgcaggatgctgccggtaacaattccagcgccgcttccaccagacattcggtgtccggacgcggaataagtgtggcgggagatacttccagcggcagtgaccagaactcacgcacaccggtgatatacgccaccggctcgccctgctcccggcggacaagcagcgcttcaagacgctgctgttcatccccgctgagcggggtttcatcaaaagcaataatgtagctgcgggtgcggccggtgacaaacgtcagcagaatttccgcatcccgtttcgggctgtcgctgtgacttaaacggctgacagcctcagccagccagctccggaacgtcatcagtcctgctcagacagcgcggcgagctgatctgcctgatattcgttcaccagcggctggatcagtgcatccagcttaccttccattacctcatccagacggtacagtgtcaggttgatacggtgatccgtcacccgtccctgcgggaagttataggtgcggatccggtccgaacgatcaccggaacccagcaggttgcggcgctcagaggcttccgcctcatgacggcgggactcttccgccgctttgatacgcgcggccagcaccgagagtgctttggctttgtttttgtgctgcgaacgctcgtcctgacactccaccacaattccggtcggaatatgggtgatacggatagcggaatccgtggggttaacgtgctgaccaccggccccggatgagcggaaggtatcaatacgcagatccgccgggttgatatccggcagttccgcttccggtacttctgccagtaccgcgacagtacaggcggaagtgtgaatacggccctgagattcggtttccggcacacgctgcacgcggtgaccgccggattcaaatttcaggttaccgtaggcattctcgccggtgactctgaaaatgatttctttatatccgccgtgctcgccgtcgttactgttcataatctcaatccgccagcggcgtgattccgcataacggctgtacatacggaacagatcaccggcaaacagcgccgcttcatcaccgccggtgcccgcacggacttccaggaagcagttgcgttcatcatccggatctttcggcagtaataagacctgtaattcctgttctaaggtttcattccgcagttttgcgtctttcagctcttcctgtgccatttccttcatttcaggatcatcaagaagcatttgggcggtgtcgatatcatcctgaatggtctgccaggcttcaaaacatttcgcaacgtcagtcagctgcgcatattctttcgacaaggcacggaatttattctgatcagcgataacatcggcgtccgcaaggtgcgcctgaatttcttcataacgttctttcaatgcttccagttttgcgacaatagaaggcttcattcgtagtctgctaccttaaaaaatatatagaggaagttaatgatgctccagccccaggctgtcgcgtaacagagtcagacgaccggtatcaccgtcaccggcggcctgctgaagtgatttggttggtgcgtggatcaggcggttggtcagctgctgagacatctggttgataacctcttccgggtcatgcccctgctgaatcagtgccacggcttttgcggccatggcggcgcggatctcttcggcctgttcgcggtattcgcggatcgtattgaccgcgctctgggcgcgcagccattccataaagtgcccgctttcctgcaccacaatggattccgcctgttgtgccgccacctggcgctgtgccaggttgtgctcaataatcgcctcaagatcatccacagtgtagagatagacgttactgagtttttccacatcggcttcgatatcgcggggaaccgcaatatccaccagcagcatcgggcggttacgccgcgctttcagggcgcgttccaccatacctttaccgataatcggcaacgggctggccgtggagctgataacgatatccgcctccgccagccggctgtcgatttccggcagtgtgatcacctctgcattgacttcctgcgccagcacgcgggcccgctcacgggtacggttggcgatcatcatgtgttttacgccgtgctcgttcaggtgacgggccaccagttcgatggtttcccccgccccgaccagcaggatattcagtctggataaggattcgaaaatctgacgcgccagggtacaggcggcaaacgccaccgataccgcattggcaccgatatcggtttcagtgcgcacccgtttggcgacagagaaagatttctggaacagacgttccagttcacgggagagtgaacgatatgtctgcgactgcgcaaaggcttttttgacctgccccaggatctgcggctcgccgagtaccagggaatccagcccgcttgccacccgcatcagatgactgacagcttcattatcctgatgccagtaaaggctggacatcagttcctgcgggttgatgttgtgatagcggcacagccagtcaatcagttgatcgcgctgatcgttctgttcatccacactgagatagatttctgtccggttgcaggtagacagcacaacgccgccgctcacggacggttgttcgagcagattggttaatgccgcttccatgctgtccggtgagaaagtcactttctcacgtaaggcaacaggtgcggttttatggttaatgccgagagctaatagagtcatatcctgcaatacagaccggggtaagtgtgtaaaataccggttaagtataccggaaatcaacacccttactaaggataactgcatgcattttagcagccgatcccgcgcaattaaagcgttaaacgggaaacagtgataataagcacgtaatgcggtgcgcaacaggccgtgtcagccgggcggataattgcgtaaatcagcgtaagagaggtaggaaacagccactgaaacaggcacaatactgttattgcttttataagttgttaaaggaaattacaacgtggcctctattcaattaccgcgctttatccggcttctgcccctgtgcagcctgatacttgccgcctgtaccctgcccgacaatacagagaaaggcgatgtttccgccacctctgccggctggaaagcacagacagaacagataaatcagttacagcgttatcagacgcgcggctcttttgcctacatcggtaccacccagaaaacctatgcccgtttcttctggcagcagtattccccggacaactacaaactgctgctcaccaacccggtcggcagcaccgagctggaactgattgtcaaagacggccagacccaactgaccgacaacaaaggtcagaaatattacagtgatgatccggacagcatgatttaccagctgaccggtatgaccatcccgatggaaaatctgcgtcagtggattgtcggcctgccgggtgacgcgcagtcctatgccatcagcaatcagtatcacctgaaagcactgagctgggcacagggcatggaaaagtggaatgtcacttatcagtcctatgatgagaaagtctccccgcaactgccgaaccgcctggatatcgagcagggtgataaccgcatcaagctgaaaatggattcatggacactcaactgacatcactgacctggccgtcccccgccaagctgaacctgtttttgtatatcacaggccgccgcgcggacggctatcacacactgcaaaccctgtttcagtttctggattatggtgacagtgtcacaatcacaccgcgtaccgacggtgaaattcgtctgctgaccccgcttgacggcgtaccggatgagcaaaatctggtgatccgtgccgcccgcctgttacagaactatgcccgtgagcatcagctgacagcagatttacccggtgcggatattgccgttgaaaaaattctgccgatgggtggcggtatcggtggcggttcctccaatgcggccacagtacttatcgcccttaactatcactggcagttacagttatccgacgatacgcttgcagaactgggcgtgaccctcggtgcggatgtcccggtatttgtccgggggcacgcggcaattgctgaaggaataggcgaaattctgcaccctgcgtctccgccggagcgctggtatctggttgcacaccccggaatttcggttccgacaccgcttatcttcacagatccgcaattaattcgcgacacgccgatccgctctctggccgcattattacaggctccgtacgcaaatgactgtgaaccgattgcaagaaaacgttttcgtgaggttgatgaacttctttcctggctgctacaatatactccgtcacgcctgaccggtacgggtgcatgtgtgttcggagagttcgaaaaccaggcagccgcccgacaggtgttaattaacgcgccggcgtgggtgaagggctttgtggcacgtggtgtcaacatttcgccgcttcatcagttccgcgctggtctactgtaattgcccctgattccgtccccggacgctttcaggttcacaattcaatctctctggacgcatgcctgaggtttttctcgtgcctgatatgaagctttttgctggtaacgccatcccggaactagcacaacgtgttgccaaccgcctgtacactaacctcggagacgctgcgatcggtcgtttcagcgacggtgaagtcagtgttcaaatcaatgaaaacgtgcgtggtggtgatgttttcatcatccagtccacctgtgcgccgaccaacgataacctgatggaactggttgtcatggttgatgcactgcgccgtgcttctgcgggtcgtatcactgctgttatcccgtatttcggctatgcccgtcaggatcgccgcgtccgctccacgcgtgtgccaatcaccgcgaaagtggtcgctgacttcctctcaagtgtgggtgttgaccgtgtgctgacagtggatcttcacgctgagcagattcagggcttcttcgatgtcccggttgataacgtcttcggcagcccgattctgctggaagatatgctgcagaaagatctggacaacccgattgtggtttctccggatatcggtggtgtggtccgtgcccgtgcgatcgccaaactgctgaacgacactgatatggctatcatcgacaaacgccgcccgcgtgcgaacgtttctcaggtgatgcatatcatcggtgatgttgccggtcgtgactgtgtactggttgacgatatgatcgataccgggggcacgctgtgcaaagctgcggaagcactgaaagaacgtggtgcgaaacgtgtgtttgcatacgcaactcaccctatcttctccggcaacgcggtcaacaatatccgtgattctgtgattgatgaagtgattgtctgtgacaccattccgttatcagcggaaatcaaagcactgaataaagtccgttctctgactttatccggaatgctggcagaagccatccgccgtatcagtaatgaagagtctatctccgcgatgttcgaacactgatttcataatcagtatacacattgcgtgcttaaacccgttgtgaagacaacgggttttttgttggcaggcattttaaccgttaacgatagtatttcgtttacggcatccggcggcggtagcggctgtggaaatgacgcagccagtaatatctgtccgcaatggattcacgacgcccgctcagaccggctccgcccagccacaccagggcaccgataaagatccccatcagggaggcttcggaataaatatccggcaaagggagtgcgaaaataaggacactgacagtaaaggccatactgccgaccatcaacagcataccgacaaccatcagcaggttaccgagcaataaggataatttacgtttcatagggacctccgccactcttttgtctgctaacaactcaaagcacgaaagtaggaattccttcttgacatggattatagcccgaattggtatgtatatgttgcgtatgagatcacatagaccaaaaataaaactttttatttggcttattgtgccaaaaagcgaaacttaataattcatcgctaaattattgcacaaatagccacatccgtccgggaaggacgtttcttttgtactccgcgcgggtgacgggtagaataaccctctttgcagtcaaaacctgcctgaacaacaagtgatacaagtgtgagtcagataaaattaattgtggggctggccaaccccggtgcggaatacgcccaaacccgccacaatgccggtgcctggtatgtggatgaactggcccgccgttataatcagtcattaaaatcagaaagtaagttttacggttataccgcgcgtctgaatattcaggggaatgatgtccgcctgctggtaccgactacctttatgaacctgagcggcaaagcagtcggtgccctcgccggtttttaccagattgccccggatgaaattctggtggcacatgatgaactggatctcccgcccggcgtggcaaaaatgaagctcggcggcggcaatggcggtcacaacggcctgaaagatatccagagcaaattgggtaacaacccgaactttcatcgtctgcgtatcggtatcggccatccgggtgataaaagcaaagttgtcggctttgtgctgggcaagccccttgcctccgaacagcaactgattgatgagaccatcgatgaagccgtgcgctgcaccgatgtgctgatgaaagacggcatggcaaaagccatttcgcgtcttcatacatttaaagccggtcagtgagccgcaggtatcgtctgtttatccgtaaccgtgtataatcggcggcaattatttaacgtgcttgcaggccgttttggtctgctgtcatttttaaggtgaagaatttatgggtttcaaatgtggtatcgtcggtctgccgaacgtcgggaaatcaacgctgtttaacgcgctgaccaaagcaggtattgaagcggcgaactttccgttctgtacaattgagccgaacaccggcgtggtgccgatgccggatgcccgtctggatgcactggcggaaatcgtaaaaccacaacgtattctgccgaccaccatggaattcgtcgatatcgccggtctggtgaaaggcgcctccaaaggtgaaggtctgggtaaccagttcctgaccaacatccgcgaaacagaagctatcggccacgttgtccgctgctttgacgatgataacattgttcacgtttccggccgtgttaacccggcagaagatattgataccatcaataccgaactggcgctggctgacctcgacacctgtgaacgtgctatccaccgtgtgcagaaacgcgccaaaggcggtgataaagacgcgaaactggagctggaagtgctggaaaaatgcctgccgctgctggaaaacgcacagatgctgcgcacgctgaacctgaataaagaagaaatgggcgcgatccgctacctgagcttccttaccctgaaaccaaccatgtacattgccaatgtccatgaagatggctttgagaacaacccgtatctggatcaggtacgtgaaatcgcagagaaagaaggttcagtagtggtgccggtatgtgcggcaattgaatccgacatcgctgagctggaagatggtgaccgcgaagagtttatggctgacctcggtatcgaagaaccgggcctgaaccgtgtgatccgcgccggttacgccctgctcaacctgcagacctatttcaccgccggtgtgaaagaagtccgtgcatggaccatccctgtcggcgcaaccgccccgcaggcagccggtaaaattcacaccgactttgaaaaaggctttatccgcgcccagaccatcgcatttgaggatttcatccagtacaaaggcgaacaaggggcaaaagaagccggtaaaatgcgcgcagaaggcaaagattacattgtgaaagacggcgacgtgctgaatttcctgtttaatgtgtaactactgatagttgcatctgcatatctgcaatagcccatattaatatatgggctatttttttaaagaatatctccctgtatcttcattctggttttgcccacttccctttatctgaaacaatcctgattagagttttccagttgctttcggtaaagctcagacggaaggttatagtaaaatttatcaagagtagagaacctgtcaatttgagtttttgcattatttctatagatggtaaacatacgttagccgcagcttcaactgcatagttaattgaaagaatgctagatttagcaagcgtctttttgacatgtgatttttgtgccaaagctgataactcacaatgagttattgcatcagaaaatatttcgaataaactatttttggttatttctaccgttcttttcacaagccatctttttcatcatttagaaataatcgatagtcaatatgctgtgttctgtacattccacactttgattgacatcaatgactatcgagaataggaactcggtttaggaaaaccacctctgacgacgatgacaactatcgcaatctgcgtttgacctgttgggtgaatgaataccttaatatcatcttctatcactccaactggtgctgactttgacgaagactcaagcacagataaaataccgatacgcttacccaacccaatggcataagccgctgtttgatcgaaatatttttggaaatcactagggaaaagaactttattattttctacttttagttctatcggaatgtctttgaatgtaagatccgttatcccagctgcagcttccggatggccttgtaagttttcaccgatatcattcctacttctaagcatttcagcgattttactctgaaatttttgttctgatgtgccagcaacaaataaaccagctttaacagcttgcgctgcaatatttcctaagccgccaagtataatcattgtattggcaatatcatctgagtgtaatccaggaaaagctcttaatatgttgcgaatttttataagatgcctgtcaacatttgaaaaaccagttaagggtgcttgggttgaatcactcccttcaagtagtaagcgcctatgtccaacgataacaacatttttacaatcacttaagttatcaaactctgcagcatataggaattcatagggtcttgagccaaatgaatttgccacctccaaaacaatacgaccaatccccttcaatatgaaaggtccatcaccttctggtttttcaaatctaaaatcaggtagccagcctcgctcacgaatatcaattgtcacagcctttaatgagagaaaatttgcgctcttgggccaatttgaaaccctgacctcaatattaaggtcataagacgtacctggcttaagataattccattgtttagctggtgctccatcaatatcaaatttcagaaatgctactgttgattctagttttttattatcttctgtaccttcattagatatccgttgccgaatcctcccaacatctttattacgaatatttgcgaataagagaagaggcaaggaccattttgttaactggtcttgtattgtattcaatgaatctaatgtattgattaattgtacttgctctataaattcattaagttgtttattgtttgagaaattcgataccatatcgacctctgatgctttcaattttgctgagtttaaaaatctttgagcatccacctctgcattacgtatggcacatttccattcagctaaagatacaaatatcgttactgctgtgtaatatgctcgatactgaccttctacatatccttgacctagctcatcgatagtctcattaaacttttgacacgcatctttaagtttcgccaagtcatggggaatggatctgagtgcctcatctaacgctgctacgatctcaattctctgagaaaaagcttggcggaaaatttcgaagtttggctcgctctgcattctctttctccaaatcagttgttaggccattccatttttcaattaattcagcatagggttcacaaacgcctatgtaatgttcgatacgagcagcttctgtaactaaagcagccttaagtttccactgtatattcctgtcatctttcggaatttcttctagtaattccttgaaacaagcagttgcagttgcattatcaccaaacttgcttaacgcagtcacgtacactaaagcctcaatgaattgttgaggcttaaacggtttcagagcgttaaatgctttttgaaggtcttctttacaatttcgaagctcatcatgtggcgctcttaagatcactgagatgcagccatcaattgaaatactgcgagtatactcatcctgaattgctttgagtgctactttgacaaaaccgggaacatcatcaaaataatagcgtaatcgattgatagcatcataaagtgcactacctttcaggcttaataagatatttgaaagaagtaatccaatttgtccctttctttcttcatctgataagcaaagcgacgcaaatacatcaatgcactctacaacgaagtcgtcttgtttatctggttgcgcataatgacaaattagattccatagtctgtctctcacaagcctccgtttctcatcaggaaacgatctacggcttagagaacgaacagcatacttatgaaccattacatattgatctaataacaaaactgaatatgcttcaaagaataaatcaggaaaattcttcaccaaatcatagggaacatcttcccacgcttgcacggcacgagctcgaattaatgtactctcatccataagagcacggtaccagtcggaaagcacttgcgttaagctttcaacaccagtcaataatttagaaacatgagtaatcatgttaccacgcatttgcgtttgttctttgggcaaacttctatagagattcagaaaatcttcgattccttcacatcctctagatttggctccaatcgcagcccattcaatcaatgccccctgtaagccatcaatagcattacgcttattacttttatctaaatgatctaaaaatctctcttttatttctagaattttttctttatctagctcctcatatttttcacttaacgttgcagccgctccgatcagatcatcaaaattatcaactgcaagctcagcaaattcatcccaagagtgtctaaagaattgtcctgcatcatccataccatcctctggattttctacagctgcccagagtaatcgcctaaaggctattttttgtgtttttcctattccacctttttttctgtagttgtgcctcagtacagatctgtaagctctgtaagcctcatttcttccaatattatctttatcagcaagatatgcctgaatagctttatcactttcttcgggaaatcgatctaaacatttcgtagctgcttcccgaagatagtaaagaacactactatcccgccgctcctctggaagtaaagtccgtctacgcatcaacttagcaaatatacttctaatatgacttaaaagcagttcatcactatctgttgcaagaataatttcaacggcagcttggatctttccccgatgattatcttttatgtattcgttaactacatcgaagatatcagcctgtctttttttaaatagtgactggataggagctttattaatttcattttgctcaaatgtatcaaacatcattccaggtggagattcaatagccattctgacaaagtggtaaaggacattaatgaaatcattttcagatagattttctacttctaagaggatcacttctataatagatggaaaatattcgtggttgtttactaaatatactgcaattgccagtttttccgtttgtgacaatgatgtttttattaaggcttttgcagctggagttgaatatggtaatttctcatgtaacactgcaggcaacagatgttcaattattttcttcgtaaatgtctctggagcaagattagcaagttgttccagacggggatcgtctccctctatatcttcttgatcgagttcatcaagcaaatcaagtacaaacgtttcttctagggtaagtgcaagccgcaataccgcccgctcctgttgcctgttaagctgcttctgcttcctctgcctttctccttctttacgagccaaacttcgttcttcatctgctttttctatcgggccaacaaattctaaaatattaggaaatcccaccgggacccgtcgattacaatccttgcaattctctttatagaagctgtaaactgagtcttccagcaaccaactaagcattgagttttgcttaacaaacttgcattggactcccatatgaccaataggtaatcctgtctctgcctcaatcatccctcgcccccctgaacgaatgaattcagagtgggaacaccaattactaagtagctttacagcacgaagatttcgttgaccagcttcaatggcctcttcaaatctttttttatcttcaaaatcgtccatttagagaatacctttaaaaggaacatttaccaacctagtctagtgtaaatatagtcattataccgagattaatattctaaattattaataaacatactcataatcaatttccgcatgatgcttatagacactgtcctttttatctttctcacttttaattaactccgttatatcgcgttctgcacgcgtgcatctgccgaatttattccactctttacatgtcgtcacggttgtttcggttgtgaaaaatgtctgaatcattgtactgcctgattctttaccatcctccgtataggtatattcttccgttgtggaatctgactgattccgtattaagcggtctttgtcatcataaaaatagcgtgtatttgagctgtcatttggttgtgtactgactctgtccgattttgacagccgtcctttatcatcacttaaaaagcgggtctccgctttgaatttcatacgctcaccactgagcgtggcataagacgtatcttctgattttgttattttcccgtttttgccggtcagaaattttccgtgcattctctgtgtcatcagtatgttatcaacaccatgccgatcaatatcagacagtttaaatgtcatattataacgccagccttcatcctttttatttatcctgatattaaaggcattgacgataatcttctcttttatgcgggatttaacgaccttgctgttttccagcatcagcaacctgccacaatcatcaaattttacatacgcattactctcgatatagtcatcgctgctttttatatgcattttcatttctttcacggaatcgttaaaaggctgttcctgagtgaaaataaaattattaaatgcgttaatggcagccgtttctgctgaacagttattttcaccggcatacacattataagaaaaggcgcacatcaggcttaacagtgataattttctcaacgtacagactcccggcaacggaataaatggttaatatgtacggattatagattgatggcggctgactgcaagatgtattcctactcatctccccctatatccttcccggtatattctcctgtattctcagtacttcctttcggatactcaggagcgtcatatggctttttctgaagaaacccaatccattatcaattcaattctgccggccatccgcgaattagcggatttgctcaacagcgactgtgattatgcggacgatgcctgcgatacctttgccggacaactgaatgagcacattgaggaaatgggcgaggatgaattctgtcagtatcacaatgacggtatgaccggctatgccctggcggaaattgtggataacagcgctatcggcaatagttttatggtggactggaaagacagggaatccgctgttgcgctgctggcggatgcaatggattatgaggacatttcactgacctttgattatggcacggacgacccggaaaataatcttgccgtacatcagatttttgtccgcagtaatctgcagctgaataccatcggctggtatttactcggttttgaaaccggtgctgataattaccgtgaaattttattgcccgcttctctgctggatgaatttctggatattatgaacatattgggtgtggaaattgatatgaacgacgaagagtgtgccgaattttaatcatattctttacccggcatgcactcccggattattgcttcacaaatatttgacccgggtaaaagatattatttttcactgcggtacattgaccctgtacttaataggttctattagtcaggagataacatctccataacggagtcatataatgtccgcaacaaaaataattatcatcatttccggtattattatagggatcagtgctgtactccttggtatatacggaaacccgccaaatatgggtgtttgtgtcgcttgttttatccgggatagtgcaggcagtatgggattgcataataccgaaaccgtccagtatcttcgtcctgaaatttttggttttattctcggttcattcggggctgcggttatttttaaagagtttcagtccaaagccggttctgcaccggtgatccgctttacactcggttttctgatgatggccggttgtctggtttttttaggatgtccgctgcggatgatcctgcggattggtgccggtgatttaaatgcggttgtcgggttattcggcctggtcgccggtattggtatcggtagtctgtttattaaaaaagggttttcattaccgcgtaattatcagcagtctgccgctgaaggtttaatattaccggcggtgtgtctggtcttatttgtgctgtttattatcgacagttccattttcaaatccagtgtcaaagggcctggggccgctcatgcgccggtctggatggcgataaccgccgggcttattatcggggtgattattcagcgcacccgtttctgttttatcggtatggctaaaaatatcttcctgtcccgcaattacacgatggcaatcggtgttctcgccctgctgctggttgttattgccggtaatatgctcaccggaaaaatcaatatcggctttgataatcagccgattgcccataatgacgggctgtggaatttcctctccatgtcactggtcggattatgcggtgtctttattaccggctgcccgctgcggcaattggccaatgccggacagggtaataccgatgcggctgtcagtgtgctgggaatgctgaccggcgcggcttttgcccataatttttcctatgcctcaagccctgccggtgtgactgaaaacggtaaactggttgttattattggcctggtactgaccattgccgtcggtattatttatacccggcttgccaataaaaaatccggagctgagaatgccgcataactatctgtttctgtttcatgtgcagcacggattaaaaaaactgaaaatccgtttgcaggaagattccgtggcatcatccgttattgatgcaccgcgcagaatcaccacggaatgtgaaacagcactggctgcgcaattttccgctgaaaatgattatctgaagtatgccggtgaaaatgtccgtgaaatctggcggacggacggttcggattatcagcgggtatggcgcagtgagaccgcgtaataacgtgtttacaggctcacttttttaacttctgtttcatccggaaccagaatccggccttcctgagaaaccggcaccattgcagccagtggtttgccggtttctttttccaccagcaatgaatgcggttcatcctgcccgaaaaggtgcatttccccccactgtctcagcgccacaatcaccgggaaaagatgtttcccttcctccgtcagtacatattcctgataggccgttccgtctgaggcatctttcatttccagaatgccggcactgagtaatttacgcagtctgtcagacaaaatattccgcgcaatgcctgagttccgctgaaaatcaccaaaacgccggatcccgtcaaaagcatcacggacaatcagtaatgaccagcggtcaccaatcaaatctgcgctgcgggcgacagggcatggtgttttatgaccggatttatctgcagacatgacgtctcctttttattcggatattctggttgcattttaaaactacattacctatgattcaaccagtttcaaaatgcaaccgatttgagaggggatatgaagaacatcggtaccgtacctgtcccggctgtaaatgccggtattacacatacgccattacccggcagtcttgtctggctgtttgctgcggcaagcggactgagtgtggctaacgtctattatgcacagcctctgctggatgcacttgcccgtgattttgccatcagccatgcggctgtcggcggcgtaattaccgccacacaaatcggcagtgctctggcactgttactgctggttccgctcggggacaaaaccgatcgccgtaacctgatgacctttcagttggcggcattaattctggctcttttcattgtcggcctggcggcaccccccgccgtactcctcggcagcatgctggctgtcggtatgctgggcaccgcaatgacacaggggcttatcgcttatgctgccggtgttgcggggccgggtgaacagggacgggtggtcggtgccgcacaaggcggtgtctttaccgggctgttgctggcgagagtgttttccggtgcagtcagtgatttggccggctggcgcggcgtatatatcagctctgcaatcatgatgctgcttattttgctgcctctgcgcaaacccctgccccgcagggcggttacacaagccacagggagttaccggcaactgatagtctcaatggtctcattgctgaaagagcaaaaagtactgcaaatcagggggatcctcgcatttctgatgtttgcggcatttaatatattctggagtgcccttgtcattccgctgagcgctgcgccctattctttttctcacaccgctatcggggcttttggtctcgccggtgcaatcggtgccattgccgcctcaaacgccggaaagcaggccgaccgcggatacgggcagcgcaccagttttatcgcgctgatactgctgattgccgcctggctgcccatttcatttatgggctggtcattgtgggcgctgattgccggaattttattgctggatgcgggcggtcagtctctgcatgtcaccagccagagtatgattttccggacgggatctgaagctcacagccgtctgaccagtctttatatgatgttttatgctgccggaagcggtctcggcgcaatcagcgctaccatgatgtatgcttatgcgggctggaatggtgtctgtctgctgggcgcatccgtcagtttgctggcattactcttctggcgggctacacttaatattgccggatgagacaacctgctgattatcagctgaaaacaatttacaaccggccgcgatcagttcactatcaggaactaagtattatctgctatttattttggaaaaaccggtggtcgctctgtgatatcaacccgttcccgagtcattatccatctgagcagttttctgatagtgatttacagcctgacactgctattaccgatgctggttgcgcttattgcgcaggagcaaagttttttcgcgtttgccggcagtttcctgattttctttcctgccgggttagtgtgctggtaccgcagtaaaaccaccggcctgcaattacagacacgggacggctttctggtcattgcggtattctggctgttattttctgttatcagcgccatgccgttctggctggatgatcacctgaacatggcctttgaggatgccttatttgaaggtgtttccggtattaccaccaccggcgcctcggtatttcacaatgtcaccgatttgccccgctcggttttatattaccgcgcccagcttaattttatcggcggtctgggtgttattgtcctggcggtggcgatatttccgctgctgggtatcggggggatgcgtttatatcagtccgaaatgccgggcccgtttaaagatgagaaattaacaccccgcttagccagctccgcccgcaatttgtggttcacctatttattactgggattctgctgcacagttgcttttaaactggccggaatgacctggtttgatgccttatgccatggactgtctaccgtctctctcggcgggttttccacttacagcgaaagtatcggctattttaacagctccgcaattgaattagtggcaggcgctttttcattattatccgccgtcaactttaccctttattttgtggcgctggcaaaacgcagcctgaagcccttattcagtaatacggaattgcgtttctattttgccgtggcagcattgattatcgggctggtcttttttgaagtgtggcgggcaaatatgtattcgtccgcagaagaatcctttgtccatgcttttttcctcaccagctccatgctgacggataacgggcttgccaccggtgattatgcacagtggccgtctcatattattgttctcttattatttgccagttttttcggtggttgtgtcggctccacctgcggcggaataaaagcgatccggtttttaattctctccaaacagagctggcgggaagtctattccctgatccacccgaaagcacaaaccctgatcaaagtcggtgataccgttgtgcagcaccggctgattaattccgtcctgagctttttcttcctttatgttatttgcacctgcttttttatctggtgccttaatctgatggggtacgatttaatgacctcatttgccagtgtcgccgcctgtattaataatatggggctgggattcgggttaacagcccccgggttcggagagatctctccggcggcaaaatacctgctctgttttgctatgttattaggccgtctggagatatataccctgctggtgctgttatcggtcagtttctggcgtaactggccgtagttcacatcacattccggacgcaaacacattggttttccctgtattattgattaccgtgatcggtagtcaaaataagaaacaaggaaagccgtatgtcttcgtccgataatatcctccgcaaaatcaccacccttctggataatcaccacgcccgttatgaaatcatgagccatgatgcgctcgggtttacctctgatgaggtggctcaggtgcgcggtgttgaactggggcaatgctccaaagccgtggtgttaaaagtgaaaggcaatggcgtgaagaaaaatgtgctggcggtattgcccggggatgaaaaaattgacggcgaaaaactggccggttttttcggtgcgaaaaagatttcctttgccactgctgaacaggtgaaagcactgactgactgtatccccggggcactggcaccctttacttttaacccggaactggagctggtgattgacccggttctgtttgaacgctacaccgatatcgccttcaatgccggaacactgacagaaaccattgtgctgaatgcagaggattaccggacgattgtgaaaccacaggagttcagttttattctgtgatacgtttcaacaaccgccggggaaaattacagtaaaatcaaataataagtaaatcacgtcagttgtttgtgttgttttatttcagaatcaatatcacctgctgattttattttgtgatttaaatcacattaaaatgaaacgatatttattgttacatcacaaacaatcggttcagcgcgattttatcgtaagtcataagtatttttacaaatgtcaatgaaaatactttccgtatggcaataataaaacgcattaattgtttttatttgtggtttattttgttaattttatgtttcattgatatggtttcatgtaatttaattacaaccaccaccaaatgaaacaatttagcatcaaattaataacgcattcatatcaataatgggcatagatcacatttttcagttcttcctcccctttttatcatccctgctcctatagtcaggcttctatttggtctccctgcaacactctctgtatccatataaaaagggttattaccgatgaagaaatcattttttaaagttgcggcattatctgttgcactcttttccgccagcgtcatggcaaaagaatacgaaatcgtcaacgtcgtcaaagtctccgggattccgtggtttaaccagatggataaaggggttcagcaggcggcaaaagatctgggcgtcaatgcttaccaggtcgggccttccacgccggatccggctcagcaggtaaaaatcattgaagacctgattgccaaaaaagttgatgccatcaccgtggtaccgaatgatgtgactgttcttgagccggtctttaagaaagcccgcgaacagggaattattgtgctgactcacgaagcgccggacggccataacgccgactgggatatcgaaaccatcgataacgatgcttatgccaaagcaaccatggatgagctggcgaaaaacatgggcggcaaaggcggctatgtgatttatgtcggttccctgaccgttcctctgcacaacaactgggcaaacctggcggttgagtatcagaagaaaacctatccggaaatgtttgaagtgaccagccgtatgccggttgccgaaagcatcgatgcctctttcgcggcgaccaatgacctgatgaaagcccatcctgaaatgaaagggattgtttcttacggttcactgggcctgattggtgccggtgaggccatcaagaaaaaacgtgcgaaaaacaaaatcagcaccgcgggtatcctgatgccggcacaggctgcaccgtatctgaaaggcggcgaaatcaagaaaggtttcctgtggaacccggctgatgcgggttacgcactggtgtctgtctccaaagatatgctggacggcaaaaaagtaactgacggtgtggaagtcaaagatctgggtaaagctgaaatcgatactcagaaacaggtgataaaattcaataaaatcctggaagttgacggcaataacgccacctcgctcggtttctgatccttctttattttttgttaaaaagggcagcatccgtgctgccctgtcatgggctggtatatgtcaaaagacgcactgattaccttaaaacaggtttccaaacacttcggctccgtcattgcactcgataatataaatctgacgtttaaccggggtgaggttcattgtctcgccggcaagaatggctgcggcaaaagtaccttattcaaggtgatctccggggttcatccgccggaaaagggcgcagaaattattattaacgggcagagctacaacaggttaaccccgcagcaatctattgagcagggtatccaggtgatttaccaggatctctcgctctttcctaacctgaccgttgctgaaaacattgtgattcaggaacatgttaagtggtacaaagggctggctaaccgccgccgccagatgaaacaggcgcaggaaattatcagccgtattggcttgtccctgcccctgcataaacgtgttgaacaactttccattgctgaatgtcagctggtcgctatctgccgcgcgatggcaaatgacgcccggctggtgattatggatgaaccgacagcctcactgacgcgcagtgaagtcaatcagctgatccgcgtggtcgctgatctgaaagccaacggcgttaccgtggtgtttgtcagccataaactggatgaagtgatggaaatttccgaccggatctccgtgatccgtgacgggaaactgatcggaacgtatgatgcggataagatgaacagtgatgagctggcatatcttatgacgggtcagcgtttcgagttcacaccgctttctgcgtacaacaccgggggactcttacgtctcagcgcagagaaactgacaaagcaacatcaattttatgatattgacctgaagctgcatgccggcgaagtggtcagcattaccgggctgctcggttccggacgcacagagttgtgtctgtcactgttcggcatgacgaaaccggacagcggcaccctgctgatcaacggttcaccggttaagctgagctccaaccgggatgcgattaaccacggcatcggctatgtgtcggaagaccgcatgagcacggggctggtgatggcgcagtccattcacgacaacaccacctccgtgatgctgccgcgtctgacccgcaaaggcggactgctcgatcacacccgggcgcatgaactggtcagcggactgattgaagcactgcagataaaagtgtccgatccggcgctgccggttaccagtctgtccggcgggaatgcccagcgtattgcgatcgccaagtggattgcggcaaaaccggatattctgatcctcgattccccgacggtcggcgtggatgtcgccaataaagagagtatttatcagatcatcagaatgctggccgccgaaggtatggcaattttaatgatcagtgatgaaattcctgaagtattctataacagtcaccgggtcattgtgatgaaagaaggtcgttttacccatgagttcaatccgttgaccacaacggagcaggcaatcacggaggcggttaatgcttaagtcatgtcgtcatctgtttgcacatcatgagttctggctggcggtattaattgtgctgctcagtgtgtttctcagcatcaccaatgaagattttatgacattgggcaatgtgtttgatatgaccaccagcaccgctatcctggcgattatggcctgtggtctgtttgtggtgctggtctccggcgggattgatatctccttcccggccacggcggccaccgcacagtatgtgatggcaacatatgtgctgtcacagggcggcaatttctttatcgcctttgctatcgcggcggttgttggtttactgctggggctgatcaacgccctgctgatttaccgcctgaaagtgccgtctattattatcaccatttccaccctgaacgtctttttcggtctgcttatctatttcaccaacggcgaatggctgtacggcttcccggagtggtttatggatggtgttgaagttatgtcatttaccggcagcgacggttatgactacggcctgtccctgccgatcctgactctgatcaccgtgattattttcaccggttttctgatgagcaaaacccgtatcggccgccagatttatgcggtcggcggtaatgcggatgccgcgaaacgtgtcggcatcagtattctcggcgtgatgctgtttgtttacggctatatgggcgcgctggcggggattgcatctgtggtgcagacacagatcacccagtctgttgcaccgaatgccctgatgggctttgaactgacagtgctggcagccgtggtattaggcggtgtcagtatgaccggcggcaaaggctctcttaccggggttatcctcggggttgccctgctggcaattgtcaaaaacggcctgaccctggccggtgtaccgtcttactggcacaccgtgctgaccgggcttatcattgttatcagtatcagtttcaccgcgtataacgaaaaacgccgtgccgctgcgggaggtcatctgtcatgatgtcaatgctgaatctgcggagtgaccgcaacattatttacctgctggtgatcatggccgctatcctgctgttgcaggggatgtttaatgcaggcgcgtttttctctgtttccaacttccagtcaatgacgtcccagatgccgctgctcggtatgctggcactggcgatgtctgtctgtatgctgaccggcgggatcaacctgtccattatcgcgaccaccaatgcctgcgggctggtgatggcgagtgtgatggccatgagccctggtgatggcgccatgttactgcctgccctgctggccgggctggtcactgccgtgattatcgggctgattaatggttttctgattgcgtttgtcggagtgtctccgatcctcgccaccctcgggatgatgaccttaatcaacggcctgaatgtgctgatttccggcggtaccgtaatttccggctttccgccgtcactgctgtggctgggtaacggcacccttctcggtattccgatgccgctgatcctgttcctgctgtttgcgttcctgctgtggggattgctggaatatacaccgcttggccgtaccgtttatctgatgggttccaatgagaaagcaacgcgcttttccggcctgaacacacagaaaaccattatggcagtgtatgtgatttcatctgttctgtgctgggtggccgcgattattatgatggctaagtttaactccgccaaagcgggatacggggaatcttacctgctgatcgctattctcgcctctgtgctcggcggcgtgaacccggacggcggtttcggacgcattatcggcattgtgctggccctgtttgtcttacagatgctggaaagcggcctgaacctgctgggtgtcagcagctacctcatcatggcgctgtggggcggtattcttatcttatttattgcattgcagaaagcccggtcataagggagcggattatgagtgtctattttattggtgtggatgtcgggagcggcagcgcccgggccggggtttttgatgctgccggacgcaaaaaaggcgaagcgaagcgggatatccgtcagttcaaaccacaggcggattatgtggaacaatcctccgatgatatctggcgcagtgtgtgcctcgcggtaaaagatgcggtggcacaggcacgtatcgacccgattcaggtcaaaggcctcggttttgatgccacctgctccctggtggtgctggataaacagggtcagccgctgacagtcagcccgaccggccgcagcgagcagaacattattatgtggatggatcaccgggctatcagtcaggcgcagcggatcaatgacaccaaacatccggtgctggcgtatgtcggcaaccgcatctcgccggagatggaaacgccgaaactgttatggctgaagcagaacatgccgaccacctgggcgaaagcaggttatttctttgatctgccggattttctgacctggaaagcaacctataccaacagccggtcactctgctccaccgtgtgtaagtggacctacctcggccatgaagatcgctgggacacccattttttccgccagattggcctggaagatctgctggaaaacgatgcgcagattatcggccgcgaaatccgcccgatgggtgagccggtcggtaacggcctgaccccgaatgcagcggcagatttggggctgatcccgggcacgccggttgccacctcgattattgatgcccacgccggcggtatcggcgtgctgggtgcggcagnnnnnnnnnnnnnnnnnnnnnnnnnnnnnnnnnnnnnnnnnnnnnnnatccaaaaatgcccgctttatcgacgggatctggggtgcctattacagcgccatgattccgggttactggctcaatgagggcggacaatccgcaaccggcgcgctgatcgaccatatgatcacgtcacacccgcagtacagtgacgcgaaaaaactggctgaacagaaccagcagaccgtatatcagctcctcaatgaccgcctgctgtcactggcgggttcaaaagaggatatcgccctgctgacacggcatatccatgtgctgccttatttccacggcaaccgctcgccgcgtgcaaacccgaatctgcgcggtgtggtgaccggtctgcgtatgacccagacccttgatgatctcgcgctgatttatctggcgaccatccaggcgattgcgctgggcacccgtcatatcattgaagagatgaataaagccggatatgccattgataccatcatgggttgcggcggcggcaccaagaacccgatctttattcaggaacacgctaatgccaccggatgcgccatgctgctgccagaagagagcgaagcggttctgctgggttcagccatgctcggctctgtggctgctggcttttatgcctctatcccggaagcgatgcaggccatgagccggatcagcaaaacggtgacaccgcagactgagagcatcaaacagttttatgatgccaagtaccgtgtattccatcagctgtatcatgatgatcagcgttaccggcaactgatgtccgaagtctgataataaacaggttccggcggattcagtcaccgggacctgttattatcaatgcccttatccattaaaaccgcaggctctccggcagcattatgaatggagccggatataaccgttatttttccagtgtcaccgaaaatacaccggttgcagggatcggcataaacatctcatataattctttacgggtctcttcagggtccaaatcagaaaacagctccggatgcagccatttcgccagtgcctgaagtgcaataatattttccggcgaatcatagaaaatatgccataaaccatgaacccggcctttttcaacggcagataattcaccgatcgggttacgctgagatattactttcagactggattgtgccgcctgcggcgttgcaaaatatcccagtgttacaccgcggctgccttcgggaaaaacaccagtggcaacataaacatccggatgacggcttaaaatgtattccggatttaatttaccaatagcgcccggaataatggtttcaccaatcgccgtgccgccggcaagattaatcatatccgtcagactacctttgccgggtgaaccgcagcactcttgtaaaccgggtaaatagtccacaaaaatcaccggtttcttgtctgccggaatattcaccgggatacgggcaataacatcatccattttttgctgataatagtgattaaaccgttccgcttcagctgtttttccgatagcctgcccgagaatacgcatactaaattgtgtgttctttaccggatgctggctgaaatcaacatgaataaccgcaataccggctgatgttaataacctggccgcttcactgcccgcacccggtccatgtccgcctgtcatcggtaaaataaccaaatcaggctgcaatgctaatgccttttcaacactgaaggtatcttctgagccgccacccaccacaggaacggcatcgatctgcgggaagacagctttaaaagcggcataaccctgaacatccagatcacgaaaatcaccctgccagcctgcaacccgttcaaatggcgcgtctttttccagtatagcgagcggataaatcattcgtccctcacccagtaaaatccgctttaccttatccggtacatcaacctgacgtccggtaatgtcggtgaccataaccgcctgagaacataacgaggacattaacaatcccgcagataaagctatttttaatgttgttgaaactgtcattttatattcctgttgacagaagaagtataattatgctgatgttttctttttttcaaccagataacaatgccactgatatacagcagcggcagtaatattccggaaataaatgcaataataaggcccggtattccgatacctatatttctgtgtaactgagtaatcagtaatttatattcaggtatgactgataaaatatcaggccgtgccagaaaaataccggtaaccgcgatcaataacagcggcagcgaaaaatagactgcaaaaaagtaaggccactgccgccactttgccgcgccctgtaatcccggacggaataagaacagcgcagatataaactgacgccaccctttgcgcggccaccacaaaataatcccgctgataacagagatggccaaaataatgccgcatagtgataccagccaaccaccggaaaccggcggcaataaaagagcccggtgcagagacacaatctgagaaaaaatcaggtcatcaaaaataataaacccttttggcttaccggttaccggatcaataaaggcaattcccagtttttcagaatcagaaacggaaccaaaaaccatcgcgttcgttgcaggaataaagccacttccgggcaccgcttcccccatcacacgagtgagttcagggtaagccatctgtgcattctgccgccagacttccggcggtaaaaaaacagcagttccggttaccggcggcgcataaagcaccgccttacctatttcccattccagaaccggtttcttcagtaataacaccgcacccgatattccgagcagtgaaataaagaatccggcaacaatccccggccagaaatgtaacctgagccagtttttacgtgttatgtacagagtcattgcggttaccagttatagcgcaatgacgcgataattgttctgtcaaaaccgacagaacatcccccggctgagcaactggtgtaatattttttatccgtgatattgttgatgttaataccggcatgccagtttttaaaatcaggattgattccgcccagatcgtaatgtgcagccatatcaaataaggtatttgacgggttggaaatagtgccgtcgttattaaccggtgaagacccggtataacgggcacccgcagcaaagcctaatccctgcaagtaccctctctgaatagtataatctgcccatactgacgccgtatgttccggtaaaccgacaggacgctgtcctttctcttccggatcggtcgttttggtatttttcagtttattaaaggtataagctgccgtcagattcagcccttccgccggcatataggttccctgaatttcaacaccccgggagcggacttctgccgtctgaatactgtttaaattattatcaggatctgttgtcagcatattttgctgtgtcagttcaaagaccgtcagtgtggcattaatatcaccgctttccggctgatatttaagaccagcttccgtttgtctggctgttacgggtttataggtttctccgtagaaattaacacctaactgcggattaaatgaggttgaataactgacatacggcgctaacccgaagtctgtctgatacattgctgcagtacgataggtaaatttgctgtcacgctgatcgctgctgctgtttgttttccggttttttgttttgctgtcagaccagtcttctctgccgcttaaaaccagtatgatgccgttatcaaactttgcctgctgctgtaaataaatacccgcctgatcactggtctgaagtgtatttgccatcatattattcaccggcccgtactgaccgccgtaaaccggattgaaaatatcaatcggtgccgctttcccggacatcagtaaataatcttcccttgtatggcgataatcgacgccagccaacgatgtcatttctgtatttttcagccaccagtctgcttttatattattatccaggctgaacacatcacctttaatacgaaaatgataagccgcacggttaagtgtgcgcatatccggtgacagatataacccctgagcaatattggtatttaagtcagtatgactgaaccgcgcacctgaatgtccggaaaatgtatcattaaaagtatgatctaactgataccccagagaagcctgagtgcggtcattttttaatcccggttcatccaggaaaacattcggattcactttaccgttggggttaggtaacagcgttcctgccaggggtaaaaacgggcgcggtgcgccaaatttatcatgtgtatagtcggccaaaacagtcagtgttgtatcgtcattcagccaggtcagtgcaggggcgatatagactttatcatctttaacatgatcaatctgcgtatcactgttacggacaagcccggtcagccggtaaaaatagtgttcactgtcacccacagggccacttaaatcaccctggatctgtttgcggttataattaccgccctgcacctcaatttcatgaaagggtttatataacgggcgctttgttacctgattaataatgccgcccggtgagttctgtccgtataatacagatgcaggaccgcggatcacatcaatacgttcgagtccgtattgttccgctttcggccatgcctgtgccgttgtactgcgcagcccgtccctcagcattccggtgctggtaatattaaaaccacggatacttaaattatcaaaacgggaagatgcggcatcgtttgtctgcaaaacaccggcggtataacgcaatgcttcactgacagactgtgcgttatgtgcagtcatttcatcacgggttaataccgtgaccgactgtggtgtttcaataagtggtgtatctgtttttgttgcactgacactacgggtggcaatatagccgtctattttaccggcaggtgattgtgccggtttggcagtaacaattatttcatcattattttcgccggactgactttcagacgcagcaactgaggaaaacaacagcggcaagagtgcaatacataccggagaaaatgcacgacctgagataaccggataataaagaacagattttttcattgaaatacgaacccgcagagagaatgaatacagtaatgataatgcatctcatttactgttttatcttctgcgggagactttcgctgttatgactatttgtttatcacaaatactatctgtttgattatactaacataaatctttaggtgaaaaaccgaaccgtctgcggaaagctgttgaaaatgcagccggtgaataaccgacctgccaggcaacagcagacacccgtctgtcaccggcacacagcaggcgatgcgctgattgtaagcgctcttcctgaataaatgacgcgacagacaaaccgaacagttgcttaaaaccaaaactgagtttacgcatattcagaccggactgacgactgagctgatatacccccggcggattggctaaatcggctaaaatacagtctctgatatcatacaaacgctgtatatcatttgccgccagtttaggatggtggatcgtgcgggtattttgctgaatgtactcaaacgatattgcgcataattcaagaattttgcctgtcagatacatctcacccggcgcgccgccaagcggattattcagaatctgatttcccagtgcagttaagacatttcccgcttttccggacagtaattgtggtccggctgatacagccgctgttaataaaggcggtggtgcaattttaaatgcatccatcagactgtctgataaacagacagacacaaagcggatgtcttcctgctgtaaaaagcgctggcggctttcctgttcatcatggttattggcaataacacataaggaagccccggaaagtgaaatactgtttttattatccggctgacattccagttcaccattcatcatcagaaccagtttcagccctttccataatggctcactgacccattgtccggcatccggtgtcatttttccgcaataaaaaaaggaatccgcgccgggcagcaatgtattcattttaccaccgtgcatgatatttcaccttttgcacctgaataaaagcgaatagtaaccattatcacatttgatttctaccccggccacctcagaccattagtctattatccttcatttatttataaatacagttaatttaaccatcagatatattacctgttacgtaccggcaataagatcatcatcacaaaatcaccgcgcaatcctgttgcttataacctgcatgagtgcacaattctgttgcgtttcgtgataaccctcacattttacaagggtaacgcgtgtgtcaccttcagggtttccatcggcacttccgtcttaacgctttgaatacttggtatttgtgtcaggtgatcggcatgaaaccggcgatatgaggtcaggtctttggtcacaatacggatcatcgcatcgcattcaccggccatcagatgacactccactatctccggcatttcattaatggccgcaacaaaatcattgatagtctgtgcgtcctgccccttaaaccagatacgggcataaagcatcagccccgcgcctatcttgctgccgtccagaatcgccgcatagcgcttgataacgccggtttcctccagccgccgcacccgtctcagacagggtgacggagagagccccacttcgcgtgccagctccacattctgcattctgccgttacgttgcagctggtccaggatccgccgatccatcttatccagttcaattgacatttaaatcaccacctgacagtttccgcgcaataatattgctaagaatagttttttcgggtcaatttaacaacctaatttcccgcgaagccccgtataatttgcataacaaatcaggacgtcacaatattgaattaaattcttaatattcaacaaattgtgaattattaatatattttttgaacttggggtgtcgtatggtcataaatacattgatggtttttggcgcaaccgtgttacccattgtatttgctcccggacccgatattttattcgtttcgtcacaaggtctcgccagcggttcccgcgcggcactgaaagccaacatgggcgtgctgctgggttacggtatgcactccattctggcggcattcgggctggcagccgttgtagtggcatccccggttctgtttaacggcatgcgctggttcggcgtggcctatattgcgtatctggctttccgtatggtgatgtccgccatgcacaagagcgaaatgccgccgatgcagccggcagcaaaatcagttatcaccaaaggctttttcaccagtttcctgaacccgaaaggcctgctggtctactttgctatcctgccgaacttcatttccggcagtgagagtgttgcgatgcagtccctgttgttatccggtgtgtatatcgccagctgtgccattgtttacagcggtgtggcactgattttcggccagatgagcaaaggggaatataacgacaaacgccgccgtatcggtgaaggcgttgccgggggattactggccaccgccgcaatgagcctggcattcagttaatctgagaaaagtcagcgcaatcagcaaaacgggcactgaaaagtgcccttttttaatatccgccggttgtctcttcaagcaggtcattgtgataatcggacaatactttgagaacaaacgctgctgtatcgcgttccgcttctccggtggctgccagtatggtcagcttgaccagttccatagaaacattaagttcaacgccgttcagtatcagaaacacactggctgcctggaaagccgttcttttatttgcatcattaaaagcatgcgctttggcaattgaaatcaggtacatggcagagaacttaaaaatatcctcacactcctcataatcccttaatgcctcaatacgggataatgccccctccagcttgctgagatccggtttaccgctgttgggcagtgttgagcgttgtatttcaaccacttcatcaactgtcagaaatcggatagtcattatttgtcttccagcgctctgatgatgtcagcgtgtttggttttcgttcttgccagtgccttctggaaatcggtcagatttttaccggcaatatccgaaagctgcccggtaatacgcagcatctctttcactgcatctgaattcaccgcagcctcaagctgagccgatgctttacgcaccgtttcgataaaatccggggaaggcagaacagattttaccgcctcctccatttgccggagctgatttatggtatccgccggaaacagtgtctccggtttaccggcaaaatactccgccgccggttcttctgctctgcatgacgacaggacagtgccggaaatcactacatccggctttccgcgctgggtaattgtcacgttctcaccattcctgagactgtccaggatagcggaaagctccgttctcatcatggtgtaggatacatttttcatcacaacaacctgtacatgtacatatttatccggataatagcccggatcctgagttatgacaatgcataccggatattcaaatcacccctgtgttttcttcagcacatgacacaactgccccagcactttcatcgcgttatccagccggtcattccattcaaatgagcagttcaggcggaaggcgtgattaaactggtcactggtggaaaacatcgaaccgggagcgatgctgatctgctcattgagtgccatacggtacagtttgacggcatcaaacggcggttcaaattccagccagaggaaatagccgccctgcggacagttgaccttcacatctgacgggaaatattcgctgatggcatacaacatccggtgctggcgctgctccagctgctgacgcagttttttcagatgtgcatcataaccgccctgaccgagatattccgcaatcgcctgttgtgtcggcatactggcggataccgtactcatcatctgtaactgctggactttgcgggcatgtttaccggccgccacccagccgacccggaagcccggcgccagacatttggaaaacgaggagcagtggaagaaattgttatctttatccaggcttttcgccggttgcggcgcgtcgctgccaaaccagagttcactgtagacatcatcctcaatcagggcgatttcatgccgtgtcaggatctccaccagccgccgcttgttttccggcggcatggtaccgccgagcgggttctggaaatgcgtcatcagccagcaggctttgatatcatagcgcccggcgacgtcttccagcgcatcaaggtcaatcccggtctgaggatcggttttgatcgccactgctttcaggcgcagacgttcaatcgcctgtaatgcgccgtaaaatgccggggattcaatcaccacccagtcacccggttctgtgaccgcctgcaggctcagtgacaatgattccattgctccggcggtgatgacgatatcatccggcgagacatggatcccctgtgcagcatagcggcgggagatattacgccgcagtttttcattaccgggcggcatattgaccaccgcgctctgcggtgcgatgcggcgggccactgcgcccagcgctttggagagcttcggctgcaccagcagcgaaggatcggggaatgccgacccgaacggaataatggccgggtctttgcaggcctgaaggacatcaaacagcgaggcattgatctccacattttcactcaggtgcatacccagaccacctttggcctgagcaaacgccggggcgcgtttggcgacaaaatacccggactgcggacgggccaccacccatccctggctctccagtaactgatacgactgtacgacagtcatcaggctcaatcccgactgtctggcactttcccgtaatgacggcagccggtcaccaacctgccagatatcatcttcgatctgctgttttatctgctctgctaactgttcgtagcgtgtcatggagcgctctccgtaaaactgttatggacatttcatgactaattgtcactattatactttagcaactcatggtgtactgtgccacacatttcatctgcgtaattatcatttacatagctataacaacgagaggtcacaatgtttgggttaagtgcccttgagcttgcgcgaattcagttcgccttcactgtgtcgtttcatatcattttccctgcaatcaccatcggcctggcgtcattcctggcggtgcttgaggggatgtggctgaaaacccgcaatgaggattacaaaaagctctttcatttctggtcagccatctttgccgtgaacttcggtatgggtgtggtttccggtctggtgatggcctatcagttcggtaccaactggagtttcttttctgagtttgcgggatcaatcaccggtccgctcctcacttatgaagtgctgactgcgttcttcctggaagccggtttcctcggcgtgatgctgttcggctggaaccgtgtcggtgaaaaactgcactatttcgccacctgtatggttgcgctcggcacactgatgtccaccttctggatcctggcctccaacagctggatgcagacaccgcaggggcatgaagtcataaacggcgttgtggtgccggtggactggttcgcggtgattttcaatccgtccttcccgtaccgcctgctgcacatgacaaccgccgcatttctggcatccgccttctttattgctgcttctgccgcctggcacctgctgcgcggcaacaaatccggtgccatgaaaaagatgttctccatgtcattgtggctgattgtggttctcgcaccgctccaggcactgattggtgatgcacacgggctgaacaccctgaaacatcagccggttaaggttgcggcaatggaaggtcactgggagaacaaacccggagaggccacgccgctgatcctgtttggtattccggataatgctcaggaaaaaacccgctataccgtggaaattcccgggctggccagtctgattctgacacacagccttgataaacaggtgcctgcactgaccgagttcccgccggaagacagaccggacaatgtgttcgccgtgttctggtcattccgcgtgatggtcggcctcggcatgctgatgctgctggctgccgcactgagcctgtggctgcgttaccgggggcgtttatatgattcccggcctttccagcgctttatgttatggatggcaccgtccgggcttatcgcgattctcgcgggctggtttgtgactgaaatcggccgtcagccgtgggtggtttacgggttacagcgcacaacggatgccgtttcggcacacggtgagatgcatatgagcatcagcctgctgatcttctttattgtttatggttctgtgtttggtatcggctacatctatatgatgaaactgatccgcaaaggtatcgcgccggaggtgtctcatgggcattgatttacccctgatttggttcgtcattattatatttagtacgctgatgtatatcgtaatggacggatttgacctcggtatcggcatcctctatcccttcgtgaaaagcaatgctgaccgcgacctgatgatgaacagtgtcgccccggtctgggacggtaacgaaacctggctggtgctgggcggagccgcgttgttcggtgctttcccgctcgcctatgccgtgattctggatgcgctcgctattccgctgacactgatgctggtggcgttaatcttccgtggcgtggcttttgagttccgctttaaagcggatgaacatcaccgttatttctgggaccgcgcgttcctgatcagctcggttatcgccacttttgtgcagggtgtggtcgtcggcagtgtgattgaaggttttccggttgcaaaccgtgcctttaccggcggtgcctttgactggctcgcgccgttcccgctgttctgcggtttcggtctggtgatcgcttatgccctgctcggctgcggctggctgggggtgaaaacggaaggtcatttacaacagcagatgtataaggtgctgaaacctctgaccctggtgatgctggcagttctggccgtgatcagcctgtggaccccgctggcgcatgacgccattgcggcacgctggttcagcttcccgaatattctgttcttcctgccggtaccgctgctggtgcttgcctgtgccgttgcgctgttccgcagtgtcagccgtcatctgcactatacgccgttttttgcggcactcggcctggtttttctgggcttcaccggactcggtatcagtatctggccgatgattattccgccggtgattgactatgaaatggccgccgcccccggcgaaagcctgagctttatgctggttggcgctttattcatcataccggtgatcctggtatatacctggtggagttattatgtcttcagaggaaaaatcacccatgaccagggctaccactgagcctgccgcaccggctccctggtggaaaaaagccgcctggatggtcgctatctgggcaggcagtgttctggcactgtttgcagtctcatcacttttccgcttattaatgacggcggcgggaatgaaagtaagatagtcgtcatgtctcatcagtaagtacctcatcagtacgtcatgcactgtgtaagcagctgcattgcccggcacaccgtacccccatacggtgtgcttttttaaataattttattgataatgattaccattcttctgaattcctgatacactccgcgaaatagatataacgaaactaataacaatagaacggagaattgcgcatgagccgggaaaaaaatatctaccgccctgcccccccacgtctgattcaggtgaaatcctttaccgacgttacccccaatctgcgccgcatcacctttacggctgagtcgctggacacctatccggcagattgcgaaggtggtcacctgaagctgtttattgccaaagatgcgccgaatccgcctgctctgccggtattgtccgataaaggaccggtctggccggaagacaagccgcgcccgatcgcccgtacctataccgtgcgtgcgatccgccctgaactgaaagaaatcgatattgaattcgctatgcatgatgatgccggtccggcagtggatttcgccagaaatgccaaaccgggtgattatatcggtattaccaatcccggcgggccggatccgctgctgccggtggcgaaacactactatatggccgccgatttaacagcacttcccgctgttgccgcgctgctggaaaaaatgcccgctgaggcacagggcaatgtggtgatccgcatcgaccacgcggatgaccagcaggtgctgaacaaacccgcgggtatcaccctgcactgggtgaccggcggcacagagaaaactgctgaagtcaccgcgctgtttaaaagctggccggtcgccgatgtgacagagtgtacgttctggattgccggagaggatgcgatggtcagggatctgcgccgctatgtgcgccgtgagctgaacggggaacacagtcagatgtatgcgatcccgtactggcgtttcggttacgatgaggaaggttatcaccgcctgcgccatgatgtgatggatgctgacgactgataataaacaggctgcggcggtgtctgccgccgcagcccctgtactcagttataagcctgcaatgcccgcagacaaagtgacgaacgcacacagtcatcctgcgtgaaagacaccactgacaccatatcatcatcccggaaacggcgcagcacatcggccagcccggacgggacattgcccggtaaatcacactgactgacatcaccgttaacaatcactgtcacattctcccccatcctggtcaggaacattttcatttgtgtgacagttacgttctgtgcctcatcgaggatcaccaccgcattctcaaaggttcgtccgcgcatataagcaaacggtgcaatttccaccttacctatctccggacgcagacaatactgtaaaaatgaagcccccatccgtttcaccagaacgtcatacaccggacggaaatacggcgcgaatttttcactgatatccccgggcagaaagcccagatcctcttccgcctgtaacaccggacgggtgacaataatccgctcgatttccttattgatcagtgcatctgccgccagtgcggtactgataaaggttttgccgcatccggcctcgccgttggcaataatcagttgtttatgcgctatcgctctgatgtatttatcctgtgcatcatttcgcggtaaaacagcactgttgtcgcgtttttcccgcgccatgccgatagcttccaccccgcccgccgggataaaaaccgccacattatcatcattaaaacgtgctctgcgcgactctttccggctcattcgttttgcctctttgcgtgctctgactaccgctttttgtctgcccataatcttaatcctgttgatttctgatgacggaataactgaaacagtgagttggcaaccggcggctcccttcaagccatgagtgaacattcagataaaaaaaagccggtgataaatccgccctgttgttcagggtatttatcaccggccggtactgtcgttcgtctgtatgtcgcattcgttatcctcagatgacaaactaaagcgaacactaaactgactttgtgacagtataatgacaatactttcttttcagcaattaaaatcggcagatatttaacatttttgccacatttctgttatccgccgcacatcagcgtgctttgcagttcttcgccatgctgtaccctgcggcctgtgcagaagcagcatcagggaacatttcaacatttttactgctgatccggctatagccagggcaatccggaaaatggtaaatcttactgttgcggttaccgcggatacgctgattttcagactttttttctgcctgcggcggcacgtttaccggtgtcaccggcgcggacggcagacgggtaaaaataccgtcagcactgttgatatgccccaactcccagcggcgttcgccggtcacaaacgggtttgactgcccggtaaccgcacggatacggcgatcccgttcccgctcggcggcagacggcggaaattcgctgtcccacaccatcagtaatttctgctgctgttctgacatcgccagatcgtagcggtcatgcatatagaaccagacccgcgccacctcgcctttgacttcatcgcgcggctcgaaaacccgctgcttaaaatccacccggctggtgcactgcccgtagctctgtgaaccggcgccgcgtgcgatcccgtagcggaaattactgcggtccccgttgacttcgccgacagacggcgccaggttatggagatcggcttccattgcacggaagaccgggtcctcactgacacagtttttgcgcccgccgttctgccagcactggcgctgatgcccgaacacccaggcaggaacaatatgctcccactcaatccgctctgcgcgggtcagctgtgaccgtacacggtaaccgcagctgttcagatcaacccggccgccggattttccggtccattcccactgacagccgcaatacagtgtcccttctccctgcaggttacggttctgatcgtaatagatcttctcacgggccactattttggcctcatcaaaccgttccggcgcagccgcaaataccgcaggcgtaataacacacaacaaaaataatgaaacacgaaatgattgaaaaatacgcatataaatcataaaccaacagaataccaggggtagcaattatgccacgccgcgcacgaattatcgcctcagattttctattaatcgctcaatccgccggataagacaatttcagggtgtttttttacagaatggttttaattcaaaacgttatactacgcagccatcaatacgaattccggagaataacgatgcatccgctggtcgatgagatgatagaagaaatagtcggcactgcctgtgcctatgatgacaatgaggttgatgtccgtgtgcaggaaagccgcaaccgggtgcagattcagattagtgtgaccgataaaccggttatggacattatcctgaatctgacccgtatcagttaaacgcgcggacgcttgcggtacaaccacaagccgggaacagacagcccgatagacaacgcgccgaccacaaagcccgcccgcaggaaattgctcaccagcatctccagcagttccggggtaaaaccggactgtgacagtttgatcaccgccagcattgccatataggcattaatacccggaaacatcgggattatggccgctacggtaaagactttcgggtgtgccagccaccagcgggaccactgaataccgatgatccccaccagcaccgatgcccagaatgtggcggcaacgatgtcaaaaccggcggcaatcagcataaaccggctgccgtgacctatcgcccccagcagtgcgcaatatttcagtgcccgtttcggcacgttgaataccatggcaaccccggccgccggaatagccgccagcagcatgtcctgcgccagtgcggccagaaaagagagtaccgtcatcatatccagtccctcaggctgccgagtgtgatcgcggtaaaaataccgatacaggttgccagggtgagcaggcttgccatcgcccagcgggcaagaccggtgttaacatgccctttgaacatgtccgcaaccgcgttgatcagcggaaaccccggcaccagcagcagcacgcttgccgccatagcaataccggacgttgccgaaaacagcgggattttcagcatcattccggccaccatcgtggcaataaacgccgtaaaacagaagttaatcagcgggttcatatgccgcgcggtcaggacctgacggacatacatcgcacaaccgctggcggcaaaggtaatcaccgccccgtcccagccgccgttattcagtttgcagaaacaggcgcaggacagtgccaccatcagcaccatcacccagcgcggatagcgcagcggtttcatatgggcgaattttttctgcacccctttgcagtcaagatgcccgtgctccgcgaggatcaccacatgctgcacttctgtgacgatatgcatattaataccgcgatcgaccaccttgcgggtggatgtcaggcagtgcccgtcaatgatcgtggtgagcacaatggcattcgccgagatggcgcaatccacctggtcagctccgagcgccttccctgtccgtcccgccagctcctccaccagcatactttccgcaccgtgctgtaacagcagcagcccgcactcgatacacaggcgggtgatagtccgctgcatatcctgtgtaatctctttcccctgtcccataattttaccgttaaccgttgatggtccgactttcccgctattctaattctttgtattaacaactcactgggtttgatcaatagtttgataataaatagtcttactatgccgtaattgcagtatggcagggaaaccggctattgagcaatccggcgcggcgtggttaaatcaggacttgtcactgtcaccggagcctgtatctgttatgtcatccaccccgtcaccattaaccccgaaagggcagcgccgccgtcatgccattctcaccgccgctgcggatgtttttatccttcatggttacgaaggcacaactctggatatgataattgagcagtccggcgggtcacgatccacgctgtatacctctttcggcgggaaagaagcattgtttctggccgttatagaccatcttatcagcggaatttttgaggataatgaagaggaagaaccggaaacggcgcccgatgcagagacactgttatacacctgtggcagacgctacctgtacagtattgttcacccgcagtcactcggcttatatcagctgattctggcggaatcacaacgcttcccgcaaatcagtgaacaattttaccgcgccggtccgctgcgtgccgcacaacagctggcggccgggctgaaagcactgcccggcatcaccgcgtctgaggaaacattactggccgttgccgcccgttttctggaaatgctgaaagccgatctgtatctgccggttttcagtcatcgtcataacaagccaacggcggaatttattgaaaaacagctgccgttatctgtggagataactgcctgttacctccgccacacattaaccccccaatgagcagcggttatcattaacatctgccttcaggcggtcacttctgccgcctttgcccgcgccgctgccatgtcatcagcaacaaacaccggcacaccgtagactgcaccggccatcggcgcgaatttctccagttccgctttatccccggtttcctgattgaccgtcaggatcatcacactgcaatatgccgccattttctcttttccggttttcagccagcggcggacatacttacgcgcatccatatcttcctgtgtatccggcttttccggcccgtctttcggcgggtaaattaatgcgaacggtgtctgcttatccagcagtgcatccagttctttcacccactgttctgtttgtgccatattttccgggaatgactgcattatcaccaccgggaaggcaccggtatccatatgaacaaaattaactgctgacataataactccgtactcttttttgtatttatcggtacattattattccggcagaaacctgtcaacaaataagaatgcgtttcaattgcatcagcacaaattgcgcattatctgcccgcaggtgccgcgctgtgttattcttatgcataaagtaagtaattattctgagattcatcttattcttatatatatcccatgatatttcggggcatattgattaattattcatatccgttcctgcctacaacataaggtctataatgaaaaagctgacactaattaccctgggatgcctgttctctgttactgcttttgctgccaatgccagcaaagtctgtgatgaatatttcactgaaatcgacgaaatggtcaaactggcagagcaggaagccaaaggtgatgctgatgcgactgcacagatcactgccatgaaacagcagctggaaaccgcaaaaacacagattaaatctgtaccggaagagactcaggacatggcgtgtcagcagggccttgatgcactgaaggaattcaaagcatcgatggcaaaacagtaattctgttttcacgaaaaaggtccgcgtttgcggaccttttggtttttatcgttatacttaatattcagcggacaaccagcacggaaacctgcgcatgtgccacaatcccggaggcggttgaccccagcagatgtgttgagatactcgggtggcgcgaaccgacaacaatcaaatcagcatggatctcttttgcttttgccagcaccttatctctcggcgtgccgtaatccacaaaataactgacctgctccgccggtaaatccactttttcggcaatcgcttttaactcatcttttgaacgggcaacggctttttccgcaaatgagttcagcaattcatagtggtaattatagcttattgagaatttcgaaatatccggtacagagtgaaacaacatcagtttcgcctgtgacatctttgccagataaatcgcgtgtttcagggcattactcgtcagtacatcttctgtcacatcaataggaactaatatcgttttatacataccatccctcattgtcagttcaatgtgtatttgagttaagtataggcaataaacaggaaaccgttgtgccgggcatcataaaatttcactgcctttttatgattttgtgttttttatccggaaaaaagtccggctataccacgtattattccccggtatcttcggatgagacaggcagataaccagcagaaagagaatgattcttttatgagtaacggggatgacggcaggaagaacaaaaaataccggtggcatcatcgataccaccggatacagactacatcagcggacaaccattactgaaaccggcgcgtaacggacaacaccaccggcggtggagcccagcaggtgggtggagatattcggacggcgggaaccgataacaataatatcggctttgacctcttccgctgcctggataatttcatcacgcggcgaaccgaacgtaatcgtgtaagcaagacgctccggcggcagatcaatagaatccatcagcatatgaatatcttcttccgctttaatggtcgctttatcttttatctccatataacccagcgcatacgcattaataatcgcggatgagatcggcaggacatggacaatatgcagcttagcccctgtttctttcgccagatagagtgcatggcggacagccttactggtcagttcttcttctgaaatatcgataggaaccaaaattgtattatacatactgcctccttgaataaatcatgcgatatattgtcactatattaaacagagcggaaaatatctgtgagattgataccgttaactcttattaaccggcgtttccgtcatcagccggttacggattaaccgcacataatcaataatttcatgggcggttaatccggcagggccgataccggctgccacacattcatctgccgccgcgccgtgcggccagcccccgccgcaaacctcttcctgcaccggcagccgttgtgccagcaggctgccgataatgccggataacacatccccgctgccggcagtggccagcccgcggttaccgctgttattacaccataactcaccgtccggtgaggcaatcaggctgcggtgtcctttcagcaccgcccagcagtgatactgagctgccagcgccagcactgccgccgggcgatccgcctgaatatccgccactgtggtatgcagcagacgggcggcttcctgcggatggggggttatcacacagttatcatccagcgcgatgcccggcgtggcggccagaatattcagtgcatccgcatccagcacctgtggtttaccggtctgcataaacaccgcttccgccagtgccctgctctctgtactctgccccagtccggggccggtaacctgtgcagtcagcgccgggtcatccgcaagggcacgggcggtccgcagcatcagctccggtgcattctcaacaaacggcaccggcaactgctgctgattaaaccccaggatcactttgccgcacccggttttcagtgcggcacatccggccagaataatcgcaccggtcattccggcagccccgccggtgatcccgagggtaccgaatgtacctttatggctgtcctgcggatccggcctttttaataccgggtaatcgcgggttatggcattgatatcaataatattcatctgattattttgcctttttcagcggataatgaacgcaccctgtttatcagcataacgggaaaataaaaaagaaggtagagcagtgacgggcagatctggtattctttgcggctgatatatccgggactgataaatataacggttgaggttaaccatgaataacgcatttaaaacagaaaacgatactgaaacactggctgcggaagtgacctgcttaaaagcactggtaacatatttactgaaggcggtgggtcaggctgatgccggccgtattatcgtcaatatggaacgccagatcagcgaaattgatgatgagcatctgtccggtacctttaaaaataccattgcccagattaaaactgagtaccggaaataatttccggcctggcaattaatgctgtccggggataatgcaacgaatcgctaaagagagagggcgctgtttgtgtcaggataatgttcctgtactaaataccctttcttttttattttcgtttctgtccgcacgctgttatacaacgtgcggactttttttatgctgtacggttatttctgttccgttttcatttctttcagcaggcggacagcaaataatccgagtattaccacaccagccaccagcaccccccataacagccaggttttccaggcaaacggtggcggggcttccggtgcaggcagtaacttcgcttccccgcccagcgtgaccactttttctgacacatcagcccgcggaatcgcatcctgattattcagattattgcccggcagaagttgggacagcgttaaaaatgccccattagcatcatgcgccccccataccagcagatacggcgcggagccctgggcgttgaaggtcagatattgtgcatatttaaccccggtgaccttcggtggtgtctcgcgccagctgctgttaatcgcggtcagtctgacctggcggaccggcagatcattcagccggatgttactgttacggttttccgcatcatccgacaccagtgaataaagcactttattatccagcggcagccagttcccttctgtaccactccggtattctatccgtaccggcagcaccgtattttcctggtcgatatgaaaatccagacggctgagactctgggtattcggcaggctgtaaatcatgctgccgtcagtgtccttcgcaggcacaaaatcaaaacggttcacctcacggcgctccacggtccgggaactcatcccttctgcggtggtgatttgcggtggtgcctgattgttatctccggtaacggaaagcagccagtatttcgccctgctttcatcaccgctgatatagccagggatctttatctgttgtgccagcagcgcatcctcaccggatttcagatccatcagcggcacatcgaggatcaccggcgaccagttctgtttgtcatcgctgctgaacagtgaggctttggcctgcatattaccggtctgctgcggccagttcagtgtgacttcccgcagcggcagcgggagctgctgtttgttatccggtaccagcaggtacgtcgcggtggacggacgcgccaggctgtccgcactatcattgtaaatcgtcagttctgtaccgttatctgctttcaggcggattttgcggttgccgtcctgctcttccgtccggctttgtgacagcggataaataacgaagcggacacgcgcgctttcatcttgtacctgcttcgccgccgtcagtgacatcggcaccggcgtaccggagctgtcaaagatacggatatcccgcagatccggccaggcactgttgagccagacattatccggtactgtcagccggtaaaatggggcattctccgcccggagctgtaattccgccccctgattaaaatcattcagtgtcttcgccggggtatccgcccgcgaaagggtcgtcaccgatgtcagcaccgccgccaggagcacagccccggtatgccatttacggcgcagtgccgcctttttacctgtgatcatcagttatcttccttattattctgtatgtcagtgcctgttttcggcggtaacggcgagaaatatcccacaaccagtatcagcagtgccaccccgataaatgcaccggctctggcaagcccgctgctctggttcatatcaaccacaaagagtttaataatcaccacagcaaagacggccgccccggccagccacagatggcgtttatgccgccgggttgcggtggtcatcaggatcacggcagtcagtgcccagacaatcgccagcgtggtctgaataagacgggactgcagcagtcccacggttgtccatgcggtgccgtccgcaaaggccagtgcacggatcagaataccgttcacccaccagatcccaagcacggcaacggcaatacccagaccgcgcaccacatctgcccggaaatgcactgccggtgtggttcgtatcagcgcatcacgcagacaccacagtgcagcaagcccgaacaatccggcttcatccagcgggttcagcagcggcacatactgccagagcgacagctggccatcctgcatatttccggtaaacagtgccagtcccagcaacacagccagcggataggcactctgccagtacagcgcggcatgattgtccatcggcggccggcgcaggcgctgcatggcgtaaagcacgaaaatcacgccgcacgccgacagcatggcgataaagtaaccccactcttccataccccacggcagctgcatttccgcccacatcacttcggcggcgaccaggccgatgacggtccagagtgacgcgccgtgcatcagattgctgataatgcgcggtgcctgttccggcagcagccggataaaggtgatcatactgccgataaccagcagccagataaagccgccgtacagcgaaccggccgcatgtgttccggtaagaatatagtcacacagtatcagcaggctcactatccacagcgcactgatgcagtaatacagctgagtccactgcactttgcgcgccaggaagaaccagctccagaccgagatcacaagcccggtcaggatgtactcctcaccggacagcaattcaccggccggagataaccacggcagcatccacagccacgagagccaggtgatcatggccgggataatcagcagtccggaaatcagtttgctgcggttcatcaggcggaaatggtgatgaagcgccccggcaaccagcaatccgccccactggaagatatacatccagatgctttgttctgaccagtaaataaagtccatgctgtagagcagagatgcaaacccgagcagcaccagcccggtagcactccagccgacaatccgctgtttttgcagacaggcgaaccacagtatcgccagcccttcaatcgtccaggccacggaggtccactgcggcgacagtgccagcggtactgccagcgagataaagccgatactgagcagcagaaagccgagcgacaggcgctgcccgtcagcgcggaagcgacgcagactgaccaccgccagcagcagataaatcagcccgaaggccagcgatgacattgcggtaccgagatagaacggctccgtaatggcatactgcagggaaaacgccagcaccggcggcgcaaacagcagcaccgaatccaccatcagctgttttcgcccgtcatctgtccggacatgatgccgtgcatattgctgcgtcagcagcccgtagaccaccagattcagaataatgaagatctgacagttcaggtaatactccggctggtagttatccacgccccagatcacaccgaccacaaaggtaaaggcgaaaccaacaatattcagcacccgccacccctgccagtagttcatgatcagaatggagacggaaagcatcagataataggagaacagcgcgatatagttaccgttgccggtggagagcagcaccggcgccgcataaccgccgatcacagccaggaccgccaggctgaccgcgttttgtatcaccgcgaagaaaaccgatgccaggcagataaccaccatcagcgccagtgcaaaggccagcggcaggaactcataaagcttataggcggcaaatatcgtgatataaaacgcaccgaggctgccgccctgaacaatcaggctgtacagccggtttttatggcggacacaccagccgacaataaagagtgtcactgacaagaccgccgcaccgatcaaacggacttccggtgtcagaatattattttcgatactgaatttcagcagataggagaggccgataaacagcagcagaataccgattttggccgggaggttgccgttaagcagccattcgagaatattggccgccgggcttttgcgctccgccgctgcagtatccgccgggaacggtattgccgccgccgcgataacaggttccggttcaggaacaggttccggctctggcaccggttcatactgcacttccggctccggctgctgcgggatcgcttcagacagcgcagtggcctgaatggtggtctccgccaccggctgaccgccggtcagggcatccagttcgcggcgcagtgattccgtttcctccgtcagaacagtgacctgcagtctcagcagcgttgtgcgccgcagcgccgcaacagcaataaacggcgtcacaacaatgagcgccactaacacaaaaccccagaagagtaatgaatccatgtttatcctgtttttcagtctttaacttagagtgtagacaatttttaatttccgttgtctcacatactgcctgttatgctgctaaaaatcaggtgaataaatccgggtatttaacaaatgccataaaatgctgttttgtcccgttaatccgttgttaaaacaccggaaacatctgcggatgcacgggtttcacacctgttttgactgaaaatcatttttccggattttaaatattgactgttatcacaaaaaggggcaattttgagacacagatcacaacaatataaggacactcattatgcgatttttagcccgcttcttaaaagagttagacaacgtcaccgcgtccttctgtgtggtcgcattttaccgtaaccgtctctgacggacagactgagcatttttgagctgtatcggttcaaatcaaatttagtttaaatgttaaatttaatttgtgagaaagattgacactcatcaacaaagtgctaaagttatgtcatcgaattgtgagaacgcaataaacaagaacgcaattatgttacctgcaataaaaaatatcagacgttttatctcagagctcaataaaatcgcccgtattatattctgaagataaacgcacatcgttttcaggctccctctgcggagccttatttttttctgcctgtaccccatcctcctctgaaaggtttatactgaccgcattattttttatgaaataaggagcaactgtcgttatgcaacatgacatccagcgtctcagaagaattcgtcagaccccgcagatgcgtgatctgttccgggaaacctcattaagcctcaatgatctcgcgttaccgatttttgtcgaagaaggcgctgatgactataaagccatcgacagcatgccgggcgttatgcgcataccggaaaagcgtctggcctacgaaatagagcggatcgccaaagccggtatcaaatccgtcatgactttcggtgtttcacatcatctggatgcaaccggcagtgatgcctgggcggaagatggtctggttgcgcggatgtcccgtatctgcaaagagaccgtgcctgagatggtagtgatgtccgatacctgtttctgtgaataccccagccacgggcactgcggtgtggtgcatgacggcgtggtcgataacgacgaaaccctgcataacctcgggttacaggcagtggttgctgcacaggcaggggctgattttatcgcgccttccgcagcccaggacggccaggtacgggctatccgtctggcactggatgccgccgggttccatcagaccgggattgtgtcctactccaccaaattcgcctctgccctttacggcccgttccgtgatgcagccggttcctgcctgaaaggcgaccgtaaaacctatcagatggatccgatgaaccgccgtgaagccatccgtgaatccctgatcgatgagcaggaaggtgctgatatgctgatggtgaaaccggccggggcttatctggatattctgcgcgatgtgcgcgaacgctcaaatctgccgctggcggcctatcaggtgagcggtgaatacgcgatgatcaaactggccgcacaggccggtgctattgatgaaacccgtgttgcactggagactctcggctccatcaaacgcgccggggcggatttaatcttcagttattttgccctgagcctggcagagaataagatcctgagctgatgtacaaaagctcatgctgacaagcctgtggtaacgggcaggtcaacgaaaagcatgcgcgtcatggatgacgcgcctgagcgcacatggatgtgtttacagcgacttttcgttttgcccgttgccgtcaggcgcaaacaccggacttacaaacttcactttttattcttttcttccagaaatgccttcagcactttcgcctggttatgctctttatcttttgccgcaaacagcagtgtcagattgccctgcaccgcttttgccaccagcggttgccagctttgcggcctgctctccagctcttcacggtaacgccgttcaaactccggaaactgatcactgttagcgtggaaccacttgcgtaattccgtatccggcgcaacatccttattccattcatcgtaattcagatcggtttttttaattccgcgcggccacagccggtcaaccagcacccggtaaccgtcactttccgcgacctcatcataaacccgtttgcagaaaatcatgctgatgctcctttaacctgtttttcatgagccagtaaccaggctttgcggtccgttcctcctgcatagccggtcagttcgccgtttttgccggtaacgcggtgacacggcaccagcacggaaaccggattcatcccgttggcccgcccgacggcccggacagcgcgcggtgaggataatgatgccgccagcatactgtaagtgacggtactgccaaacggcacagacaataatgcatcccagactttttgctgaaaaggtgttcccggcagcaccagcggaacggtaaatatcatccgtttaccggcaaaatagtcctgcagttgtgattccagcagcgccagatgaggatgatttccgtctgtgaccgccattttcagccgggcagaaaccagctgtaaggtatcttcgcggcggttgtcttccgtaaattccagaaaacaaacaccctgctccgttgctgcggccgacatatcacccagtaccgtgctgaattgtgtacgaaatatcatcagaattcctttattttccgtgcatcactgtcagatgtaccgttttctttacgaaatcgtatattttatgagttaaaattgattttattgtgctcaacttcttttgagtgaaaacttgattgaactcacactaatgagtaaagtacatcccaacgatacagcacattaactgtaccagtttagattaacagataaacacgttcacctgagtattgaacattattttcagaaataatggaggaattgttatggctaaattaattaaatccacaaaaacaacttttgatcgtattaccactgcagttatgacaatttctgtaccgcgcttcttttaattaatacgcgacaaattgccggtgccgctgtgtttatgcggcacaaaaaaaatcgacagcctgaatgctgtcgatttttttattgctgttattccgtaaaataaccggttattgcgcactcttactgatatccggcacttttgccagatcagctgcaatcttaacggtttcatcaagatacgcatccggcccttcataatctttcggcagtgcctcaagatttgccagcggtttcttgccttcacgggcataacgttcattaatccgtttcagcttaatcccttccagttctttatcttctttatcacgcttcgcgtaattcagggaaataatatactgagtcggtttattggctttaaaccgtgccaggtcttcgtaaatataagcgaattccggatcggtttttgaacgttcctgatatttctgtgccagttcaggtactgctttacggataatatctgtctgtgaatactgcgccggggcaatgctgtcccacggtaatgcattatcctcaaaactttcaccgatatcatcgttatcaaagccggtcggcataataatatccggcgtgacccctttgcgcggggtactgccgccgttaatacggtagaatttctggatagtatattgcacagagcccagatccggccattcagggcgcagcatctggtcgtaaatacggctgaccgggcggtgctgctgtacagtacctttaccgaaggtcggctcaccgacaatcagtgcacgaccgtaatcctgcatggctgccgcgaaaatctcagacgcagatgcgctcaggcggtcaaccatcaccaccagcggacctttgtagtagatgacatcatcgctgtccgcatcttcacggacacggccgttgttatcccgcacctgcaccaccggaccactggtgataaacaggccggacaaatcaaccgcttctgtcagtgcaccgccgccgttaccgcgcaggtcgataatcactgcatccactttctctttggccagtttctgcaactgggttttggtgtcattggtcagacccacatagaagcccggaatattgagcaccgcgactttctggtcgccgacctgtttgatggtcattttcaccgctctgtcttccaggcggatctgctcacgggtcagggtcacaatacgtggtttggcccctttggtatcacccagcacttccaggcggactttactgcctttggcacctttgatttgtgacaccacatcatccaggcgccagccgaccacatccaccatcggcttaccggcctggccgacggccagaattttatccccgaccgccagttccttgctcttcagcgcaggaccaccggcgaccagtgaattaatcacagtgtaatcatcatccatccgcagcacggcaccgatgccttccagagacaggctcatttctgagttaaactgctcggtattgcgcggggagagataactggtgtgcggatcgatctcgcgggcaaacgcggtcatgatcagctggaaaacatcctcacttttcgtctgtgtcagacgtttaagagcgtaggtatagcgcttggtgagggtttctttgatttcgttgtcatctttgccggacagtttcagggtcagccagtcatatttgactttggcatcccacagtttatccagctcggcttctgtctgcggccacggtgctttgctccggtccacatcaatgacatcgtcgccgtcaaaattcatcggctggttcaggcgggtcagtgcatactgaaagcgctcaaaacggcgtttttgtgacaggttaaacagatcgtataacggctgtaattcccctttacggagataattgccgacatctgctttgtttttactgaatttcgccacatcagacgccaaaaagacgttgtggctgtaatccagcagattcagataacgttccagaattttcgctgaaaattcgccgtccagctgaaactgacggtaatgggaatgcagaaaccgggatgtcacacgctcactgaccgtggagtgctccggtgcctgctgagtatccggcagctggctgattttgacatccggcagcgcagaggtgccggtttttgccatcgtattgccggttaaactaaatccgatgagcaacgccaggggtaaaaatttgttcatgcctcggttgactccgtatcagaattttaagtgttccgcacgcacgatcattgccaaccctgaaggcagctgaacacgtacaccgtctttggtgatctcgagaacctgcgcatccataacgccggaaccgactgtcaccttcagttgctgccccaccttcagtgcctgaatatcagtgattggtgtcagttcagactgagattcgggacgtggtgcacgtggtttacgtggtgcatcagcggatttcggcgacggagctttaccggtacgcggcgctttaggcttatccgtacggctgcggcgggagtcagcggcggctttatctgcctgacgcggttttttctcaccgtcctgctcacgtttctgcgcgcgctgcgcctggactctggctttcgcttccgttaactgggtacgggcatgttcaacatgttccgcttccagatcgccgcaatcgttaccatccaggtcaacacgtttagccccttctttgacgccgtacagatagcgccagctggaggtgtacatccgcagtgcggtacgtaactgtgttttactgataccatcttcttcagtgatacgactgacgatatcgcggaagatgccgattttcagcggacgggcttcgccttctgccacaaagcattgcgggaagcgctgagccaaaaatgaaataatttctttactgctattcaacttgggttgattttccatgaattttcctgattacaacggtgctttgccaaccagcaggcatgaacaggcgtcattataatagtgttacagacaaatgctatgctcccggaggcctaacttgcgatcatttcacgatatttcggcataaagcacgttgccagatgtgcgcagagcgcgtcattcaaggctttgagaccaatttcatcattattatcaaaacgattaaaaaccgggctgtcgatatccagtacgccgataatctgaccatttaccacgagcggcaacactatttctgagttactggccgaatcacaggcaatatgtccggcaaaatcatgcacatcatccacacggataacctgcccctgagcaaccgcagttccgcagacaccgcgaccaaccggaatacggacacaggccactttcccctggaacggccccagcacgagggtatccccctgaaggagatagaatccggcccagtttatctgttccagctcgtcaaaaaggacggcactgacattggacagtgtcgcgatgacatctttctcatcactgataagcgatgttaaacggcgggttaaatcctgataaaacgcgagtttattcatgtgtcacactacagttacgggttaattatccggttaaagtaatgtttaatttatatcaaataacggggcagccctataggattattacaaatcctttcgcatttttcgtgaaaatgagggagaaaaacggcgggaataaaaaagagaccggataaagtcctctatccggtccagggaaaaaggctcatagcgagccgtgcgctaaaattgccattgaaaatatcgtacaacctacatgattaagattagtcggtttggttacatatgcaaaatatttatttatcaaatcgttaacatatatctgatttaaatggcttatatttcagctggttaattaataaccgaatattaatcgttaaatttcataattaatatgtgttatttatcaccacacagcgcaccggcagcttcaatgatcggggtaagatccatgcctttttccgtgtctccgatttgttttaatgtgataactgagaggtcagtcacctttattttctgctcttttgcctgttgtgcagccacatcattcagcggatacgacatcagtgtggacggattaatcacccacagtgcatttccgtcccggcagttgatcatcacttcctcacgggtaaacggccacttttcaccaaactcaaacttgctgatggttttcagcggcgcagcctgtgccgcacctgccagtaaaagaggaattaatgccagagctttcttcatagtgtgtcccggttgtcagcctgtccggagttatgcaggctgataagttgcaaaaatcgccaccattaaaatggccagtgtgccgagaattatctcaacccagctgttaatcatcaacaggcggaagcggcctgattgtgcgattttcggtaccaccgcataacggtttatcaccgccagcagcaccatcgtcagcaccagcccggttttcagccataacagtgcctgataatcactgccgctccactgtggccagtccggcaacagcagtatggtgctgataagaccggttgccagtaccagaaagacagcaagatgccccaggtttgaaaaacggatcagggttgccaccacttctttcggcagtccctgcgcgagtgtgtcacgccgcagcaggatcagcagacagaccagaaacggccacaacccgccgaaccagtaagcggcactgagcaggtgaacaatctgattaagctgatagagccgccctgtccagccgctgtgcagcatgccgtggccggtaaaggcgtgcagagccagcatcgctgcggcacagatcagaaacaggcagctttgcgcccggccggacggcagcagcagtccgccgcagagaataacggcaagcaccagctgccagcgccagatctccccgaaagaggtggaaagcaccgcgagaataatatccggatcctgcatatccgcccagccatcccccatcagtgccgcctgtaacagcagccagaggaacgttgtcaggaccgtaaacacagctgcactgcgggcggtataacgcagacgggcccgcagcagcagtgccacccggtcgccgggcagcagaacagagaacagaccgcagcccgcaaggagcatcacggccgtaaaatgaatgaagcggcagataatcagcagcgcttccggtgtcagttccataaccggcttatttcaccgtaaactgatagtcaccgttggttttgtgcccgtcaacagaaaccactttccattcaacatgatagacaccggccggcagagtttctgtcagcggcaggatcagacgggtatcattcccttccgccagctccggttttccggcagcaacaggtttattctgtgcatctttcacactgattttactgaatttcagttcaatcccttccgaaaaatccagagagatattttccggtgagccggtcaccgccgcatctgccgccggaaccagggttttgacatgagcgtgagcaaacgcctgctggccggataaaccgacaaataaaacaacaacagcagataatttgcgccagtgcgcggtcaggttggttaacataatggtatgcctcatttttgcaggtgatgtaattatgcgggacatactagcgcaaccgggggcattgcggaaaccttcacaggccggagagtgttttttgtgatcggtaacacaaataaaaaccacacaaatatcagtacattatgataattgtgtggttatattataaacaataatgctgtcaaaaataatcagcttgcggatggttcgcttgccatacggcccagatctttatccagcaggaacagtgattttccgctgtcacccaccattgcgaatttatccagcacagatttaaacagtttttcttcttcgtgctgttcagccacataccactgcaggaagttaaaggtggagtaatcctgtgaggtcagcgcagcatgaaccagcttattaatttcatcagtaattaatttttcatgttccagcgtcagggtgaaaatatcactcactgaactgaattctgacggtggtgcatcaatggccccgagcagcggcatcgcgccggtatcgctgaggtaattaaacaggcgctgcatatgttccatttcttccgctgcgtgcgctttcagaaatgcggcagcaccttcgtagcctttatcagcacaccatgcgctcatctgcagatataaatttgaggaataaaattcaagattcagctgggcattcagttgtttgaccatatccggctttaacatatacaggctcctgtcagtcgtttatttcatcatctgcggtcattatgcacactcctgccgggaagaaaagtgctatttaataaattcacaacatattgaaaacaaaataattttataaagataatcagaattaatcgcattctctttatggggaagctgaatacacgtcaatccgggcttgcagtcaggcggcagctcagttaagttaaggccgtcagccgttacaggagcatatcgtgagttataatcttgccgaactcagtcaggaagagatggataaaatcaatgcggacttagccgcatccggtgtcgcctttaaagagcgctataacatgccggtgatcgccgagcaggtgcagcagacactgcctgaatccctgcgcgcctattttgccgaacgtctggtgttttaccgccagcgcagtgccgggctttcccgcctgccgtatgagccgaacgccaaacgatgaatataataaaggcgtgcctgagcacgcctttttacggtttaacagccagtgtcattactgcggcagactgtatgtcatggtcttcgccgcacaattgatatcaacggtgtaactgacctgctttttcgagccgcgcacaaccagcggcacgctgtaattaccgtctttctcagtcacttccgccacattcacccaggcaaccggtttgctgcccagcagcgctttgtcatcctgccagcgcgggtaacggctctgcacaaagtcatattttacctgtgccgctatctgatctttgttcagcgattcacacgccgggaaagtcaccatacgctcatttttgacttccgccgtggccggagcctgtgcgctgacggtgaatgccagcagaatacctgcacctgccaatccggtacgggtgaacagattcattgccttcataaaacctcctgttttaatcccgaaagagactaaatgtcatttttatacaatagcgcttaattaaatttcacttaatgcttattgctgcaaagtaacatatttattatcaggaaattgtgacacttgttaaatatttgtttctattcttcgctgtcgtcatcttcctcatcaaacagcgcgcggatctgctcaccgccgtgatgccgttcgcgtaactccgccgcgacctgtgcgatagcctcaccactgctcataccttcctgcatcagggtgtggatccgctcaactgcggcctgctgttcttcatgacttaacgcgggcattccggtaaacataatcaccttctataacatttcagtaaaaaacacattatactcataaagatggcgggacgcatccgcctgttttccgataagataaccggcagtttccggacacagattactgacagactgaattatgacatcacattccgtacctgtactgacaccacttgactatcatcccggtctcgccctgaccctgtttgccccgctgtcacatcagccgtgggccatgctgctgcactccggcagtgctcagcatcagcataaccgttttgatattctgaccgccgatcccctgatgacactcaccaccagaggcgatgagaccttaactgaagatagccggggccagcgcgtccgtcaaaatgatgacccgtttcagttactggatgcggcgctggcacagtgcgggctggatccgcaaccgcacgatgactacccgtttgcgggcggtgcgatggggttatggggctatgatctcgggcggcgaaccgagtctctgccgtcactggcacgaaatgagctgtccgtgccggatatggccatcggtatttacgactgggcggtgattgttgaccaccagcgtcgctgcgccacattaattacctataccgatcccgccgcgcgtctgcactggctggagagtcagaaagcaccggacagtcagactttcgccctgaccggccactggcagtccgatatgactgaagcggaatatcacgaaaaaattgcccgtattcatgactatctgcaggccggtgattgttatcaggtcaatctgtcacagggtttttccgctccgtatgagggggatgaatggcaggcgtttctgcggctgaatgacgaaaaccgggcaccgttttccgcatttctccgtctgccggaagccgccattctgtctgtttcaccggaacgctttctgtggctgaaagacggcaccgcagaaacccgcccgattaaaggtacccgcccgcgtcatccggctgatccgcaggctgatgaagcagaaaaacaggcgctggccgcgtcagagaaagatcgctcggaaaacctgatgattgtggatctgatgcgcaatgatatcggccgggtggcacttcccggctcggtcagtgtgccgtcgctgtttgcggtcgagccgttcccggcggtctggcatctggtcagcaccatcaccgcacagttaccggcggcatgccgggcagcacaattgctgcgcgcctgcttcccgggcggttcgattaccggtgcgccgaaaatccgcgcgatggaaattattgaagagctcgaacctgtccgccgccacgcctattgcggctccgtcggttatatcagcgcctgcggcaccatggataccaatatcgcgatcagaaccctgattgcggaaaataatcacctttattgccgggcaggcggcgggattgttgcagacagccgcgccgcagatgaataccaggaaacgttcgataaactgggccgcatactgacggtactgccggagaaaacatcatgagtccgcttgagcgctttattccccggtttcagttaacccgcccttccgaagcggaaattgccggtgagcgggatcgccgggccgccgttttgctgcctatcaccaataaagcccggccagggatcctgctgacacaacgggcggcatcgctgcgctctcatccgggacagattgccctgccgggcggcgcggcagatccgggcgagatttcccccatcgccaccgcactgcgcgaagcgcgcgaggaagtcggtattccgccgcaggccgtgcaggtactgggacaaatggcaccggtagacagcgttaccggcttccgggtcaccccggtagtggggattattccgccatatctgccactggccggtaacccgcaggaagtatcagatatttttgagctgccgctggatgccgccctcgatctcagccgctaccgctacattgatatgacacgcaatactgtggagcgccgcctctatttttacttatatgagggacggatgatttgggggttaacagcgggtattttatatcgtctcgcaacgcaagtgaaaaatgattgatttgtaaccgaattcacacttctgccctatttccccctgctttttttcatcaggtatgcccgaattttatccgaaagcgctgttccgcagtgaaaaatgcgataaactactttatccgtgtgagcaaataacagtaaagtaacgcgctttacgataaatcactattacattgttttttaaggagtctgacgtgattagcgtttttgacatgtttaaagtgggaattggtccttccagctcccacaccgtagggccgatgaaagccgggaagcagtttgctgatgagttggttgaaaaaggtctgatttcccgcgtgacccgcgtttctgttgatgtctacggatcactctccttaaccgggaaaggtcaccataccgatatcgctattattatgggtctggccggtaacttaccggcaactgtcgatatcgatggtatcgccggttttatccgcgatgtcgaagagactgagcgtctgtccctggccaatggtcagcagactgtggatttcccgcgtgaaggcggcatgaatttccacaccggtaacctgccgctgcacgaaaacggcatgagcatcaccgcatttgccggtgatgaagagctgtacaccaaaacctattactccatcggcggcgggtttatcgtcgatgccgagcatttcggtcaggataacgccaacgaaacaccggtatcctacccgtatgcctcagcggaagagctgctgaatcactgccatcagaccgggctttccgtctcctccctgatgctgaaaaatgagctggatatgcacagccgtgaagagatcgacgcgtatttcgccgatgtctacaaaaccatgactgactgtatcgctcacggtctggaaaccgaaggcattctgccggggccgctgcgtgtaccacgccgtgccgctgcactgaaccgcctgatcaactccgccggtaaactctccaaagacccgatgaacgtggttgacctggtcaatatgtttgctctggctgtcaacgaagaaaacgcagcgggcggccgcgtggttaccgcaccgacaaacggtgcctgcgggatcgtccctgcggtactggcgtattatgatcactgcatcgagaaagtgacaccggaaacctatctccgctacttcctcgcctgcggcgcggtcggtattctgtacaaaatgaacgcttctatctccggtgcggaagtcggttgtcagggcgaagtcggcgtggcctgctcaatggcggcagccggtctgactgaaatcctcggcggcagcccggaacaggtctgtgtggccgctgaaatcggtatggaacacaacctgggcttaacctgtgacccggttgccggtcaggttcaggtgccgtgcatcgaacgtaacgccattgcctctgtgaaagcgatcaacgctgcccgtatggctatgcgccgtaccagcgcaccgcgcgtttctctcgataaagtcatcgaaaccatgtatgaaaccgggaaagacatgaacgccaaataccgtgagacatcacgcggcggtcttgcaatcaaggttcagtgcgactgatttcgtgatttaactcacaaaacataattcactgacattaatatccctgcaacattgcagggatattttttacctgaagcgcatcagcaccggtcatttttcaatcaatctgtgatattttcagatgtgaatgtttataatatgtaaaatatcatagtgtataactctgcaaaataatcaaacaacgcctcatcattctgacaagcagctcattcaacacaataattaactataattaagtgtttaatgtttctgctttgttgttttctgacggaaagcaagtttttttaccttcatagaatgttaaccttctatttaattagtgccccgaaattaattatcgctgtttaaacgtaaataattagcggtatcacgggcctgagactatctttacaccggagtcttacggttttttcctgacccataaaagattctgtgtaatacacaagaaccatcctgactgatgttaagggggaacagaggtgagtatagccattatgattggcacccacggcaaagccgctgagcagttactgcgcacgacggaaatgctgatcggtgaacaggagaacgtctccttcatcgatttcgtaccgggggaaaatgccgacacactatatgcgaagtacaatgagaagctgcccggtttatcaaccgctgacggggtattattcctcgttgatacctggggcggcagcccgttcaacgcagcaaaccgtattgtgactgagcaggatcaggccgcaggcggcaacagcaattatgagatagtcacaggcgttaacgtgccgatgctggtcgaaacctttatgtgccgtgatgataatccgtcattgcaggaactggttgcggtggcgctggaaaccggccgtgaagggatccgcgccctgaaagcacaggacgaaccggcaccgaaagcggcacctgcaccaaaaccggcctcacagccggcggcaccggcaggcccgggcggacacatgactatcgccctcgcccgtatcgatgaccgtctgatccacggccaggtcgccacccgctggaccaaagaaaccaacgtcaaacgcattattgtcgtcagtgacgaagttgccaaagacaccgtccgctcaacactgctcaagcaggttgctcctccgggtgtaaccgcgcatgtggtggatgtggcgaaaatggtgcgtgtctggaataacccgaaatacgccaatgaccgctgcatgctcctgtttaccaacccggcagatgttctgcgcctggtggaagacggcgtggagattaaatcagtcaacatcggcgggatggccttccacgaaggtaaaaagcaggttaacaatgcggtttctatcgatgaaaacgatatcgtggcattcaaagcgctgaatgaccgcaacatcgagctggaagtccgcaaagtctccaccgattcaaaaataaaaatgatggatttaatcagcaaagctgaaagttaatttgacccattactcaatacaaaatttgttgtctgcaaaatgactggttaaaggagaaacacaatggaactttccgttgtacaaatcgtcctggtcttcatcgttgcctgtgttgcaggtatggggtcaatcctcgatgaattccagttccaccgcccgctggtcgcctgtacgctgatggggatcgtactgggtgatatgaaaaccgggatcatgatcggcggtacgctggaaatgatcgcgctcggctggatgaacatcggtgcggctgtggcaccggatgcggcgctggcatccatcatttccactatcctggttatcgccgggggccagaacatcggtgccggtatcgcgctggctattccgctggcggctgccggtcaggtgctgaccattatcgtccgtaccatcaccgtggccttccagcacatgggtgaccgtgcggctgataagggaaatctcaccgcgctggggatgatccacgtcggtgccctgctgttacaggcaatgcgtatcgctattccggcggttattgtggccgtgtctgtcggtactgatgttgtccgtgaaatgcttgactcgattcctgactgggtcaccaacggtctgaatatcgccgggggcatgattgttgtggtcggttacgcgatggttatcaacatgatgcgtgccggctacctgatgccattcttctatctgggtttcgttaccgcggcatttactgatttcaacctggttgcgctgggtgtcatcggtgcggttatggctgtgctgtatattcagctcagtccgaaatacaacaaatcggaagtcgttgtcgctgccggcagcaaaaacgacctggataacgagttagactaagaaggtgagcaacatggttgatactacaagcaacgtaaccggcagaaaacagttaagaaagagcgatatccggggtgtcttcatccgctcaaacctgtttcagggttcatggaactttgaacgtatgcaggcaatgggctacgccttctccatggtaccggtgatccgccgtctttatccggaaaataatgaagaacgcagacaggctatcaaacgccatatggagttctttaacacccacccgtatatggctgcacctatcctcggtgtaacctgtgcgatggaagagcagcgcgctaatggtgcggctatcgacgatggtgccatcaacggtatcaaagtcggtctgatggggccgctggccggtgtcggcgatccgattttctggggtaccgtgcgtccggttttcgccgccctcggtgcggggattgccatgaccggcagcctgctcgggccgttactgttcttcttcctgtttaacctggtccgcctggcaacccgttactacggcgtggcttacggctacaaaaaaggcctggatattgttcaggatatgggcggcggcttcctgcagaaactgacggagggggcgtcaatcctcggtctgtttgtcatgggtgcgctggtgaacaaatggacaaaagtgaatatcccgctggtggtgtcggaaattaaaaacccgaccaccggcgagatggaaatcaccactgtccagaccatcctcaaccagctgatgccgggcctgatgccgctgctgctgacattcggctgtatgtggctgctgcgtcataaagtgaatgccctgctgattattatcggcttctttgtgctgggtattctgggttatgtctttggtttcctgggactgtaaccggtaaaaacacgttctgacgaacgcgtattttcagaaagagtatggtagtttaaacgggaggctcgcctcccgttttctgtttcacttcaggggaaaagaaccacaatgagtgtaaatgatattgttctgctggctgtgattgtgctgatgctgctgtttgccgtctacgacgaatttattgttaacacactgaaaggcaaaacacagctgcggataaaactgcgccgtaatcaccgcgctgacgccgtgatctttatccttcttatcggtattgttatttataataatataaccggacacggcagcccgttaacaacttatttactttccggctgtattatcattgctatttatctggcttttattcgttcaccgaagttatattttaagcaggacggatttttttacgccaatgcatatattaaatatgacagaattaaaacaatgaatttatcagaagacggtattcttcttgtgggtttggaaaatcgtaaaatttacattaaagtcacgcatcttgatgatttacaaaaaatttataattttatgattaataataaataataactccttctttttatccccctacagaaataaagactaatgatgatattagtctttattatcttattaaaatactacgtaatgaaaatcattctcattagcatcttttaaaactaaaatatatattcttgccttttttattttctgtgatatctttccggtcacgtcattggggagtagcctgttctgttattaacctctcagggaaataacagaaaatccgtgtcaacatacttgcatgatattatatcagcatggtgcggatgccgtttcggttggcaagaccatagacacgcagttcaccggaggtcggggttggattgtgtgtatatggataagctacccgaccgagactgagtttatgagtttttacgccaccctcgtccttgccctggccctgtctatggatgccttcgccgttgctgtctgcaaaggcgctaccctgcacaaaccacctttacgtgaagcactgcgcaccggatttatctttggtgtgattgaagccctgacgccgcttatcggctgggctatcggtatttacgccagccgctacgtgatggaatgggatcactggattgctttctcactgctgtttatcctcggtgcccgcatgatttacaacagcgtcaccgccggtgatgactgctgcgcccgccatgaaaaaccacagcgccacagcgcattacatcttgccaccacagcggttgccaccagcctggacgcgatggcgattggtgtcggccttgcgtttctggaagtcaatattgtccatactgcgatgactatcgggctgatgaccatgattatggccaccaccgggatgatcctcgggcgttatatcggcccgatgctgggtaagcgggcagaaattgtcggcgggattgtgctgatcctgatcggatttaccattttatatgagcatattggttaatcggttaatcactcctgatgacccgctccggcgggtctttttgtttctgaatcaggcttcccggcggtaaacccggatcagaaaatctgtttcgcaggaaaaggcggtttctgctgccaactgatgtttcacagcctctgttgctttccaggcaaacggggtcattgaaagcagtgcaagcgcatccgcgccgttcagtatcatcgggtacgccacctgctgctcttgtgccggaccgaatcccgggaaatgctcttccttcagcgggtgcagatgaacttcatcataaataagggatttcagctgatacagatgacgcggccccggggtcacggtaatcacaatgccgcccggtttcaccacacgggttaactcatccggattacacggtgcatagatccgcagcaccccatccagactgttatcctcaaacggcagccgctggctggatgccacactgaagctgacctgcggatagcgttttgcgccgtagcggacagcaaccttcgccacatccagcccgtacaccgtcacctgccgtgccgcaaggctttccgccagtgccccggtgtagtacccctcgccgcagccgatatccagtacctgctccgcctgtgccggtaaatgctgttcaaatgccgcgattacctgatcccgcatcgggcggtaatgatgattatccagaaatgcccggcgcgcctgcatcatctctttactgtcacccggttctttcgagcgcttgaactggacaggcaggagattgatatacccctctttcgcgagatcaaactgatggtggttttcgcagctgtaactgccggagcggtgcgtcagcgggtgctggcaaagcggacattggtaagacataatcattcactgtgaaataatgtaagggtgcaaccggcaacggcctgtgccggtgacggaaaatctgaggcgaaaccataccatgaaaacctactggtggcaggataaaattgatgattatcagcaatggcacagcctgcttgtcagggttaatcccgaaacggtaaatgaagatgcccctgcgctgctcagcggccataacagccggatgcagctgcagctgcgtggttatccgctgttctgggcaaccgtactgcatgatcactgtggtgtctggctgatttataatcaggaccatccggctcagcagaatctgttatcgccgctccgctcacaacaggctgagaaaattgccgctctgccggaagaagaacaaaccccgcagtggtgccgttacttcgcccgtgatttgcaggaacggccttctccgctgctcgcggccggagagtggctgctgcgcccgatgaatatcagaccgccgtccgccccttatgttgtcaatgccccctgtccccgggaaaaatggtgtttccgttcaccgccagccaaagatatcagtaatgcagactggctgttatacagtgaagatctgccggatctgcaatcccccggacgggttatgtttgcggactggtggttcggcggttaccagctgctgccgcgttacgcggttgagccgcaaagcagccgcctgaaatactggcgcaaagttgcccgcgaaggaaaactaccgccggttctgatctggtacatcagcggcctggcatcctacattatactcgatggccatctgcggttgcaggcggcgtatgacgaaaatattccgccttcctttattgtgctcagccagtaccatgaatgcagctatgagccggatcctgccgcgattgaaaaagtgcagcaggcaatagcacatcagatggataaaaatccgcatccggatatccgcgggatcaaccagacattaatcagcctgtatcagaaccgctacgggcggcactccacccgcagccgggcaatactgggcgacggccgttcatgggaagaggatgtttcccgttatctgcgccgccacggagacaccgggcacctcacggctattttgcagcggacggaagaaaccgcgggatagttaatcagataaatctgctgtgaatattttttgttcacctcagaatacatcattatccgtcgtataaccctgtcagaaatagtataaggaacatctatgttcagactctcccgcacctttattgcaccactcctgctgttattttccgcctcgctgtttgcggcagccgaaaccaaacctgcggcaccggcagatttggatctggtctttgttctggataaaagcggctccatgtccggttttgaacaggacactatcggcggttataactccgttcttgccgaaaaccgtaaaaaagaaggcaatatttacgtcactaccgttttattcaaccacgaaaacagcacgctgcataaccgtgagcctatcagcaaagtcaaaaacctgacactggatgattattctgtcggtggcaataccgcattactggacgctgtcggtattactattgataagatccgcgaaaaccgcaaaattaccaaaaataataatgtgttatttgtgattattactgacggcgaagagaatagcagccgtaaatacagtcgtgataagattaaatcaatgattaattctgcggaaaaagaagataagtgggactttattttcctcggcgccaatattgatgctatcgcagaagccggtaatatcggcattaaaagcgacaacgccaccggttatgtgcaggataaagctggttacggcaaagcgtatgatgccgtaaataaagcagttgaagtaaaacagcaatcaaaaccgattacttccgaatggaaagcggaagtcgaaaaagataacaacgaacgcagtaaaaaataacaaaacacctcttatttattcaccaaaacagtacggtccgccgtactgttttattttctcaccccgccgttctttttttcccgcaactctgcttaccatgaacatcaaatgactgaagttcagccggataaatacgccaatttgactatattaatgctaataacaatcacgaggcgtaattatgtttaaaaaatcctgtcttttattagcattaattccgtttatttctgttgctgcaccgggtattgatgaaagtgatgatgtcacaacctcaatgcctgattttgccaccggtaaaattgaacaatctgccggtgttaaattaggttccggatttatcagtaacgaggctaataacacaattatcatcggtaactctgccgataaaaatgaaatcccgccggaaaacccgaacagcaaaataccggccaatcagccaaagccaccggtggcaaaatccgactctgatattgctatcggtaacagtgcctatgcggacggttctgcagacggccaggcgggcgctccgtcaatggctatcggtaacgctgccgttgccaaaggtgaaggctctgttgccctcggcagcaaagcggtttctgacggaatgggcggtgttgccatcggtgatgccgcgaaacagaaaaacggcgggatcagcatcggttccaattcaaatgccggtaccggcggaacaatattagatccggcaggtgacccgatggcaattaaccacaacgttgccatcggtactgatgcaagagtcacggatggtgtcactgactccatcgcgatcggttccggctctgtcgccggtaaaaccagcggtgatgcccgcttcctggataaaaccgatgctgccgcgcagtacacaggggaattatccatcggtaaaaaagcagaagcgccggaatggggtgaaaaagatacctaccgccggatcaccaatgtggccggtggttcagaagataccgatgccgcgaatattgcccagctgaacgtggtcaataataccgccacggccgctgatacaaaagcaacggatgccaaaaaagcggcagatgccgcagacggtaaagccactgaagcacaaaaaacagcggtaacagcaaataccaatgcgattgatgcccgtaacacggcttataccgccaataccacagcgcagaaagccaataataccgcgaataatgcgtataatctggcaacacataactcagcccgtattgataaactggagctgcgttatgatgaactgaacgacaagatgcagcgcggctttgcaatgtcagctgccacgtcaaacctgttccagccgtataacgtcggtaaatttaacctcagtgcagccgtaggcggatataattccgaaaatgcagttgctgtcggcagcggctaccgcttcaatgaaaatgtggcggttaaagccagcctggcgacctcaacatcaaacggcggtgatgtcatgtacggtgccggtatgaatctggagtggtaatagacagataaaataacacaggccgcctgacaagcggccttttcattatttcgtaccggaagagccagcaccagcagacttattcccgtaaagtgataattcaggaaaatataaaatcaaaaataccggtattgtataaaataaacagcgttaaactctcaaaaacagtctgaaaccaaacgctgaaccgggaccgttcaaagcacagaaaagagaataaccgaaaataaaaatacaattacaaccgccgagagtaataccctgaatatccccttcaccgtctgttcaagaaataccagtccgtgtttgttacccatctcgttcaagatccatcattttactcattttatttttagttatgtgaaacccatcacgatatgatgatattacttattcatttagtcaataaatatactgttaccggactctttttttgatgaccatcagtgtcacccgctctgcagacaaggcagcgccctgcgttcagatctgacgtattttttatccgttttgctcttcaccggggaaaaaacacattcccgcaaccgaactgaaacaattcatcggatgctgccaatcagttgataatgctttatcactgaaagtatgacgcaacgcaacaaacccggtatcatcatgttattactcagcttttacccttgcaacactatgcctttcataaaacagatctgacataaatacaacgttaattgcaatcaattccaacttattcaaaataaccagatttataatccgtaaatgccctttcaatctccccaaaagcagttcatctgttttttttactaaaaaaatgtgtctgagcgcaattttcatttgccttaagatcgaaaacccaataaattacgcctcaaattggtttaacccaaaattttcatgcagtcatccgcaacgatacaggcgtgcctgacacaacctggtttgcatccccatttttatgatggacatatattattaatataattaactaatctgattttttaacaaaacttttgattcaacaccgggtttattgctgacaccgcaataagtcacatcatcgtattacctgaaaagaataaatatcatcatggcttacgcacataaaaaacactttaataaaacattactggcattattactgacttcacaaagcacactggcattttccgcaatggattatgaagtctcaaagataaaaaatattggtcagtcatcagccatttctgctgatggaaaagtaattgccggaacttatgaaatctcaaataataactatcgcccatttatgattgttggcggcaactccgtcgatctgagtaaatataccagtgggaataatagcatttatatctccggactttcagcggacggtaatatcgccaccggttatatcgttgatgaaaataacagattaaattctaaaatgtatatttatgataccaataccgatacggtgaatattcctgatcagcaggcatttaccaacgtcgcttcccagggtatttccggtgacggtaaaaccgttatcggtattgcagacgaaaaggccttccgctttaccggacaggacggcattacattattagatccgtcagaaaccgcaacctccaccgcaaacggcgttaattatgacggcagtgtgattgtcggccgcttcatcagcggcagtggtcaggcatttaaatatactgatgataaaggcatggtttcactgggcacactgagagaaggtaatgctggcgaatccggcgctaatgctgtatccgctgacgggcttattaccgtaggctggtcaaatatcagtgaatatgaaacacatgcgatgagtcataccgataaagacggtatgcgtgatctcggcaccctgaagaaagataacagcggctattccactgcgtcatcagtttcacgtgacggacaatttatcgtgggttcatccgataatgaagatgatatcgcacgtggctttgtctatgtttcaggtgaaaaaaagatgtacgaactgaaaccaatacagggaagctttgaaggtgaatccagtgcggaagccatttctgcggatggcaaagtggtcgccggttatgttcagaatgacaataatgaaacatccgctgttttatggaaactggactataaaccaccaatgaccccgcttgagccgtcaaaaccggttgatccgtctgaaccactgacaccgtttgagccatcagagccggtcaaaccagtcaaaccaatcctgccgctgacaccggttgacccggctgataacggcggcatcacggtttctgatcctgttgatattattaaaacccgcaatacagtaacaaaactggcaaacagcagttatcaggttctggatttataccagaccgccctgtataacctcgcggaaagccgctgtcagatgggtgacgataattactgcgccggtctgtttacccaatacgacaatgtgcatcagaacagccgtgtggctaccggcgtatttggttcattccgtttaccggcagagaattggacgctgggcgcatcactgaatttcgccgtaaatacccgtctggccgatggttatgacacccgtggaaataatcatcccggcgttggcgcatggctgcgttatcaggaaaacaaagacaattccggctttaacagtgagctttccgctgcatttttacagcagggtctggaaatcacccgtcaggcacaacggggcactgaaaccggcaaaggtaattctgatatcaaaggttactatgtaaaattcaccaccggttatggcattaccgtcagtgaaaataccctggtgacaccactggctgccattaaatatcataatgtcacccgtgccggatatacagaatcaaatagtattgatttcccggcaacctatggccgtgccggaaataaaaatcttgatttacaactcggcgtggatttaaaacaccagtttaataagagcacagaactggatgcaggtatcggcgcggatattaaactcagtcaccagcgtgatgcctttaccggccatattcagtatgtgaacgatgctgattatatttatgatcgcggcaacagccagagtataaaaccgtatgcccgtgccggtgtgaattactttatcacggagaactctactcttcgcggcgatattggttatcacaccactgattaccgtaatgatggtttgcaggtgggtctcagttattcataccactggtaaccgctgtttcagctaattaaaagcatccggcaataatcatttattgccggatttttattatctgcacaacctgttttatttatgttttcccgtatccgcagaatatgagagataatgcacaaccgttttgctccggataatagcatttaactgactgtcaatccggcgatcatccacggttgcccgtttatgctgacggtgatgttctgccggggatgacaccataaatgtctccataaattcatccttcgtaccgggaaccgaaaacagccctctggaatagccgccatcccgtaaccggatccgttttaattgttccatcagcgcaaagaattgcgcctgatgttccgcatccactttatactgaatacacaccatcaccggttttttatcttcctcagaataaaacggtaattcctccggcattgtcagatgttcagacggtgataaattgatgttgtcgtggtcaatttttactttcagcacacataaccagacaacaataataccggccgccgccgcaagcagtgcgatcgttattgatgtgtgtgaggcaatctgtccccagataaatgaccccagtgccattgacccggaaaatactgtcagatacagcgccagccctcttgctctgacccagtccggcagtgcagtctgcgctgacaccatcagcgtggagagcgtgatcagccagctgaacccggcaataatactgccggcgattgccagatattttgatgtggtcacggcaaagatcaccagcacaatgaccgttccggcagtcccggcagtcactaatattccggtactgaacctggcccgcagcgcagataaactgaatgccccggcgaccgccccgataccgatactggtggttaaaatcccgtataacgtggcatccccctgaagcgacactctggcaaccagcggcagcatcgcccagtaagcactggcgaacacaaagaaggcggcggctctgataatggttttaatcaatgccggactgtaacgggcatagcgcagcccggaaatcatcgcggcgacaacagattccgctggtaaggtattttctttgtgtttctcccctttccaccaccataccgccacaataatggcaataaaactgagtgcattaagcataaaaggaagataaagccctacctgcgaaatcagcacaccagccagtgccgggccgatggcacggctgatattaatccccatactgttcagtgcgatccccgcttttaattcatgcggcgccacaatacccgggacaatcgcctgccatgccgggcctaaaaaagccgcaccggatccgagaataaaggtaattaacaataaccagccgatactgaccacattgaaatagaccagaacagccagtaatgcagcggcaaaaaacatcatgatattgacaaatataagcagcttgcgcttatcgaaaatatcggcaatcgccccggccggtaaggctaataaaaagaccggcagtgtggtcatcgcctgaatggtggcaatcatgacaggatcaggactcagattggtcatcagccatccggcaccgacatcattcatccatgttccgatgttagaaaataatgtcgccatccataacacaaaaaatatacggttacgcagcggcgaccaggctgatgattgcggattagtcatgtgaatatgatctccggtttaatatggccggtgttttaccaccagccacagtattaacatgtacagcgataattaaaatgcaaaacaggaacagcccagcgcgccccagaaggcattatcatccgcaaccggcacagacgatttacgggcaatatcatgctggtgtccgtgaacatgacacgaaccgcagcactgatgtaactgattcaggatcgcggctttattttcctgctgtaaataagagtagtgcccgggcactttaataaccggtgaccagtcaggtaaaaccggaattgacggcggtgccagcggcccgaaaataccgttgccgtaaacaacctcgccgttcaccaccgtcaacagggattcaatccctttaatttccgcttccggcacacgaaaataatcgtcagataaggcaataaaatccgcaaactgccctgatttaatctgcccttttttaccctgttcatcagagaaccaggagctgccgatagtccataactctaacgcggtatctctgtctaaccggttattgtcgtcatacatcttcatgccgccgactgtccggcctgacaccagccagtaaagggctgtccacgggttataactggctacgcgcgtcgcatccgttcccagaccgaccggcacctctgcgttcagcattttcgccaccggcggcgtgtgtttcaccgcttcgtgaccatagcggtccgcaaagtattcgccctggaatgccattcggtgctgaattgccaatccgccgcccagcgcttttacccgttcaatatttcgttcactgatggtttccgcgtgatcgaaaaaccagtgcaggccgtcaaacgggatctctttatttactttttcaaacacatccagcatacggctgatggattgatcataagtggcatgcagacggaacggccagcggtgctcgaccaggtggcggatcacggcttccagctccgcatccatattgtccggcagatccggtctcggctgcagaaaatcctcaaaatcagccgcagaaaataccagcatttctcccgcaccattgtgacggaaaaaatcggttccctctcccggcgacaccatcgatgtccattcgcggaagtcctccagctcctgtttcggacgctgggtaaataggttataggcgatacggatagtcagctgattctgttttgccagttctgcgatcacctcataatcttccggatagttctggaatccgcccccggcatcaatcgtgctggttaccccgagacggttaagttcgcgcataaactgacgggtggagttaacctgataatccagcggcagtttcgggcctttcgccagcgcggaatacagcagcatagcattgggttttgcaatcagcatgccggtcgggttaccgtgctcatcccgctgaatttcaccgcccggcgggttcggtgtctctctggtataaccgatcacacgcagtgccgctttattcagcagcgcactgtcataaagatgcagcacaaaaaccggggtatccggtgaaaccgcattgatttcatctaatgtcggcatccgtctttcggcaaactggaattcactccagccacccacaacgcggacccactgcggcgccggcgtcacatcagcctgtgcttttaacatcgccagggcatccgataatgacgggaccccttcccagcgcaattcgaggttataattcagtccgccgcgaataagatgaaggtgcgagtcattcaggccgggaataatcacccgccctttaagatcaataatctctgtttcttcattccggaactgcataacttcatcgttggttccgacagcaataaatttgccgtcacggacagcgacggcctgagcaacgggattttcacgatcgagtgtatgaatatcaccgttgataaatatttttgatgcgaagcgtttattcatgatgatgtgtttcctgtttatgaggaactcactgcttatcaaatactgttgtggcaagcggtataggaaaaaataaccggagagtagcccctccggttgttacgctgttatctgataacgcgctgaggtgctttatgaaccatagtataggcgtaatcgacacccataccgtaagcaccgctgtgctcctgaaccagccccattactgcgtcataggtttctttgcgggaccagtcgcgctggtactccagcaatacctgctgccaggtcacaggaatcgctccggcctgcaccatacggtcaattgaacgttcatgcgcatcaactgaggtaccgccggaggcatcagtcacaatataaacttcatagcctgcttcaatcgccattaaggtcgggaaattcaggcagacttcggtccataatgccgccatgactaattttttacggccggtggctttaaccgcttcgacaaacatctggtcttcccaggagttcatggaggtacgttcgataggttttgattcaggatggacggcgagtaattcaggccagatatatccgctgaagctttctgtttcaacggaggtataaattgtcggcacattgaaaatttttgctgcttttgccaggccaacggtattatttttcagctgctggcggtcaatatttgccacaccaaaggccatttgcggctgatgatcaataaaaataacggcagaattttgcgggtttaacagttctaatttagacataatgtgttcctgttcaattggttaaattgataaaaataaatattaatcttgctcgctgacaggaaatataatagaccggcaccggataatgaccagatgccaaatttgactttagaagtcaaaaaaaatgaacgacatttgttatttgttgattaggctggtttttatgctggtttttttggagtaaatggcaatagccttatgcatctgtaacaatattttcattatagtttaactaaaaaacagcatattaattctttctttgttttattattccggaatgaaatgatatttactagccctcgtatattaataattattcgttgttaagataactatcaaaaatatttcaatattccctcactgtcccggtctgcaaacctggccgcatataattgtgcatcgaatcaagaaaatctgggtatgcgcgttatggctgaaagaatgaacgagaaaatgcaggatcagggactggaaattgaattaatcactttagccagtaataataccccaaaaaaaaaaatattgataggttcatgccggtgataaaaaaaatagaaaacacaaaatcaattaactatcaatacattatgaagttacctaggcaaagtcatgattttcttattttagttacttaaccacttgcattttgatataaaaataacaaataataccctatatattggtaagataaattttaaggaatctggaatctcgtgtcactaattatccctgactacttcaaaaaaaaattggaagaaaacgcaaaaaaaaatgctctagttactggcatagtatctgttgtcactccatggataaagcccaacaatatgtattttttccctgagtacaccgagcatggatttacacatctgaacgaagttttacttagttcatccggcctcattacagatgaagcaagaaaaatactgacttctgaagatatcgccgcgatcattatctctactatattgcatgattgcgcaatgcatttaacacctgatagtttttattgtctgattagcgataaatatccgagaactgagtcacgctttgtcaatgaagaggaaagttggacaaacatgtggttatcttttatcgatgaggctaaaaaatttaactctaaacagcttgaatcgatttttggtgataccacgccagtcagagaaatacctaataataaattagatttaactgacagagataaactacttgttggtgagtttattcgcagaaatcatgccagaattgcacacgatatagccatcaatggaattccgggagtagatggcgacatagtcagactaaccacggttaatacagaaaatcattttatggatctttgcgggtttatcgcaagaagccataacatgggattaagacaagcagtagatagactggaagatgctaaaaaacgtcaacaccttggcgttaaaactcctttcattatgctggtgttacgcattgccgactatattcaaatccatgcggaacgtgctgaaaaagaactgcttcagattaaacgcattataagcccaatatcccgtggagaatggaaaaagcatgaagcaataattgaaataattcatgcacaccaggatcctgaggctatatttatcgatgcagaaccacaggatgctaaaatatatgttggtttaaaaaaattattccaggatatacaaaatgaattagatcaatgttggtctgtattaggtgaaatatatggcagatataaagaattttcaggtttaggaataaatatccgacgggtacgttcatctttagatgatgaaaaaaaatacataaaaataaaaaaacctgattttattccaaaaattttaagctttcgcactgctagttccgagatgatggagttacttatcgctccattgtatggtgacaacccttatattggtatccgtgaacttttacaaaattcggttgatgcctgtaaagaattacgagatgcacaattaaaaaatttaattcaacagcaacaagaagataatgattacgatataaaaattacattattcgttgatatagatggaaaaaactatcttgaaattatcgacaacggaataggaatgacattagatgttgtcaatgattatttcttaaatattggcgcctcatttcgaaatagtgatctatggaaaaaaaatcatttagtagataaccattcaactgttcatcgtacaggcagatttgggatagggctattggcagcctatctattaggtgacacactccatgttacaaccagacatgctaccgagccatcggacagagctttatcttttaaatgtaaaaaaggtgatactgaaatcattgtcgaccatgcccatgctaatatcggaacagtaatatctataaacctgagtgatgaaatcactaataaattaagactaaatactgaagaatgggattggtatgtacatactgacctaaaaatacagaggcaaattatcacgaaaaataaaacttcagtactatcccaaaaattctccctccctagctgtaatgatacattatctgataattggaataggacattgcattctgacttcgatgatataatttggaaatttaataaaaaatcagtttatactggtaaattattttgtaatggaatttttgtgagtaacagtatacatcctaattttaatgaaaaaggcactgatattaatttcttttcatatgaaactcctgatatcatcatctttgacccagatggaaaattgccattaaacttagaaagaacgtcattaaatcaacataacttaccatttcatgatgaaattttaactgatataaccgaacgaataatagcagaaatttcatcaaccttcagtttatataaacaggagataactagtgaattaataactaaaatagtagagtttgaaatcccaggtctaaaaagaaatttttactccaataatattatcacatctcagtttatgttatcacatgataaattagttcctttagattttaacatacttgcgctacaaagacctgaaacaattatttttgaatgtattataaattatagagattacaaatgggacaattcaccaataaaagatagtgcagagtatataataccaacatacatgggtaataatagcaaatctcatttaacttcatggataagaagtttctttgaacctcaacaccactattataaaataataaacaagctccccatcattggatgtagaatttttatttccaaagaagaggagaaaaggcttgtatctccttcatatatacctaaaacattttggcgtaccttgaataaagaatgggaaaatacaaaatggattatgtataattggggaaccccttgtgattttaaaggaaacctaagtactatatctgaatattttgaaaataataatcaaaatatctttatccaatatagcttagattggaatcgtatcaacaccgctgaaagtaaaaagagctatttttcagacgcatggcttaaattaattcaaaaaccatttattagtataagataattattcaacatactaatattacaattacaaaaaagccgccagtaacatactgatggctttaggttttctgataattaccggtagttaaaaactataggcatatcattcccactcaattatattctatcgcagtaatacattgatttattttaatttatttttacaaacctgaaaatataccgtcactgataccgtcacacctgaatctgttcactttttcaccggtaactttcaagcagtttttccttcgctttcaggtcaatgatacagagattaaggagtcgggtattctcatcagcccgctgagcttcacgcccatacttttcaagtgtgcttcgtagttgtcgagaaagttcaccggctttgtttctctcagttctgcaggtatcggcgtaaccgggatctgctctgcagcttctgctttcgcggtactggttggctgctgcaggcggtcaacatgattaagcacccgatcaagcagagcctctgtgcgtatcgtatcactcttttcccctcctgatattccccgatgcttacctgctgccggtcggcggcctcccggcgcagtccgatatttgcggccacgtctttttcatcctgctgctgaccggcgatctgccctttcatctgccggttatcatgcagagtgctgccggctcaccagccggcagcgaaagagacagccagagcgatcagagcaatggctatttttttcatcacagaagtacccaggcgcgctcgaacacatcatcaacgtatggctgcgttccgttttcatggcggataatcgctttagccattgcgatcgctgtatccttgctcgtcatgctgatagtgtccgtcggtgtaacgcccaactctttcgagacaccgttaatgtatgcaccggtatggttctcattactgggcgcccagcggttgatgataccagagacgttcttcaacccgtactttacctgataatttctcagtagtgagatcagtgcgcgaataccgaactccggagactgaaagcggcagaaacgcggctcgatagatttgtctaacggtagctgcccctgccatttattcgaggcgtgataatagatattactcggattgttattccggagcccccgcgcatctgtattaacgaaaccatccttaaagattttttgtttaacctgttcaggcacaaatcaccccgctttaaaaaatgacatgacattaccgcgatacaccagcaccgcagcacagataagaaggtttgaaatcacgctggtgatatcagcgtgatagacaggatcaaagtaggcccgcaccggcacactcgcggaataagacaaaatgagccaggctatccatgcccccgttgcgcaatgctgccggccgttgcgtttaaacgaaaacacccggacaaaaatcactgagcagatgacggcattcagaatgatcaagactttctcaaacatcattgcctccttgcggactatccgctttccgatacgctttaatactcagcttcaccgacagtaatgcagatacaaaagtgcccacggcgtcgaggctatcgatactgtaggcgtcaggtgggatctcaaatatcttggttactttgatgaacatggccgctgccggacagaaaaacagcagaccggaaataaaactaaccagtgccagcacagaacggcgaagcaacgtatattcagtggcggcggtgatgaagtagatagcccccatcagggaccccatcaccacctcggcaggcaacccggcaaagtagctgaagaatgcagcaaggctgagcgtggtttttacagagagatcttcatgcattacgtagcaccatgattattaaataaccatgatgctactgcaggaataagataaacaaaaatgcgttataggtttaaagatcaaggcaaggttctgcttcttaagcgttagaaggagtgatcacatcacgttcatgctgacctatctttacagcaatggtaaacttcgcattaccaaaaacatagtatgaataaaaggcgatgcaaaaaaaatcattcagagaagacataaacggacttagagcgatagctgttttatctgttttattgtttcactttaaatcatcatatttacctggaggatttgcaggtgttgatgttttctttgtgatctcaggcttcctcatgacatctatcatattcagaggaattgaaaacaatacattctcgataatagaattcctaaaatcaagagctaaacgtatcattccagcactggcttttgttgttgccattgtgttagctattggttatctgatatttgatccgtcattatatagaacagttggtaagcatgccgttgccagccttttatttatatcaaatattatttataacagagaatctggttattttgatattgactcacatgataaattattcttacatacatggtctttatctgttgaatggcaattttatataatatatccaattgcattgattatattatcaaaattcctcacaatagaatcattaaaaaaagcagtttgggtttccttttttgtttttttatcaatatcaatatatgagtcaagtatcgataaatcttcatcatattttttactttactcaagagcatgggaattactaattggtggcattgcatatatatatccattgaaaaataaaataatacatgaaaaattcatagaaataattgggttaattttgataataacatcattatttttgttttcagagactacggagtggccaagctataacgcattacttccagcagtaggaacatatctatgcattgttgccaacaataaaaattcgatattatcatttaggccaatacaaggaataggcttattgtcttattctatatatttattccattggcctatccttgtaatatcaaataaacttgactttgatttaaatatactatcattcttagtaataacaacatcactatcgcttatatcttataactttattgagaaaaaaagaaactactcatctgtatcattgctagcatatatttttatcattatatttagttatgtgatttttaaaagtgggttgccagcaagaacaaatggtgaagatacagtagacttccacagtaaatattatgggggtgtcggaatacctgataattcaaaagctattaggtttaatgaaaacaaagaagttgagtttattttagtcggcgatagtctatcaagacaatacgcaaactacttaaatgataatggtattgggtttgttggaatattcagcaatggatgcttttcaatgaatggctattatgacgtatatactgaaaaattaagagacaaatgcatctcgagatataaaaacttaaaggaagcgattggcaagtataaaaatgcagatataataattgcccagcgctgggatgacaaaatcaatcttaaaagcatagagtcatccactccagttgataaatccaagattatttattttattgagtcatatttacttgatatctcagcgtcagctggaaaaaataacaacgtatatatacttagcctagcgcaaggaaccaatagaaatacatttgaatgtcagcaaaaaagcaaacttccaatatattctataattgaaaaacctaattgcagcatcccagagaaaaagaaggagatgataataaatacaaaaattaaaaacattgtcaaaaaaatgaaaaatagttatttcatagatataaacgattttatatgtgatactaatgaatgtaatgtagtagacaatgaagatcagccaatttactctgacaataggcatttatccttatttggtgctgagtacataggtgatagaatactaaaatcaattaatgatatagagtcaaataaataaagatagtgtatacgatatgaataacataaataaaaaaaacttaatgaaatatttaatttgttcactttatgtagtagtgccttccgtaataacatctatattaattcaatatattctgtgttttaaatcaaacataactgacacgattatcctgatgttattattttgttcgtcaagtgtcttattattttcaagagtagcgacattactcatgcaaatatttatttcctttttacttcctcatgccatattaacaaatggcttgttaaaaaaatcaatgcttgatgttgcaatttcatcaaatatcagtgaaataactcaatactacaaatcaattcctactacacaattgttgtattcccttattttgtctactatttttatagtgttttttatctctcaatgtaagaatataaatgtaaaatcaaggaaatttaaattattatttttatttcttataatttcactttcttttatatcaaagaaaatagtttacatgacttattatgatgatgtgcattcaattatgaatgaatataatgcattacgcgttgataaattgcctccaacaacatggaaaataaaaagcatttcaaaaaaatataatacatatgttgttataattggtgagtcaatgagaagcgactttatgtctctttatgggttcaaagaaaaaacaactccacatatcgatgagatacccaagaaatacatttctaattacatcagtacggccataaatacaacattatctgtaccgagaattctcgctcataccaataataaaggcaaggtaagagaagaagataatattataacgctggcaaagatggctgggtttaaaacttactggatatcatctcaaggatatactgggaaatacagtatatcaacaagtagaatatctaatttctccgactataagcattttaatgattgggatgattacgcactattaccgatagttaagcgcgcgttgcgctctcctgaaaagaaagttgtatttatacatattgttggctcccatgaatatccatgtgatagggtaaaagactacggtgtaatatataatagctcacacggagaattaataaactgttatttgtcaacatacaacaagacagatgatttcattaacaaagtatacggatatttgaaagaaaatgatgatacattttctttagcatatttttcagatcatgctttaaacattgttggagaagaaaataattataaaatttacaggaatgatagcatagcccaatcatataaaattccatttttcattgcatcgagtgatgataagagtacagaaaaagtagatgtaactcgtagtgcttataatttctttaattattttcctgaatggataggtgtaacaacaaatttgacaccttctggttatgatattttctcaaataaagatgacaacccagtagttatgtcatatgaccaaaaattaaaattactatcagaaaaatcagatggattgacagcatcagaaatctataagtaacaaatcataaccacccgcatagcgggtggttttatgtttaagacgctaacgcgacttaaactggctaaagccataataaaaaaagccaccagtaacttactgatggctttcgattttctgataattaccgatagttaaaaactataggtatatcattcccactcaatcgtcgccggtggctttccgctgacgtcgtacacgacacgggaaatgccgtcgacttcattgatgatgcggttggagacgcggcctaacaggtcgtatggcagatgtgcccagtgagcggtcataaagtcgatggtttcgactgcgcgcagtgagacaacccagtcgtatttacggccgtcgcccataacaccaacagaacgtaccggcaggaagacagtgaatgcctggctgactttgtggtacagatccgctttgtgcagctcttcgataaagatagcatcggcacggcgcaggatgtcgcagtactcttttttcacttcgcccagcacgcggacacccagacccgggcccgggaacggatgacggtacagcatatcgtacggcagacccagttgcaggccgatacggcggacttcatctttaaacagttcgcgcagtggctcaaccagtcccagctccatatcttccggcaggccgccgacgttatggtgggatttgatcacatgagctttaccggtttcagatgcggcagattcaatcacatccggatagatagtgccctgtgccagccatttgacctgcttctgttttgacgcttcttcatcaaaaatttcaatgaatgtatggccgatagctttacgtttggcttccggatccgcaatgcctttcagggcattcaggaagcggtcttctgctttggcgtggatgatattgaggtcaaatttacctgcaaacatctccataacctgctctgcttcgttcaggcgcagtaagccgttatccacgaatacacaggtcaggcgcttgccgatagcacggtttaacagcatggcagtcacggatgagtccacaccgccggagagtgccaggataacatggtcatcaccaatctgctcacgcagacggataacggtgtcttcgataatggcttccggggtccacagggcttcacactgacagatatccagcacgaaacgtttgaggatttcctggccctggtgagtatgggtcacttccgggtggaattgcacaccgtagaaacgtttttcgtcgtttgccatgatcgcaaacggacaggtttcagtgctggctacagtcacgaaatcagacgggatagcagtaactttgtcaccgtggctcatccacacatccagcagcggtttgccgttgtcatccagcatatcctgaataccacggaacagttcgcaggtttcgcggatttcgacctgtgcataaccgaactcacgctcgtcagaggtttccactgcgccgccgagctgcatagacatggtctgcatgccgtagcaaataccgagaaccggtacaccggcgctgaagacatactcaggcgcacgcgggctgttgtgttcagtggtgctttccggaccgccggagagaataataccgttcggattgaaattacggatctgttcttcagtgacatcccatgcccacagttcacaataaacgccgatttcacggatgcggcgcgcgatcagctgagtgtactgcgatccaaagtcgaggataagaatgcggtgctgatgaatattcgttgtcattaatgtatgttccaagagcaaacaattataggctggcggtccgcagaccgccgcatgaatcagagacctgaacggtagtttggtgcttctttggtgatagtcacatcatgaacgtgactttcctgaatcccggcaccactgatacggacaaactctgctttagtattcagttcgtgaatagttgcacaaccggtcagtcccatgcaagagcgcaggccgcccatttgctggtgaacgatggttttcagcacacctttgtaagccacacggccttcgataccttccggtaccagtttgtcagcggcgttatcggtctggaagtaacggtcagaagaacctttggacatcgcaccgagtgaccccataccacggtaagatttgtaagcacgaccctgatagagttccacttcgcccggagattcctcggtaccggcgaacatcgaaccgaccatcacacatgccgcaccggctgccagcgctttcgcgatatcaccggagaaacggataccaccgtcagcgataaccggaataccggtgccttccagtgcttcaacagcatcagaaatagcggttaactgtggtacacccacgccggttacgatacgggtggtacagatagaaccggggccgatacccactttcactgcgctgacaccggctgcagccagagctttcgcgccttcggctgtggcaacgttaccaccgatgacctcgagatcagggtatttttcacgggtttcacggatgcgctgtaacacgccttcggagtgaccgtgagaagagtcgattaacagaacgtccacaccggcagctaccagcgcatcaacacgctcttcgttaccggcacctgcgccgacagctgcgccgacacgcagacggccgtgctcatctttacaggcgtttggtttgcgctctgctttctggaaatcttttacggtgatcatgccgagcagatggaaggagtcatccaccaccagcgctttttccacgcggcgctcgtgcatttttttcagaaccacttcgcgggcttcgccttcacggacggtcaccagacgctctttcggggtcataacggcagtcaccggctgatccaggtcagtcacgaaacgcacgtcacggccggtgatgataccgactaattcgttatcggtagtgaccaccggataaccggcaaaaccgttctgctcagtcagggtctgaacttcacgcagtgtggtgcacggagtaacagtctgcggatcagaaaccacaccgctttcgtgttttttcacacggcggacttcatcagcctgacgctcaatggacatatttttgtgaataaaaccgatgccgccttcctgggcaagggcaatcgccagacgggcttccgttacggtatccatcgccgccgagatcatcgggacgttcagacggattttcgcggtgagttgtgtcgataaatcggcagtgttgggcagaactgtggagtgtgcaggaactaagagaacatcatcaaaggttaaagcttcttttttaatacgtaacatgtgcaatatctcaccaggcagcaggattgaaagaagataaaatattgccgcggcattatacaggtggtaatcggttgcgcctagcctttttttcaaaaattcgttgctaatctgtcagaaggcggtagtatcggacaattaagtccttgttttattatttgatctggctcacatgttgctacctgaaaataccgcaatttttactgttacccggttaaatacgactgtccggcagttactcgagctggaaatgggccggatttggatcagcgcggagatctccaacttttcgcgtccgtcttccggtcactggtattttaccctgaaagatgaaaaatcccaggtgcgggcagctatgttccgcggcaacaacagccgtgtgacatttgcgccgcagaacgggcagcaggtgcttgtacgcgctgcaatcacgctgtatgagccgcgcggggattatcagctgattgttgaatccatgcaacctgccggtgaaggtctgcttcagcagcagtttgagctgttgaaagagaaactgaaagccgaaggactgtttgatgcccatctgaaaaaaccgctgccggtgcctgccacctgtgtgggcgtggtgacatccgccaccggggccgctcttcacgatattctgaatattctgcgccgccgtgatccgtcactgccggtgattatctaccccgctcaggttcagggtgctgatgcaccggcacagattgtccgtgcgatagaaaccgccaaccgccgtaatgaatgtgatgtgctgattgtcgggcgcggcggtgggtcactggaagatttgtggaggttcaatgatgagcgggtggcacgggccatttttgccagccgtctgccggtgatcagcgccgtcggtcatgaaacggatatcactatcgccgattttgtcgcggatttacgggcaccgacgccgtctgcggcggcagagctggtcagccgtgacctgacagagcgcctgcggcagatccaatccgtacaacaacggctggaaatggcgatggattattttatcgccagaaaacagcggttgttcagtcagttacaccaccggttacagcaacagcatccgcaactgcgcctggcacggcagcaacagctgattcagcgcctggaacaacggctgattcaggccggacagcttatgctgactcaaaagtcccgtcagctgacacaggcagaacagcgtctgatgcgccgggatccacgcccgcaactgcaacagcagcagcgccatgttcagcagttgcagtaccgtctttcctctgccatgcgtgaacagctcagtcagcagcgcgaacggtttgcccgtctctgctctacactcgagggtgtcagcccgctggcaacactcagccggggcttcagtatcagccagacagacagcggtgaagtgctgaacaaaacccgtcaggtaaaagtcgggcagaaaatcaccacgctgttacaggatggcagtgtggagagtgaaattatcgccgtgcacaaaaaagcggctgcccgtaaacggaaagccgctgagtaatatacggttttactggtgacattgtcacacattaagtgacagtgtcacgaagcctgctgttcatccaccatcagcaggaacacataaccgagcgccacatcccacaaatagttgaaccgccctgacttaccgccgtgccccgcttccatgtcagtatagagcagcagcagattatcatccgtcttcagtttccgcagttttgccacccattttgccggttcccagtactgaacctgagaatcatgcaggccgctggtcaccagcatattcgggtaggctttcgcctcaatgttgtcatacgggctgtaggcacggatatcccggtaagctgattcattttccgggttgccccactcgtcatattcgccggtggtcagcggaatggacggatccgacatggtggtcagtgcatccacaaacggtacctgcgtcacgataccgcgatacagctccggcgcctgattaatcaccgctcccatcagtaagccgcctgcactgccgccggtggcgtagatccggttctccgcgccataacgccgggcaatcagttcgcgtgtcacatcaacaaaatcattaaaactgttgattttatgctgcatctttccggcattgtaccaacgtttacccaactcaccgccgccgcggatatgcgcctgagcataaacaaaaccgcgatccagcaggctcagccggttggcgtcgaaatccggatccatactggcaccatacgctccgtagccttcaatcagcagcggattatgtccttgtgaatcgtgtccgggctgatagtgatctttatgccagaccagcgaaaccggcacctgcacgccgtcacgtgcagtgatccaaattcgttcactgtgataattatcccgctgaaaaccgtttacctgcgcctgtttcagcagcgtccgttccccgctgaccatatccagctcatacaccgatgccggtgtggtcatcgaggtataaccgtagcgcagcagctgactgtccggctctgggttcagcccgagccacgcgcagtaagcaccatcatcaaacgcgacctgtgtttctttcccgctctgccggtgaataatgcggatctgcggcagcgcggcgtgccgttcctgtaacaccagccagtcacggaacagcgtgaaatcttccaggtcggtatccggctgcggcgcaatcaggatttgccacggattttccggtgcattcgtctgatagagaccaaacagttcgttttcatggtcagagcggatataaaacagaccgtccaggtggtcgacgtgatactcacgcccgtcctgacgcggcgagaaacagaccggcggctgtaacggatcattggcattgatgagctgaacttcggaggttaccgggctgtgacagccgataaaaatccattcacgggaggatgacagggataaaccggtataaaaacggtcatcgtcctcgcggtataccagttcatcctgtgcgctatctgtgccgaaatggtggcgatatacttcgaacggcagcaatgtctgcggatcctgacggacataaaacagaaccgaaccgtcggctgaccagaccagatcgtcggccacttctgtcagtacagattcctgccagtgattatcggccagatcacggtaagccacctgatattcacggcggccgactttatcctcagcaatcgcaatacggcggttatccgcgctgaccgccagagacaccagctcataataggccagcccctgtgcccgtatattgccgtctgccagcacttcccactggtcgctgtttattttacgccgctcatacagcggatactctttgcccgcctcaaaccgggtgcggtaaacataaccgttgtaactgtacggcgcggattcatccgcctgcggcatgcgggcgaccatctcctcatacagcgcttcgcgcagcggctctgcggcctgcaatttctgttgtgtatagcggttttcatccgtcagatactgaatcacctgcgaatcactgcgggtatcatcccgcagccagtaatagttatccgtccgggtttcaccatgtgcggtgaactgtaccgggcgttccggggcttgcgggatagtcattccggctcctgataagatatttttttgttgtgatgtcataaaaatttactaaattctgctctctgttccgcgattccgcactatgatagtaacgttttcatttgttttattgcttattcatcaccgggttttcaccggttcaggaggttacaatgaaacagtaccgcgttgctgttgttgtcggttcactgcgtgagcagagttacaaccgtcagctggcgcatgctctggtctctcttttccctgcacacattcagtgtgaatttgtcagtatcggttcactgccgctctataatcaggactgtgacgcgcagccgcctgctgaggtgctggcattcaaacagcagatttcacaggctgacggcgtgatttttgttacgccggagtataaccgttctatcccgggtgtgctgaaaaacgcactggatcagggctcccgtccgtggggacaaaacagctgggataacaaaccggccgctgtaatcggtacctctgccggtgcgatgggtactgcgatgtcacagcagcatctgcgcaatgtgctggcattcctgaatatgccgacactcaatcagccggaaatgtacctgcaatggtatgacggcatgatcggcgaaaacggtaaattcagtgaaaaaaccggtgcgtttgtgcagaaatgggcagatgcctatgtccgttttctggaagcacaccacgaataaaacctgcgggcagactcagcggaatgtcagctgctgcccggtattaaaatcgtccgcattcagggcattgcgccctctggcaccggtacagtgacagccgtacacccgggtttgcggatccactgcctcctgtgcgcggcgcagtgctgccggtgttgcccggcgcagatgcagcccgccgaccaccgcctgcaccggtgcattatctgtcagggcacgcgcatgatgtatcaccgattcaatacctgaatggctgcatccggtgataatcacaatcccctcctccccgcgccagatcagaaaactatcatcacgcacatagtctgcctcaccgttactgagcagtaccccgtaacggcgcaccacggcccgctgcgtgatttctccggcgaacagaaagcgggatgagatggcatacggtttttccgtcagcacgaactgatagtcacggcgcagtgtttcttcacaaaataacggagataaccgcttgaatttcagcggataactgcccagccacaatgcggcgcggcgcggctcgaaaatatgcgggtgtgcaatcaccttcagcgccggcggcagattatgccgttccgtacgggttaatccgccgaaatgatcataatgaccgtgagacaacaccaccgcatcaatattttccagtgaaatccccagtgcctgtgcattgcggatataggtatcatccgcgcccgtgtcaaacagcagtgaggtttccccgtcgtccagcaacaggctgagaccggcgtgagaatccagtttcgggtcagtattcgtattttccagtagtgcggtgatgcgtaacatggatgataatccctgaaagataaatgtattctgccgttatatataacacagtgttttccgctataacgtatctgtattgtaccgcagagcgcagattatgatttaattcaggtaatgttaataaatcagcatgacccggctgtaaaattgttaaataatagccggccgacacagactttcaggagttccgcatgggaattattaccgcttttgcaaaaagcatcgataacagtcagcttttacgccttttgcatcagcaaatagaaaaacaggatgcgccggtagcctgccgtgacgatctggacgatcagctcaccgatatcgccgcctatatgcacgatgaacattatcccgccctggcaaaacgccgcaaaaaggtgaatatgctgcccggattactccccctgccggtactactcttctccctgctgctgttttcacagaagattattgatgccctgtcactgaatatcgacatcagttatttctccctgaccctgctggattacagcctgacctatatctgggcagtatttatttatgccgccgtgttgttcggcaccattttttatttttatttcctgcaaaaacagacagaaaaatatgccggtcatctgattgatgattttataaaccggatatcacattaagcgggattgattaagggtacattaagccccgttgccacaataatttgcctgcgttgtcacagtaatagtcaatgctatactgcaatccgcttttacagagagcccgcttttacagaaagagaggaaacgtgcaaattctattagtcgaagacgatttacaattaggcaaagcactgtgccggggactggaactggccggttttcgtgtgtgctggctgcgtttactggccgatgcccgtaagcggctgacagaacagcattttgacctgatgctgctggatctggggttaccggacggcgacgggtttgactctctggtggagtggcgcaacagcggggagcaaatcccgattattattatgaccgcccgtaatcagcgtgattatctggtcaattccctcgattcaggggcggatgattttatttccaaaccggttgagctgccggaattaatttcccgcgttaaagcagtttcccgccgtattgccggtttttcctcacaattatggaaagtggataatatcacccttaacccgatgaaccatcaggtaacactgaatgacgagttattactgctctccggcaaagagtatcagctgttatatgaattaatgcgcaataccggtaatgtggtgcgcaagcatgagctggaacagcgtttattcgggctggacgataaaatcgaaagtaattccctggaagtgcatatccataatctgcgccgcaaaatcggtaaagagaaagtgattaccgtccgcggaattggttatctgctgaaaaaggacagcgaataagtgagaatccgctcattctttgtttataccgttctccttcagaccttctcaatgctcctgctgtggggcgtctggatagcctggctgaaatacgcttatctgcccggtttaagtgaagattttaatgcccagcagatggtgattgcccgtggtgtctctgacacgctgcgggaaaccccgacggattccgccaccttcccgcagattgcccgcgccctggagagtatgtacgccaatgcgatgaaaagcggcctggaagaggaaaattatgatccgctggtcgctattctgcacagtacaacgggcgaagtgctgtacagtaataaaccggatgttcatattccgctgaaaccggacggaatcgagcgtttcaccgaggacggcgaaacctggtatcttgcttataataccgacccggatatgcagcgcactgcggttatcggggaatccggcactgaccgtcatatgctgatcggcgacccggcaaccggcaccgccgtcccgctgctgtttattctcggcaccatgctctcgtccacgattatcaccacctatctcagtctgcgcccgctgcgtgaaaccacccgcagtatcgccacccgtaatcccggcaacctgacacctatcagcatgaaataccagtacaatgaaatgcgtccggtgctgcatgctattaaccagctgatgcagcgggtggatgccgccaatctgcgggaaaaacagtttatggcggatgccgctcatgaactgcgtacgccgattgccgccgtactggcacaaattcatctgctcaaacagattgatgatccggcggagcgcaacgaaatcaccgctgatatggaaatcagcctggatcgcgcggtatcactgtcacggcagctgattgatctggcccggctggaaacggaagattatccgctgaaaatggaagagatcgacctgacccaggcactgagccacaccattgccatgctggtaccctacgccctgcgcaaaaatattgagttttccttcgacggcccggaaagctgcattgttgtcaccgataaacaggcgctgttctccatcatcaacaatattctgaataacgcggtgaaatactgcccgccggacagtcaggcagaagtctcgctggacaccggcaatccggatgaagtgcagattattatccgcgataacggcaacggcatcagtgagcagtaccgccaccgcctgttctcgcgctttttccgtgtgccgggctgcagtgagaacggcagcggtctcggcctcgccattgcacagaatctggcggaaaaaatcggcggttatctctccgtcaccgacggattgcagcagcgcggtatcgggtttgtgatccacattccggcaaaaaaccgtgaaatttccgctgcttcccatgacagttctgaaacataaggctatgctgaaaaaagtcagaacaggagggacagatgaaacaggcactgattattatcgaccttattaatgacattaccggcaaacacgggctttccaacgcctgccatgagcagaccgccgcccgtaacctgattgcggccacacgggaaaccgcccgtcaggcgcggctgcgggacattcccgtggtatgggtgcgggtcgggtttgcggatgactggcatgatatccccgccggatcaccgatgtttcaacgggcaaaagagattggtgccctgaaactgagcggcagcggttgtgactgggcagacggtacggatgtgcagaaagaggatgtctgttttgtgaagaaaggcgtcagtgcctttgcgggaaatgatttgctgatctggctgcgcaaagcagggattgaacaccttgttctggccggtgtcagcacggtgatggcaattcaaagcaccgcgcgttatgcccacgacagcgggttttatgtctcggtagcggaggatttgtgtgccgccccgacagcggaactgcaccagataagtctggagatgctccgcccgatggcagctatcaccacatccgccgcctggctggcacaataatcttttattatccgcgcagtgatgctgcgcggatctctctgtttaccacagcgacagcagataacgcagcagtgcagtcacaatcgcagcggccagcacaatcaccagaaacggctttttataccacgtcagtattcccgcaaccgccacgccggccattttcggccagtccgataattcctgtccgctgaaaatcgtcatcgttaccgccacagcaaacagaatgacaatcgcccccgtggaaagcagatttttgacatgtgacgacaccgagaaacgcccgctgagcagcgctccggacgcccgcatggcatacgtaccgaccgccagcagcgcgatccccgtcagaatggataatgtatccggcattacgctctcctcaggctgaccaccagccccagcagtgataacagcaccgggatccccggcggtaaaaatggcgttgccgccagggcaatcaccgctcccagcagagcagcgcggcgtgttttcgcctcacgcagtgcaggcagacacaatgccaggataatcgccgggaacatggcatccagccccagcgctttggtatccacaataaaggtaccgagaaactccccgataatcgtccccagcggccagcacagaaaaatccccagcccgcacagccagaatgcggctttctgtttgtctttctgtttttccgccagaccgaacaccacactctcatcattaagaatatggaaacccagcagctttttcgggcctttaccggcaaggtcgtgcactgcaaggctgaacggcacatgacgggcattcaccagcaacccggccagcgccgcagacaccggactgccgccggccgccacaacgccgataaacagaaactctgacgcccctgccagcacaaccagagacagtgtcagcggtacccagagcggaaaaccgttggcatgcgccagcgccccgtaggaaacgccgacaattaaatccgccacacaaaccagcaaaatattgcggatcatggcattatcgagtggaatagcgagtttcattgcgatagacttataaattgaacgatacgttcattatgtcgaacggtttgaattacgcaagtgttaattccgggttatttccgttaaccagcagagagtgtattttatggattcacctatcaccccgcccctgcagatcatggctgtcaggctgactgaagagcgtcagcgccagggacgttctatcgctgatgtcgcacgcagtgccggtattgcaaaatccacactgtcacagctggagtcggcacagggaaatccgggaatcgaaacactgtggtcgctctgcgtggcgctgaatatcccgtttgccagtctgtttgaaaccccaaaaagccgggtaaccgtgctgcggcgcggggaaggcattcaggtcagtgcagaaaatgcgtattaccacgcttttctgctctcttccgcttcagcggttaacaggcgtgacctgtacaccatcaccgcgcagcccggcaaagaccgcgtatccgagccgcatatggcacaggtcaccgaacatatcctgctgatgaccggcagtgccgtcgtcggtacccttgatgaacccgccacacttttgcccggcgactatatttcctaccccggcgatgtcccgcatatttttaaggcgctggagcccgataccacggcggtcatgattattgagcactgattttacgcatttggtattcacaaatacttacttatcgcaaataatgtaaagtgaagtttatcatttcgggtatattccgcatccggtatcaggctgccctgcatgttctgataccgctgtaacgggcttactaaggaaaaaccatgcttgattttaaccgtcagaatttaactcatatgacagccgatgccctgaaaaaacaacggggctacctgtggatcatcgccattcttctgctggccggtggtgtggcctgtctgatgaacccgctgatttccggtgtgactctcagctatattatcggggggcttctcctgataaacggggtctccatgttatttgtgacactcagcagccggctctacagcggcggcagtaagctgttttccgttctggttgcggtcgcctatctccttctgggttatgtgttcctgaccgagccgctcaccgggatgctcagcctcgctattctgctcgccattctgtttattgccggcgggatcctgcgtctgggttcaggtctgcgtcagatgtctcaggcacgcggctggctgaacattatcatcggcctgctggatctgtttatcgcttacctgctggtcggtaacggcccgattgtgtctgtcaccctgattgcgaccctggtcggtattgaactgctgttcagctctttcggtctgatcgccgtcgcttctgccctgaaaaagaataattaaccgcatccggtggcgcgggcaaataatttgccgcgccacatcctccttttttctgttttttccgcttttatcgcatctttacataccctttcagtacccgtgcctgaaaaatggtacagtattcaatgtgatcccatttttaacattttgctgctcactaaggagtctgtaaaaaccacgtcacaggagacattttttatggagcaacaactgcggttatggctgcaacaacaatttgaactcagtaatgactacgcctcatgggcggccattaccggagttattgttctgattctggctatcgctgttattctgcatcttaccctgcacaaaggccttctgccgtatattgaacgccgtaccggcggcgctcagcgcccgtggggcgcgttaattacccgcacccggctgtttaaccggtttgcctttctgattcaggggatagtgtttaatatccaggcactgatctggctgggacgcgggtctgccgcacaggagatcctcacgaccggggcacaggcatggtgcctgctgttcggcatgctgctgctgttttccgtgatggacattcttcagaacctctcccgccatacgccgtctctgagccgccttccgctgcgcggcgtgatgcagagcctgaaactgattatcgcggtgctattcagtatcctgattatctcgctgctgataggaaaatccccgctgattttactgagcggactcggtgccatgaccgcggtgctgatgctggtctttaaagacccgatcatgggactggtagccggtattcagttgtcggtaaatgatatgcttaatgtcggggactggctggagatgccgaaatacggcgcggacggtgctgtgacggatatcggactgacgacggtcaaagtgcagaactgggataataccatcaccaccatcccgacttacgccctgatttccgactccttcaaaaactggcagggaatgacggcatccggcggacggcgcatcaaacgcagtatgaacctggataccaccagcatccgttttctgaccgatgaagagatcagccggctgcggcaatcaaacctgatagccgggtatatcgatgccaaattacaggaaatcgcagaatacaatgcgcaggaacccggagataccctgcttaaccagcggcggctgaccaatatcgggacattccgtgcgtatgcggaggcgtacatcaaaaccagtccgcatattcacaagaagatgaccaccatggtgcgccagctggcaccgacaccggacgggctgccggtggaaatctacgccttcaccaatgtgacggcgtggataagttatgagcaaatccagtccgatatttttgatcacctgttcgcgatcctgccgcaattctggctgcgggtgcatcagacaccaacgggctttgatatgcgcggtattgctgcgcatttcgcccgtgaatgtgaatcagaacgccgagccgggctgtaacagaaactccgcctcctccggggtggagtttcgccccagaatctcattgcggtgcgggtagcggccgaagcggtcaatgatcgctttgtgccgccgctcaaaatcctcagtgctttcatcaagccctttaaacaacagttccgcctgctgatggatcagtgcggattccgaatgcatatacggcatcagcacaaacttgcgctgaaccgggggcagttgcagataatccggtgttttcaccgcttcctgcgccagcaccagtgccatcgggtcctgtgcaaatgaccgcgcgtcaccgcgccagaggttacgggaaaactgatccagcacgaggatctccgccagacgtccgccgatgtgcgcccgccagctgaaacattctccggcagttgcctgttcccataccttaagaaaacgtcggcggatcaggtcatcaaactgtgtgtctttcttaaaccattgttccggtgtggcttcattaaaccaaaaatccagaatctgttgtgcttccatcgtcaggctccttttcagtccggccatgaggatctctccctttgcccggcggtcatatcacggtatgctgggaaatcattattagtttaacgcatatattgtcaattatttatcacaggccgatattcatgggaaaactgtccgcacacaccgccacattttacggcgttctggccattctgttctggagcactattgtcggattaatcaaacgggtcagtgaggatttcgggcctgctttcggtgcggcactgatatacaccctgggctcagtaatgttactgctggtgaccggatttccggcaatccgccgctggccgcgccgctatcttatctggggcacactgttattcgtcagttatgagatctgctttattctggcgctcggtttttctcagaaccgtcagcaggcgattgagctgggtatggtgaactacctgtggccttccctgactgtcgggctggcggtgctcatgggcgggcagcgcctgcgcctgccgctgatagccggtctggtgctggcggtgctcggtatcagccgggtgattggcggagagaacgggttatcactcagctctgtcgccgccaatgtcgcacttaatccgctgagttacggcctggcgtttgccggtgcggtgatctgggccttctacagtaatttgtcacgcaggctggcggatggtaataacggcattaccctgttttttatcatcaccgccctgatgctgtgggtggtaaccgcctttgacggcatcacactgcccgcggaattttccgtttcgaccattggttttctgattgccgctgcggcactgtcctgtgccgcgaacgcactctggaccattgcagtactgcgcggtaatgttgccctgataggcacactctcttattttaccccggtactttccaccgcattttccgcattattactcagcactgctctctcctttgcattctggcagggggtgctgatggttaccggtggttccttattatgctggctcgccacccgccggaaataacatgaaaatgaaccggcggatttccggcggaatatgctaaattagcgtcatgctattattgattgcttttcaggaaatacgatgtccaaaaaacttaaacataaactggttaatttatttttgcagctttatacgcgccgccgtgatttttcacactccgtcgctgcctttaaacagctggagactatcgacttccggaatattgttatttattcgacaacggcactcggggattttctgatgaataccccggcaattcatgaagtcagaaaacgttttcctgatgccagaattaccgttgtttccggcaataaaatggcaccttatatccgcaccggtatcggtaaagactgggacgatgtggtgtgctggaacagtaaagtcaataccgtacttaaactggtcagggatttaaaagcgcacggaacgccggatctggttctgattatgcactcacatgatccttatgattatctgagtgcagtcatgaccggggcgccgtttgtttttcgctgtaatcatccgacaaacccgtttatggagcgctggctgacaaactcgacccgctttgcacaccgccattcagtacaggtccgccttgacctgatcacaccgctcggttgccggtttaccgaaaaaagtgttgagatgcgggtaccgtgtgaggtcacaaaagtaccgtcaccggtaagacgggttggttttcagatgggcgcttccagtgaggaacgacgctggccggttgagaattttgtcacactcgcacgcactctgcttacccggtaccgtgacctgaatattgttctggtcggcgcgccgaatgaaattcgcctgtccgatgaatttctcagtttacttgagccggaatttcacaaccggattgagcctctgatcggtaaaaccaccgtcgaagaattaacacaaatcgtaaataaccttgatcttctggtcacaaatgacaccggaaccatgcatctggcatttgcgttaaaagtccccagtgtcagcatgcatgtcagcacctgcccgcaattcaccggcccttatcaggactatgaattgcatgaaattatttccgggtttgcctcaaaattactgctggaagagggagagcatgaaatggcctcaatttctgcggatacagtaattgaagcaaccgttaaatcattatctgtgcggggaatattgccggtatcagaggaataacgctgcggaataatcctgagtaaaagcacggtctcacacccggccgtaaaatacagtagactgacagaaaaaggaggatctatgtcagagaatatgcagaagccgaaaatgacacaggaagaagaggacgaaattgagtccctgacaaaaagccttgtcatgcgggataagatgaaactgccgagaattgacagagaagtcgagcagcagcgccctgaacgtttacgtccctggttccgggaacgtcttaaattccaccgcgatgccgcaagaaacagttaaccgtaaaacagagcctgccggtaacagatataccggcaggctgaaaagggttattttgccatttcaataatttcttttgctgttttaccctgtaatttttctttcagcaatgacatcattttttcttcatcgccaccgctggcaaaagccacctggaagctgattttagtaatagcgcctttcagctcacgggattgctccgggctcagatctttttccatttttgcaatggattcctgcgctgcctgctgagaagacatatccagtgttgcatcaccacaagcggtaagagcaaaagagagcgcgataactgccagtaattttttcattttccacctcgttaataatatctgcggtattttacattgccggacagataaaaccatgtttattacaggcagaattaaccgtttatttatacagttataaccatgtttgccccgccctgtgaaaacaggaaatttatttgttattgtaaatcagctgtttttcagtaccggtgccgatataatacttccgtctgcgaaatacacggaaaaactatgtttaacgaacgcgttgttgatgaaattttaaactggatagaaaacaatcttgagtctgatctttcattagaggccgttgccgggaaagccggatattccaaatggcattttcagcgtattttcaaacaacagaccggctataccctggcaaattatgtccgtgcacggcgtttatcctgtgcggccatcgccctgcgcctgctgccgctcaacctgatgcatttatccatgaaataccgctttgattcacaacagacattctgccgcgccttcaaacagcattttggtattaccccgtcaggataccgtaaaaaaagcggctggcagccgggcggctttgtactgccgaaacgttatgccggaaaactgcactcctctgttgagatgacgacactgccggaaaaagtgctgaccggaacatcgaatgtgtatcaggcggcatcagatccctggaatatgcgcctgccacagctgcgcaaatattactggcaaccttttttacagcggctgaccgctttaccggaggcggtttatgccatacacggtgtcagtaaatctgccggggacactttctcaatgtattatgccaccctggccgaagcacactgcctgaaaaatacgataccgcaggatattgtttatacacccggtcatgcccactacttaaaaattatttttaccggtgatttttcagatattgatttccaggatattacttacgatatttataataatattctgccggaactgaatattatccgccatccggagcatccggatacggaagagtacatatttcaggaaaacatcacggaattaaacccggaaaacccgaaactggccgtccgggtgattaattattacattcctgttatgactgatgcggcaggctggtggttattctccgccagcactatgctgttgcggtcattctgttctgatgcctgttgtgcaagaatatgttgctgtctggtgtcatgaaatccgagaataaaggtaaataatacaaaaccgtataccacttttcgtttcgacggcacccgtttactgattaaaatataaataatcagagccgccaaaataactacccctgacatgtatacgtagttttccataataataactcccctgattatattccaatcgtagtttatcttatctgtccgtacattattctgatagtcgtcttaaaataacaaaattaggaattgactgttatttattctctgttttttacacatgaaccggttactatgaaaaggagtatcttctgatttgcggaggtaaccgatgtcatcatatgcagaacatatcaccacggcgcacattcagtgcgatgcggaagaagcgctgctgccgctgttaaaagaactgaccgataaacagatgctgggcggctggcggttgcgcaagcatgaaacaccgcctgccggggcagtttccccctggtatctgctgaaagataatgcacaaatcgcattgctgccgacacatcctttcgctgctgtttctgttgcggatgccgctattacggacgaagccgaaatcacggcacataatgaccggattgaacatctcagtaatgccatcaactccacttacggtattttatattgccatctgtcgtttaaggcattagcggtatagtaaatatcaggtaatgtaccgggattgttacgtatttcccgattattctgatacagacgattcccgaacaggtctatgttgtaacacgcctattgttcaggagtttatgagatgaaagtgaatattaagagagtaagcacagtgactttatctgcagtcctgctgcttgctgtagccggttgttcaaatatgtcgaaacgtgaccggaatactgctatcggagccggtgtcggtgctgttggtggtgcaatcctgaccgacggcagcgcactcggaaccgtcggcggtgcagcaatcggcggccttatcggacaccaggtaaaaaaataatttccggagccggcatactgccggctctttcattctttcccggctttataccggtaatgcccggtgattttccagctgaacagcacatcctcactgacctgcccgccgccgatattatgcatgaccagcggatttccgctgaacagcgcggttttaccgatcacaataccgatatgcggacgaccattatccagctgccaggtcacaatgtcaccagccacataatccgccgcgttttgtgtgatcggtttggtttcccctttccggctgaaaaaaaccatcagattgggcactctgcggtgatcaatatttgtatccggccgtgtctgtccccacaatttacggcccgggtagagagaaaacgccgttttgatatcttcatgcacctctttttgcagatcgatacctattttccggtaactgcggatcaccacatccgaacatacccctttccggggtgaaacatccccgccgggataagcgattttttcataggnnnnnnnnnnnnnnnnnnnnnnnnnnnnnnnnnnnnnnnnnnnnnnnnnnnnnnnnnnnnnnnnnnnnnnnnnnnnnnnnnnnnnnnnnnacggatcatacaacaccagcctgtcaagctgctgggccgcctgattcagcgatcccgcaccgtaaccggcgggtattatggccacagacaacaaagcagcacatattccggcaatataatgacgcatcatttcctccgtaaccgctcagaaaatcccgtccctgccccagatgtaacgtaataccccggcagcatcccgcggactgagctgtaatatattctgatacagcgctgattttatttcacaggccagtatggcatccttttccagggtttcggcttcctcttcatcaagcaaatcaccataggtatggcgcagccggagaaaaataccggtatataatgcgtcagtttctgcctgagataaacggggcattatttcttttgcgggtaaaaatgtcataacagctccgttatccggctctgcagggtaaatgaagctgaaacaaagcattccggagggatctttatccatcgcgctgttaaacaatgccagccggttttctgcatattgcagtatcatttcatccggcgtttgctgcagcagtacttttcgatcttctgtattactcatataaatcatacggtaaaaattccgcagtttaataccggataaaagataattccgtcctgatatattgctgtgcattgtttctgccgcaaccgcttttggtgacagaaaaaaaataagaagaaaaaacagaaagaaggcagaaaaatacactgtaatacgtaaacggggcattacagtaaacagcagaaaagcccccggcaccggagcggaatgtccggataaaatgccgggcggcatctgcgctgtcatatcagcaggttacccggctcattccagtaccagcttatcctgcccggcccgttcagcccagacattatattctctgaccagcgccatgacttcattattggaatctttcatttcccgcatatgcgcctgaagctttttcaaatcaccgggaaattcccgctgaatttcctgtgtttttatccgcaggcgctgcatttctttatttcgtctttccagcgccgccatcagcatatctctgatttgattacactgcgcaatagcttcaaaatcgaattctgaatacgcccgcatatcgtcgttgtcagtcataaaagcattacccttatctgcaatatactgaacaccgattatagcgttttaccgccgtgattgtccccgtaccttgcggcaggtaaaaatattaccgtctctttatccggcaaaatattttcaccggcagtcagattcactggttacgcatgaggtgattaaactgccatagttcatcgtctaatctcttcatggatatagtcactttccccaatcatacctcccggatagcggataatttgaactctataaggcgagttaccggccatgcctgtgcgggaggacatacagcagagtttttgctgaaaacatgaacatacatctgttatcagtcatatggacttgatgactggttttattgatagagatgaatatatacctatgataaaattttactaatttaaaccatgggaaaatacaatatgccagacgtaatcaaaatcataattgccgggcggaatgttggtggttttggtggtacggaaactgtatttcggtcattctgcagattactggctgaatctgagaaaaattatcagatatcttatattttttttaatgaggaagataatactgttaatgatgaatggctctgtgagagtgaatttatccgactcaactcatcagtcaaaaacagaaagataaaaaggatttctctggcatgtcagttctcgcctttaattaaaaagataaaaccagattacattatagcgtttgattccattggctgttacatttcaagattagctcttcgcttttccttcatgaaaactcctttgttttcatggaatcatttttctgtcgcgggttcatacaaagcgaaatatctgattatggcagacaaacacctgtcaataagtagcggaatatcacatcagttgtcaaagatgggcgtttcttcatctgatatctataccatatataatccggtaccaatacagaacatcacgataactactggtaatcaaaaaaatttcctgtaccttggccgggtaatgagcggaggacaaaaaaatatgaatgaattactccgcgcactatccggagttagtgatgactggactctgcacatcgttggttctggtgaagaatctgaaatagtaatattaaagaatttagctcatgaactaaaaatcagtgaaaaaattatctggcacggatggcagaccaacccgtggaactatgtcgtaaatgaaataaaaaacgtttctgcacttgttttaacatctgtctacgaagggttcccgatggtactatgcgaggcaagcagctatggtatttatattgtcagctcagactgcccgacaggacctggtgatattattcagccatataaaaatggtgagctatatcctatcggagatgaaaaaaagctggcctgcatactacataaaattgtaaccaatgaaacaacagtaaatcccgaaataattaaaaaatcaatttccgcattctatgaaaatgaatacatcaatcggatactggctatttttaaataaagtgttggtaaaccggggttccagccggcccccgggatcgttatctaagtgatataattatttagttctgtaccagcccattaatgtgatataagcgttgacgactgaaattaatgaaccactgcctgtatttcctgttgtaccagaaatggtgtgggtgtgagctccgatagcaacagtgtgattatgattacctgccggacttgtcgctgaatacgatattgaacttttctgatcctgatacggcccccgaattccggatgatattacattattgtaattatgggtgtgttcccctgttgtattcgtcgttttagttccgtaatcaaaacttgacgtagtcccggagaaactatggctgtgtgccggtaaatgggcagcggttaatgtaatattatcactaccgccgctggtcagcacattactgccgctgctgtttgccagccggattgttttattttcaccgatataggaccaggatgttcccggaaataagtcattcgggtttttattttgcgcaaaccaaatgacgacaccgacaggataaatcgtatcgatatttaccgcgtttttcagtgcttccgttacggcattctgactcatgactgatgtggatgaattgccggtattctgcacaactgcggttttatccatctttttattcagatccgcattcagtgcatattcccccgcaggctgataattccctttcggctgataacggccatcaccttctgttttggtataaacatcggtttttaaggcgtaattacccgccggggcataattacctttcggttggaaattagtatcagattccgctttggaataactgtaaccttccggcaaataattccccgcaggctggaatttctgatccgattcccctttgctgtaagcgcccacctctccggcgatcaaatcggctttcagttctgcccaggccgttccggtaaccggttcggtggtgttattttcaacctttgactgccaggttttgtttttatggtacacaacactgcggacagcatacggtttaccggcctcctgccagaccggcactccgaaggactgcatttcgccgactgcttcagtgatatcgtggaacaggctgttcatcttctcacgttcgatatctttggcagccggatctgtggcctggtcccgctcgtagtcatacccgtaaccctgggtataggaaaccgcgccgtcggcccggacttcatcaggaatagcagcgcggtccccttgtgttgcaaaggggactttaaataatttagtcatacgttttatgctccgaagttactgctcaggaagtttttccggttttcaccatgaccaaaggcttttttggtcacaatccggtatttgacgccgacaccggacgggcgcggcataagatcgaagttctccagcagaacgcgcaggcgttcatccggattaaaattaaacacgtaatacagataggtcatatccagcggatcgagcacaaataccctgctgtctttattgccgaagaaccgttcaaggaattcattaatattgctgactgtcgggctttgcgtcagattgaaataacgcatacggataatcagccgtttttgttcctgtgtcagtgacagtgtgtaatcactgttacgccggaaattcgccctgaaattagcctttttattaccaaaaccggtaccgatttttgttttatcatgcggcggaatatccaccccgagcggcacatccaggatccgcgcccagataccgaggccaaaatcagtggcggtatcgatattaaacacatcgttgtaccagttctgccagaagctgacggtcgcccgctcaaaccagtccgatttatggcgggccagcgctttcaggttttccgcctcttcgtactgccataacagtgcccgcagcagatctgaatgaaatgaaaacgactggatggagtctgtcatacaaacaccacctgaaccgcactgcggttaattttggcaacttccgtcagttttaccggataaatatccggtgaccagtgtgtgccgtctgcggataattcaatacggttgataaacaaccgcggctcagcggcattaataccggcagaaatctcaaacggtgaaacttcccgcccgaccaccagcccgccatctcccccggtatcgccgtttgcccaggcttccaccgccgccgggataagcgtttgtgcatccagggcggtttttttgaccgtcacacgacaaaacagcaccacttcttttgcgcgatcgaattttaccgtgtaaacctgcccgctgaccggctccgtcacctcaacctcctcactgccgttataggcggcaccgatggttttggtccgcagcagtgcggcagcaatttcctgactctccccgccctcgacgcagacatacacactgtgcggtacaagcgtgataccgtccgctgccatcggggtattggtataattttcccggtatgccagagagcggacaccttccagttcatacaacgcggaagtcatggcctcaccgacactgaccgtattttttgccagtgtcagtttacggcggcggcgggactgtaaatcagactccgcaatccggccggtaaccgcaccggtcgggttagtcaccgtctcccatccgagaacagaactggccaccgtcatcatctgcccggccggacactccacgggaccggtttcaactgcacgcatatcgccgctgacagtcccgtttttaccgataatcagcgattttgtggtgaaaaacgtgtcaccggccagtgtttctgcctgtgcccctttcggaatgatagtgcccggcacaccgccgaactgtacctgcgtcagaatcgagcgggtggcatcccggcgctcccctcccatcagtgcccagatagcatccagaaacacgccgccggcaagatccgggtttatctgatttgccagttccgcattgttacgcacaatggcatcacgattctctgtttccatcgtgatcaacaccccctgcggggtttccggcgaaacatccagatcctgaccaaacaccgccttaaactcattttcaacggctgtgcgctgctctgcagtatccgggataatcacgccggatgaggtaatataattatattcagccatttaacctgatactcccgtattcagtctgtaaaacagcggtatagctcagattgttatctttcagcgtggccgcgaatgaaatcacttctgtgacctgcgggatctctcctatccgttcacggaatgcggtttcaaacaccggcagatccgcctgccgtccaaacgtggttttccagtacggaatacccttgtcctgcttatgcagcatttcgccgcgcagtgctttgatatactgagcacagctgttttttactgcctgttcatcgcgggcgatggcgagattaccgtctcccccggtgaacagatcattattttcactgacatcaaatgtcatcatagcggttctcctgagtcctcatgtccgcgctgaataccgctgtgtttgtgggttgaaccgatgtctttgccgttatgtttcagggtgccgcctgccgcattactgtcaccattcacagcgtgattaccgttaatggtcacattcccggtataaatggtttccggtgcattaacctcaaacagcggcgtatccaatacggctttatccccgtgcagcgataaacacacagcaccatccgcagactgcaccaccagggcatccgtatttttgccgtcgattacccagcctttgagtgtatcgggaaaaaacatggcatcactgaatgtgtgcagacgtgcggtattgggttcgtcttccagtccgccgcgctggaaaatcaggctgatatcccggtcattggctttcagccagccgaaatcccccggttttaccggcatgcggaaaaaaaacccgccgccgccgaaacgaaacaccggaatattagccagcgcaccgcgcccgactttctttccggcggtcgtcaccatcatcaccagcggtttcaccacagcccggttactggtgtcgtcataactgaccaccgtggccggcagcatgtcgtcaatattcatcagcagactgcggaacgcagccgcaaactgcccggccagactgccgtcactggccatatcactattaggtttattcatggttttgcccgtatcgtcaggcccgtttgcaggttgccgtataaaaaaaggcatcctcatgtgaggcaatatcgaatttcagttgctcgatgatgtaatccccgttcagcgaagggttgaatttactgttcagccgcagcataccgccgaggcaggattcaccgtcgatcagatatgacacttcaagccctttctctgtcgccttcgggatccctatcatgccggttttctgactcagaatacgcagtttgccggacagcgctttatccctgtctttcacatacagcacatcgtcatcaataaaggctttcacattcccggcgtcctgcagccgctcaatctgcttcagcgcgggaccgcaaaaataccagttagcgacatttttatcggtcgcctggaaatccagtgaaacgtggcagtcttttgcgatttttgcagcgatctcactcatttttgacatcgcctgccccccggaagtcacaatatcacgggtaccggcattgccggttttggctttcagcgtcagtgtcacatccggcggtgacgcgatttccgcgctgacaatatcgccggtaaagatacggaatacgccggtactgcgccgcccggcttccaggatgatccggtgcggtgttttgctctccgcaaagggactggtttccgtcagcagcatgttgcgggtttgtgtattcaggccatcaatgctgaatgaacagtcattctgtaacggattggcgtatttcgtgcccgaagcatgcatacgcatgccctcataccattgcagacggccgttaacctcgatggcacagcggatcctgcgtaagtcaatcatcatccccccgccagaccagtgtctgtgtttttccgaactgttcccaccagggcaattcatccccgccggtcagtaacgtaaaattgccgcctgacgtaagatagcggtacgggatcatcggctgatccggcagcatccgcatcccctgcacaacaatctcatcatcgcagcggatatcacagcacatcactccgtgcgcggctttgattgtcagttcccattcctgttcattcagcgtgacccgcaggcgctgattcggcacggtattcagtggtataattttcatttgccccccggtttaccggcagccccgccggcaagtttgacggcaacagaactttttttcgctggtggcggtgctgccgtctgagcctgcactttgccgctgttcaccgtactgctctgttttttcttcgccaccttgcgcggcggtaattcgccgtattccggttcaatcacccgccactcggtaaaggtcagagagaggctgagaccatcagccatttccggattttcatcatgggtaaaagaggtgatcagcatcggcccgtaggctctcaccctggtctgaatacacaccagcttgtgacagtcatacgcctgctgtattgtcttaaactcatcttctgtttcgccggtgagcattaaatccatactgatagtcaccgcattaaccacgacatgatcactgcgggtttcaccggattccacctgaaacgatgtggctttatgggtatcagtaaccgtcagtttcaccgggcttgctgaatcaaacagcgtggcaaatgagttcacatcaaagattttgacttctgttatcatttctccatccccgaattatattcatgtcccatattttcgatgtgctgccgcagcacctcaacgatatccgccgcaatggtctgcggatcaccgtctttggcaacgatacggatctcaccgacagagacattattttcattgctgactgcagactgattactgatcgttccgctggtcagggatgccatcgggttggccgccagcgtggtgacatggccggtgatttgtccggcaagtttcagtgtttcctcttcactgagaggcggggtttccgggatgctgtactccagtttgcccttcgtggtgacggtacggttaacgttctgctcaatctctgccgaatcccccataccgacccagcctttcactgtactccagccctctttaaccagatccatccctttactgatccagccgaggatctcctcaatctgctcccacagccatgtgaagataccgacaaccgcatctgacacggtatcaaagaccgcctcaaattcagcgccccaggccatcaccccctgaatactgactgtcagccagtcaataaactcattgagtgccgtgttcatggtgttgtaagccgcgacgacaatatccgccacaacgccaattaccgacataatgaagtcaaacaggacaacaaacgcctcccacaccgtgagaatgaccgctttcagccccggataactgtcgagtatccgtccgatcatcgagtcgttaccgtcgatgaaattcatgatgtcgtcatacaccagcgcaaaaaccgccgccagcagaaggatccccgccaccaccgccataaccggcagcatggcagtccatgtactgatctgtgccagtttcatagcgtgaacatatttgcctgtcacgacggcggccaccgcgataaaaaagccggtgacaaaatttttgttttctttcgcaaaaacaacgattttttccagccagtccagcccctgagccagcgccgggatcagcatacccatcaggctgtttttcaggagaccggcggattgctccaggctcagcatggcattgttaaaactgatggattgctcaatactttcgcgggtgataccgccatagtctttctgcgtttccatcatccgggataactctttccgtcctttcatcagcagctcaatggtgccgttatcctcaacacccagtccgccgagtgtctttttggcctcaccgaatgacatgccctgcactttatccgccgtctgcagcaccttttccatcgaatccccggcaaaaccgaatgattttgccatagcggataaatcggcctgtgcggcactgcgtgttccgccgagagccgcgaccgagccggaaaacgcatccacatcctgcgtggtgatattgatttctctgcccagcttatcaatggactcaatttcagcggcgcgggctgtcgcatcactgataagtccggtgattgtcgttgaaataccggcgaaattaagggatttttccgccagtgccgcaacgttatcaaatgcactctgccaggcggtatccgaatcacggagagtaccctgtacttttttctgggcacttatttctgccgccgctgccgcctcgccggtgcgccgggtttcggagatgctgttctgcaggtcatcatgattctgcttcagcgccttaaatacagcgtcagattccccgccggtaaactgcaccagcgaggtcacaatggcactcagtttcgtactcatttcaccggtctgctttgtcacttccccggcgttactctcaaactcaatatactgtccgccgcttacctgctcctgccacggccacatctctttcagcaggctgccaaacgtcagcgtgttttgctgcgcctgttttatatcgtcaacgatgtcatccgtggaacgccggagattatcaagtgcgccgtttgtctgactgatatcagattcaattaactgaacaaaggtttccgtcagagacattatctatcctttaaagcggccagcgcttcgttatatctgttggtaatggcgatttcccacagatccagtgcctcctccagatctactgaggttttgagttcgctgagggtggcgagtttttcactgatgatgactgcaaagaagctatcagcgtttttataaccgacgggagtgaactgcctgccctgctgagcagggaggggaggaaaccttggctcccgcctttgccgaaaaaactggtgttgtatttcagcatttccagctcaaggcggatcagtgattccccgtccggcacatggttatcaatcagagcctgtgtcttcagcgggatctcttcaccgctgaccggcacacacacataggccatcattttcagcatggcatctttactgacttcgtagtcaccgattttcggcgcattggacagcggatatttggcgagaatttcccgcccggtgattgccgggagacggctgataatgaatgttttctcaacaccatcagcatcttttaccgccacttctttaggtttgatcagcatattttttcccgtaaaaaaagcgggctttcgcccgctcagaattaacgattacgtgtaaaatcaaaatcctggaatacaaatatgtactgtttggatttcagacggcccacactggagacagagcttccgcggctgccgttggtgatacggccgttacgtgcggtggtggtcgaaccgttgccgtaagaggcaaccatcgtgatgttatccccggcggcgcggcggcctcttttcgccgtattggcgtccagcaggatagccaggttctgatcttcctcactgcccgccggcacgttaattgttaccgtctgcggtgccggagctgaccagctcagcaggttaccattgatatccacgcctgttttcacaatctcagtcggctggaaatccagcggatccgcatcatccgcaaaggcggtgataagaataccggacggaaaggttttgctcgctttcaccaccagcgcgagaccggttgctgatacttcaatcatatttttcttccttacttacactaagttatgtgagccttcgactttacggacccagtcgcctttgccgtaaatcagcacgtatttcatgacatactccggcaaaccgtttttgccggtgttttcggtgattttcgcgtcataccagtaacctttgtcctgcacatcgtgccaggccagatcatcaccagaggcatctgccactgcgattttctgtacttccgtcaggtttttaccggccagaatagtgccgttatccagcgctttggtgactgcaccggcaatcaccatcagcgcctgcgcctcaccgtctttattggcaggaacaccgcgggtggccagcagaaggctgaaccactgctgtgcgatatacgctttcagccactgctcgttggcgtgaacactcatatccagcggatcagatgctccgccgcacaggaaaccgcgctgatagaaacggatttgtgagccggccaccgccgtttcgccgtaatagttcacacgcagcttgtcgaagcgatccgcatcagcgtctttggtcacctgtgccgggaaggtcacacccaactgacggaacatgtagtttgtcgcggcattcgtccggtcataatcggtcgctgccatcactgccatcggcagcgcctggataaagtaaccattgtccgttttcaggttcaggccaacagatgccgttcctgccagcgcggaatttaattcctctgcattgtcggcagtcacactgagatgcagctgatatttcacattctcaccggcgatatactgcgccagtggcacagcctgctctgccggtaattcagtgaggaacgtcgcactgccgaatgagtcagatacctgctctgccaccataaaagcttccagtggtgtctgcgccggatgcccttctgatgacagcccggaagaaagccccatggcatccgcgagaacggaatacgccacaccagcggagacatgctcctgtacaccgccgttcagttcgaacgcattcttttgcgcattaaacgtgagataactgcccgcgaactgcggctcgctctcagcgttcagttttgcctggatcagcgaggcaatatcggcataggatttggctgccgataaatccagatccttatagtttttgatggtctgaccgatggtgacggacagtgtgccgtcggtgacggcagtcagatcagccagcgctgccgctttgacgccgaacagtgccggtgtgcgcccgaccggcgcgtatgcggcaatttgcagcgctttcggtttacttaccggtgccggactgacataactgaaatactgacgggcaaactgagcttccggtgaatccgcccccagcagttcatcaacctgacccggcgcaaactcaaggacatgaccggccggaattttcggatcagcagagaataaccgtgcggtcagcttacgctcaggcacagcagaagcgccgatgaccgcagaagcgatatcgacataacgtgtttgtttaattggcatagtaaaaccttatatgcagtaaatatccgggaacaacgctgaaacaacgccggtctccgggcggagtgtacgggtaaacgtcacattgaaatcaaaagaaggtgcctgtctgtaatgcccctggtcgtcagccagatacggcacccggatagcaccggcgcgctgaacgccgactccctgtttattcagcacaccggtaaagggcagtgaattcacaatcatcctgactgcggccacaatatcaccggcggtatatgtctgagattcagtaataaacccctgaacccggtattttttttcagttatctggctttcggtatgattggcattctgcccgcggacggcataactgcgtttctgccatcccgcaggtgtctcaccaacaggataaaaggcaataaaatcctctccggagatatgattttccggaaagaaacccgccttaactcccgtggtaataccgtgatttttcagctcagtaaccagctggttataaataattaattcaatgtctttatcattcattcttacctcagtgcctgtgaatactctctgcctcctgtccggccataaaaaagccctgctcacaggcagggctgaacacaccgtattccggtgcagtgatataatgacagataaataatgatttaatttccgtcaggaaaccgtatattaatggcatccgccatataccataaaaccggaaccggcatcatggataacgattacaacagtaaatcaacacaggaattggctgatggtttagcgctgtatctgaaacagggttatatcaacccgctatatatcaactgcgactgtgaagatgagggtgcagaagaagcgggtttttatctggatgcgctttctgtacgtgaccctgatttatcctgtgatttccggaaaaaaataatggaatcgccggtaatcagtaatgattattttaaatcccaatgtatggaatatttactgttgtcatcagataaacaccgtgagtatgttattcagtatttatcctgtcattacgatgtattaccggtttctgtgctgcaaaaagcgatgttttatttttattgtgcaaagcgtgatcctgatgacaatgatgttgtcccggattcactaatagtaaaactcaaatcccgctatcatgccgttaaagataataaagacgttatggcttacgaactgactgaactgaaagaaacctgcgacgacttttacgtcgcatatccttcaccgtaagatgcaattcgtcattttttacagattannnnnnnnnnnnnnnnnnnnnnnnnnnnnnnnnnnnnnnnnnnnnnnnnnnnnnnnnnnnnnnnnnnnnnnnnnnnnnnnnnnnnnnnnnnnnnnnnnnnnnnnntaccgtttgcggccgcaccaatgtgctccggactgcggaaaaccaccccgccataatgacaaagaggcactcagaatctgaatgcctttcaatatgtaattcgtcattttttacagattagcacgctgtttgcggccgcaccaatgtgctccggacatcaggacaggctttatataaaatatccatatccagttgcactgccagtgtttccagacaaccaaaaataaaactttccgcgctctgtacctgtttacggatttcatcctcgcggactttatatttacgcccgatcgcccgcttgctcatccctttcacgtaataatccgtaatataatcgcgctcacgttccagaccggccgtacccagcatagatacacaacggtcgataacccggccatcctcatcgctgcatgagggtctctgtttactgctgttctgagcaagttcccggaatccggatgaaacacgggcccaacccatgcccgcacagtgatcacccgctgcccagccgccccagtgcgacagtatcgtctgaatgtctctgctcataatattcacctgtatagtatccgtatttatttcccggtatcagctcctcttcagtgcccgctcaggtcgccgggacactgacaggaaaagcccgcccgggattctaactggataaatatacagtatttttacggatgacgttaatctgctccggaaataacagggagattagccttgtgaatatccggagcaactatcagtgaaacacagaattagtggttatctgacggtgaaataactttcacgccttttatagccgtcacatcgattaataccggtgtatggtgatgcccggtttcggcataaaacatttcgccggtaacagagacctgctgattaagataatgctgatttttgctgtaaaaatcacctcttactatcagctgaaactggtcattactgccccagtccggactgtcttttatacaggtcaaaggtgctttggtaaaaagaacccaatacggctccggttcatcgccctcttccacgctttcataatttggcggccccggaaatacaacacgtttcagcgtaccggttaatgtcacctgctgcccgtcctcgtagcatatctgcgctgatgccggttttttactgtccgcaatattccggaacaacacagatgattttttataccattccagctggcatgcttctgtatcgcaattctgtaatctcagtttccggttttctctgactgtttttttaaactcatcactgtttccggtgattttttttgcctgcagataatctgcatataattcatcatccgcctgagataatgacggactatcgcacacaagtttttctgttttactctgtgctttactgcaatcaaaactgactgcaaaagacgcagatgaaaataacaaacaggatataaccaccacttttttcataccagaccttctgtttcccggtgacagcttacaaagataaaaaccagacatccgcggctgttatcccttaactcttcgttattgtgccacaggagaaatcacatttaacgcaggtcaggtcacagataatctccgtatgatttatttttaaccatggataccttattacggtatccggccggcagcatacaacatatcaatgatcacgcccgggctgaccggcatggcaaacaaaaacaaaaaatcagtgatgatgaaatcatatccgtactctctgtgattatcattccgccactatatcattttacctggtggccggaatccgtaccctcaacagaaaaggctgaaaacatcacataatgaccacctaaaaaaatcaagctgccgattagttttggtaagtaatgatacttatgttaaattgcctgtaccacctcagttcacgggaaagagacagcatgtctgacataaccaagatcatcattgccggtcgtaacatcagcggttttgggggcatggaaaccgtattcagtacattcagcagattactgactgaatccggaaaaaactatcagatatctttcgtcttttttaatgaactgaataatagtgttgacgatacatggctcggtaataacccgtttacacgtttcagttcatcgctaaaaaacgggaagctgaagagagtttattttgcgtgtaaattcgcttctgttattaaaaaaacaaatccggattatgtcattgcctttgattctgttggttgttacatttcaaggctggctttacgcttcgcatttaaaagaattccattgttctcgtggaatcatttttctgtcaccagctcatataaagcaaaatatatcagacttgcggataaacacctgtccatcagtaatggcatagcaactcagttatcaggaatgggtatcaatcctgcggacatttatacgatctacaacccggttccggaacagtttaaaacaatcacctgtggcaatacgataaattttttatatgtcggtcgcttaatgtgcggaggacagaaaaacatgaaggagttattcagcgcattatccggtgttcatggtgactggaaattgcatatcgtcggctccggcgatgactccgaaataaagaaattaactagcctggctcacgatttaaaaataaacgataaaattatctggcatggctggcaatcaagcccgtggaattacatagaaaaagaaataaaaaatgtctctgcacttattttaacatccgcatacgaaggattaccgatggtgctgtgtgaggcaaacagctatggtatttatactgtcagctcagactgtccgacagggcctgctgatattattcgtccatatgtaaatggtgagttatatcctgccggagatgataaaaaacttaccaccattctgaataaaatcgtttccgggaaaacagaaataaaccatactgtgataaaaaactccatttcactgttttatgaagatgaatatcttgcaagggtttcggatatatttaaataataactctacattttccagccacaagctgccgatacaccatcaatagttatttagtattcataaattcacatgacaatatcacaatactatttcactatcactggcactcagcccattgctcagtggttttagttttgaaatctgaaacagcgtattctttataatccactgacatgacataaacagttttatcatcctgctcaaagtaataaccattcttttttgttttcatcttcggactggagattttactgccgtcgggcctgaacgcagtgaatgctgaattgctcaatgataccgtggagtgaaatcggccttgcatagggcccatggcatcaccaacgatcacagccttagaataaatacaattataagcaacaccagaaccgattgaaccgccactgccagaagacctgccagccaatgatgccgcgcttactccgcctgttgctgttgctgccgctgttgagccgtgcagggattttttactattagccgatatggatttattactataattctttgtgctgtaactgtttgctgttcctatcctgcaaactttgtttgctgatatacatgagttgccgcagggaattccttttttgcaatttttagccaaagcatcagacaagaataataagggagataatgccactaaacagacgacagttattttcaaattagccatcacaccactccaataatcagtttccctcatgttaatcgccaggtggtgcaaaggaaagcaaaacggtgtgaacatttgaggtagacggcaaaaagaaaaacccgccatatcaaagatatggcggggtttttatggtgccggctatcggaatcgaactgatgacctactgattacaagtcagtnttttatatggtgccggctatcggaatcgaactgatgacctactgattacaagtcagtagttttgttttttaatcaattagataccgcattaaatcacgctttcacgtcccaacaattaaaaagattgaaaaggtataaagcacatctaaaaccatttgtgtcccaaatatgtcccatcacttctaccaacagctataccccccatcatttaaacaatttgcatatttgcgacaactctttgtctaactggtgccacattaacttttcacctccggtaactgactaaaatttgttgtgtatgccggtgatagcatttcgctcttcatcttatacccgctgccaacacctttccggcaaatatacagagttgtataattactaaatttataaagtatcagataactaagttaccttacttttttactgtactgatagtaatcacttctccatcctctttcacaaattcactctgtaatttactcggtaaaatatccaacactaattcagatggacgacagagctttacacccaatggagtgacaactattggtctgttaatcagaagaggatacttcagcatgaaatagataagctgtgtatctgtgaatcgaccactatcaagttccagttttttgtaaggttcaacatttttacgcagcagatctcttactgtaatcttcatttttacaatgagttttatcaaaacatctctgtctggtggtgtatccaaataatggataatattaggttcaataccgctacttcggatcatagcaagtgtattccgggatgttccgcaatccggattatgataaatcgttatattgctcatgtagtcaccattaattgagatacgaaagccttatgactaaagtgattagagtaatggttaagaccggaacagtcataataatgcctgtttttaagtaatacccccatgtgatagtcatatttctctgagataagacatgaagccataataatgttgcaaggcttccgataggcgtaattttcggacctaaatctgcaccgataacattggcatagaccatggcttcctgaataagaccggttgcattgctaccatcaatcgataatgccccgacaaggacggtcggcatgttattcataacagaagataaaaaagcaatgatatagcctgttcccagtgttgctgcccatattcccttgtcagcgaggtaattaagtatttctgacaggtaatttgtgagcccggcatttctcagaccatagacgacaatatacatacccagcgaaaaaataacaatctgccacggagcaccacgtaacactttccgtgtattaattattttgccatgggacgcaacaagccataaaacagatgcacccactgccgcaatagcactgaccggaatacccagcggttcgagaacaaagaaaccaatgagcagtaaaatcaggacaaaccatcccgccttaaatgttttcagatctttgatagccgatgccggaataaccagctttgacgtatcgtagtattttggaatatccctgcggaaaaaccagtgcagcataaaaagtgttgcaataatagcaacaatatctaccggcaccatgacagaagcatattctgtaaatccgatattaaagaaatcagcagagacaatatttaccaggtttgagactatcagcggcaaactggctgtatcggcgatgaatcctgcggccataacaaacgccaatgttgtccctttactaaatcccagtgccagtaacattgcaataacgataggtgttaatatgagtgctgcaccatcattggcaaataaggcggccacactcgcgcccagcaagataatataactgaataatagtttcccttttccgcccccccattttgctacgtggagtgcagcccattcaaaaaaaccactctcatccagaataaggctgatgataataacggcgacaaaagtccctgtcgcattccagacgatatcccagacaacagggatatcctgaacagtaattactccggataagagtgcagctaacgcacccagggtcgcgctccagcctatactcagccctttgggctgccagataacaaaggtaatggtcagaacaaatattaatgcagcaacaagcatagcaacctctttcagaaggtgcaggaagcaccttctgccaatgataaaactcaatcagccaaccggctcagtgccacgataccaacaggctcgttttcaagcagcggtacgattgctactcgttttgccagcgatgatgtcacttttttgatctgcggaatttcatgctctgctctggaaagtaataacggagatgttgtttcagtgacagaaaggctgttattgatgacccaggcccacggatgaataccagctctcataagatcattctgtaagttttcggcttcaagtaccggggttgtttctgccagggtcgtaatgatgaccttggttctttccggatcctgcagttgcatcataggtgtcaggaaatggcctttttcacccattttttttgcgatttctttgtgataggcaccggtggcatcgagcagaagcagagtatgcccggttggtgctgtatccataataacaaaacgattcccggcttcacggatgatgcgtgagaatgcctggaatacagcaatttcctctgtacacggagaacgcaaatcttcctcaagtaatgcccggccttccgtatccagagattttccttttgtctccagtacatagttgcggtagcgttcggtttctgcaacagggtcaatcctgctgacctgcagattaggcaggctcccgtttaatgtattttccaggtgtgcagccgggtctgaggtagtcagatgaacatcagcgccctgttctgcgagttttactgcaattgacgcggcaattgtggttttaccgacaccgcctttacccatcagcatcaccagtccgtgcttctgcactgcaatctcgtcaacaagagacgatagtggctgcaatgacaggtcaggcttagtattgtgaatagccggcaatgtttgttctttgtcagataataattcctttagtgcctcgatcccgaccatattacggacacgtagcatcaacatgtctgtcggtaggttgcggagtatatccggcatattttgtattgcagtctgttcacggttacggagcgcctgcgataatttgtctccggctgtcatcgctgattccgggaatacaccattaattatcagctgctgattttttacacctaatgctgaaagctcgtcataagtacgggcaacttcacgcaatgcggctgactgagggcgggcaaccagaattaagcgggttaattgtttattgctcagtgcgtcaactgccatgctatattgttcacgttgcttttcaagtccggacatcgggccgaggcaggaagcaccgtccggattatcactgatgaaatcactccaggcacccggtaactgtaacaaccggatagtatggccggtcggagctgtatcaaaaataatgtggtcaaactgatttgtgatttttatatctgtcagtaagccggtaaattcatcaaatgcagcaatttcggttgtacaggcaccggatagttgctcggtgatactctgaattacggctgccggtaaactgtcttttatcgggtctatgatttttttccggtattcttccgcagcggcttgggggtctatctcgatagcggacagattaggtacggcggaaatctgtgtaatcgtattgccgatagtttgtgaaaatacctgtccgacattggacgccggatcggtactgaccaaaagaacttttttttcgctctctgccaatttaatcgcagttgcgcatgaaattgatgttttacccacaccacctttaccagtaaaaaataagtaatcgggcacgttatccagaaatttcatttttgtctcctcaacagcatgtcttattgtttccgcagcaaccggctgacaggactgatttttcatcagaaatgcgaataccaaaccaacgggctaactcatgccgtttcgggtaacgtcctgtcagaacaacctcgccatcaagaagcagtaatggcagtgcatctgcgccggcagtttcgagaaatactttagcttttgcgttatttacaaattccatcggctcttgtcccagattaaaacggcggacattggcaccctgttttttcagccaatcaaaatcagtggcaaaatccactaacgcctgatcgacatctgttccgcagacgccggtactgcaacataaggcaggatcaaacacttccagcttcttcatatttacacctcatatatgattaatcgaatatattaatttaaaaaattttatgcctgacagttacctgctgtatttttgttgtttatggcagcgagtaactgtgaaactctgtttttctcggtggaatatgtcacctcgatgatatttttaatccatggtaacaatgccggagataacctgtaatgaacccatttcccgtgtttagagtccagaagtagtccagactctctgagcattgcgagatgtcttgatgtttttggctgtgacaaatttagtgctgtgtaaatatcacaaacacacaattcaccagatgctttaagcagtaatatgatattcaatcgtgtttggtcgcttaatattttaaacagttgtaaggattccatatctgctcctgtatagttattgaggcttaatctactcctgttacacatatgcgtcaaatcgaatatattatttatcgtaataaataaggaataaccaccaataccctgaccaccaactttaaaaaagccaaggatgaagcaagtatcgacttggaagaggatacgccagctacattctatgaaatgcagtcattatctgagcgcttatacaagaaacagggaataagaccaaaaatctgccgggtcataaaaaccagaagcaaatggataaatatcatgatgaccgtggaaaaataggataaaggtgttgatctgatattttattgacccatagttaaatttgtgtatcggccttccaggctgtgtgccaactgccgacatattttgtattctttgtgaactggtttatagaaagcagatcaatgtatctgttcaatgcaaagaaaaaatcccggtatctccggaaagaaatgccgggagtctgttgttacctggctatgagcgcaaacacaccccaaccaaagtattcccgcccgtacgtcacatggcgtttcggcgagatatttaactcagccctgacctcagcagcaaagtcgtcatcaggattggcttccagccagcggcgcatggtcagccatttcgcggcttcatacctgtcccagccatcctggtccgccagcaccatttccaccacgtcgtagccgaggtcgtcgaacgcactgataagttcaggcaacatcaggagatcagctattgcgctgacgccgcatgcctgagctatctcttctgttgagggtagctgacgccagaagggttctccgataagcatgatcccgcccggcttaaggctctgcgccagcaactccaccatcccggcaaatccaccggcaatccatgtcgcacctacgcaggcggccacatcgaatttatcttctgccacatacccagcggcatcgttatgtatgaactgaacccgatcgctgacaccgagctcttcagcgcgcagtctggcctgcgcgctgaacaactgactcatatcgataccgagcccagtaatggagtactcccgggcccaggtacaaagcatttcacccgagccgctgcccaggtcaagaatgtgtgtattcggcttcatgcgtaacacacgacccagcgtggcgtacttctcttccgtgaacgggttgtggatgcggtgttcgctttcactgatggtaaaaatacgtgggatatccaatactgaattccttttattgctttgagtattaagagaaagttcctctgaggtttttgctttttcagccagcagagcaaacaacttcccttcaaatgtctcgctgactggccagttgtgactttcaggaggaggaagcagggtaaatccggcattgttgagcaagctagcgtactcttcatcgcgccaggccgtcatttggctgccgaaacgcgaggtgtgaccatttacctctatggtccagaactgcgttgagctgatctgcgttttttcatcccagccatgttccgtcagtagtagatgagggacacccagaaaaagcccgtccggacagcgttgccagctcacttcagccattccctgacgcttaacttcttcgaaagtatggacttcagtgagcagcctgccccccggatccagccacagcgcgcagtggttgacgagcaagcgcgcatcctccgagctgaacacattcagttccccgaacgtcatcatgatgaaatcgaacgacctatccggccagtatgcacggatatcctgctgaatatagtcgatgtttaaaccagcattctgcgcctgctgacaggcccagttcacggatgccggtgagaaatccacgccagtgcagtgaaatccacgctccgctaagcggtgggtataaaagccgggaccgcaaccgagatcgagtatgtgtgccccaggggataactggctggcgatccactctacctgttgctcaatgatgctctgcctgcggctggcccagtcgtggtcctgcgataaatggttcgacagcatgcgctggctgaaggccggttcgtcccaggggattttgctttcctccgccgacagttgaatgtgtcgggatgaggaaataagggtgctgatatccatcatgctctccttagcggttatcaagctgcgcacgaacgttattcagcccggtggtgttgatgcggtacggctgaccgttgacggacttgataagttttttggttttgagttttttgaaggtggcaagggtacagtcggtgagcaacagcccttcacgggtgtaacattcaacagcggtgaggcgaccagacgcatcgcggacttgcgcaatacaaccacctttggcgagaacgtgtaaggtacgttgttcctgacgggataaattcatactggaaaacctgtttaatcatcatgtgcaaaacttgcaaacacacagtggtgtccacattcgatttcggcgcattgataatcagttcgacctaaaaaggtcggtaagctgattatcggatgattacattctccagcatcaaagcctcgggttagttgaaaggtatttacggaataaatgttaacacacaatttaaatatgggtatgtatcatacgataaagtgtgatttgtttcataaaactaccttttttaactttggccttctccccattgattcacacagtggtgatgaccttgccaaaaaaccggggcttatacagcaacaggtatcgcgctatgagtctgaaaaacatcaatgaccatagacactgttgtgatgattgctcacgcacttaatgtttctttaaacggattctatctgattactttaccttccctgaatatgataactgtgcaattttgttaaattattacaacgtacgcaaatatccgcgccggatatccatcagcgcgactttgttttattcctctgaatcttcggcctgctccgcaacctcctgtgcttcacgctctgcctgctcacgctccatctgttcagccagttcacgttgctt

SEQ ID NO: 33 - DNA, 68235 bp, unknown
  Altogen 322075 strain
  misc_feature (39247)..(39346): n is a, c, g, or t
  misc_feature (44120)..(44241): n is a, c, g, or t
gagtcccgtccgttccgccaacaaacattaaccccgataggaaactatcggggttttgttttttgtatgaaataaattcaccttgtcgttttttcctcgacagaacctctctttttcgttagttttggatgtccggatgtctaaaataacaaggagagcccgccgctatgccaatccgtatccctgatgaacttcctgctgtcaccgatttgcgtgatgaaaatatctttgtgatgacatcatcacgggcacaatttcaggatatacggccactgaaagtgctgtttttaaatctgatgcctaagaagattgaaacagaactgcaatttctgcgtctgctctccaacacaccgcttcaggttgatattcagctgctgcgcatcagtcaccatgaatcaaagaacacacccaaagcgcatctggatgccttttattgtgattttgacgatataaaagaacagaattttgatggcctggtgatcaccggagcaccactcggcctggttgaatttcaggatgtggattactggccggaactggatgagattatccgctggtcacagacgcatgtcacatctacactctttgtctgctgggccgtacaggcggggctgaacacgctttacaatatcccgaaacaaacgctgccggaaaagatctccggggtgtatacccatatcacactgatgccgcatgcgttgctgaccagaggatttgacgggcagttttccgcacctcactcccgctatgcggcatttcctgaagcgatgatccgtgaaaacaccgatcttgatatcctggccgcttctgaagaagccggagcctatctgtttgccagtaaagacaagcgtcaggtctatgtgaccggccatgcggaatatgatgcggatacattggcgggagaatatcagcgtgactcggatgcggggctggatcctgctatcccggtgaactattttccggataacgatccgtcgaaaacaccggtctccagctggcgcggacacggccatctgctttatgctaactggctgaattattgtgtttatcagataacaccgtatgacctgagtgtgatgaatccgacggcagactgataaaaaaagccaccgcgaacggtggcaaaaggcagacttaattcacgatgtctttatgcagcggcaccggcaacggcttgtgccgccagtgcgggaatacggtcataatctccgtcgcggagtgcatctcccgcccccagccatgagccgccgacacaggccacactgctgagcgcgagataatcccggtagttattcagggagatcccgccggtcgggcagaaacggatatccgggaaggggccggagatagctttcagcgctttcactccgccgtttgcttctgccgggaagaatttaaaatttttcagcccgaaagccatacccgccatcagctcggaaaccgtggcgatcccggggatcagcggaatggagccctgatcggctgcctgcaacagagattctgtcagaccggggctgatagcaaactgtgcaccggcgtcagtgacggctttcagttgttccggattaatcacggtacccgcaccgacaatcgcctccggcacttcttccgcaatggcgcggatggcctcaattgcacactctgtacgcagtgtgacttccagaacgcggatcccgcccgcaaccagtgcgcgggccagcggtactgcctgatgcagctcacggataacaatgacaggcacaaccggtcctgcatttaaaacggattgcgcacttaacatctgatcattcatcgtcattctcacttttataaaaacgaatacagcaggcaccttcttccgcacctgagagttgcgtgcgtaatgcactgaataattcacggcctgagccgtcccgctctgcactgaggtcagggatgacactctcacgttctgccagaacagcctcatcaacaagcagcatcagctcgccggtctgtccgttcacccggatcatatcgccgtcgcggactttggtcagcagcccgccggtatatgcttccggggtaacgtgaatagcggaaggcactttgccggatgcgccggacaaacggccgtctgttaccagggccacgcgataacctttgtccatcagcacgcccagcggcggcatcagtttgtgcagttccggcattccgttggcctgcggcccctggaaacgtaccaccaccacacaatctttgttcagttttccggcctcaaacgcgggcacgatatcatgctggctgttaaacacgatggccggggcttcaataatctggttatcggcaggaacagctgaggttttcatcaccgcacgtccgagatttccggtcagcactttggtaccaccgtgagacgaaaacggtgcatttccggatgcaatcacactgtcatcaagcgagctgagcgtgccctcccgccatttcagttcaccgttatccagccacggctcctgtgtataacgggataagccgaaaccggcgacagtatgaacatcttcatgcagcagccccagactgagcagctcacggataatcagctgtaacccgccagcggcatggaactggttgatatctgccgggccattcgggtagatccggctgagcagcgggataatgtctgacagctcagaaaaatcatcccagttgatgatgatcccggccgcagcggccgtcgcgataaggtgcatggtcagattggtggagccgcctgttgccagcaaaccgactatgccgttaacgatgactttttcatccaccagttgcccgaccggcagataattaccgctgttttcggtaaagcggacaacctggcgggcagcggcatctgtcagtgcggtgcgcagcggggtatcaggatgaataaaggacgcgcccggcagatgcagccccatgatttccatcaccatctgattggaattggcggtgccgtaaaaagtacaggttcccgctgaatgataagaagccgcttctgcatccagcagtgcccggcgatcaactttcccttcagcaaataactgacgaacatgtactttttctttattcggcagaccgctggtcatgggacccgccgggataaatacggacggcagatgcccgaaagagagtgccgccatcatcatccccgggacgattttatcgcagatcccgaggtaaagtgcgccgtcaaacatattgtgggaaagcccgacagcggcagacatggcaatcacatcacggctcagcagggataactccataccatcctgcccctgggtcacgccgtcacacatggcgggaaccccgccggcaacctgaccgatggcacccacgctgtgcagtgctgctttgatttgtgccggataaaattcataaggcttatgtgcagacagcatatcattgtaagcggtgatgattgcaatatcgttatgcgccatattgcgtaactgttgtttctcatccggctggcaggcggcaaagccgtgtgccaggttaccgcaggcaagctgggcacgatgaacagttttactgcgtgcggcgctgattttctccagataccgggcacgggatacacgggaacgcgccgtaatacgggcagtaatttctgaaagtcgcggatgaaccggcgggtacgcagaatgtgtcatagtcatggctccgtgctgattatctgcctgctgcagtatcattaactcgtttgttaccggtaacattgtcatagatcagcaacggattgcaacttttatgagcaattctctttcctgaatatgatccacctcaaatttagctgaaacgagaaagctttcggcacggatcgaataatcagaaaaagagggttgagtacctctgcggatcacagcaacatgaaaaacgctcaggttgcacgttaatgcactcagggaaagttatggtagtatagacgttcagacggctatttaaacgggcattgcagagtggagtcagataaatggataataaaatcagtgtattaaaaaaagcgcttaatcaacggatcctgattcttgatggtgcgatgggaacaatgatccagcgctatgcactgaacgaaaaggaataccgcggtgagcgtttctctgactggccggtggatctgaaaggaaataacgatctgttatccattacgcagccggatattatccgcgagatccatcacgcctatctggaagccggtgcggatatcattgaaaccaacagctttaactccacggttatttccatggcggattatcagatggaatccctgtctgatgagattaatgaggccgccgcgaaactggcgcgggaatgtgccgatgaatggacgcgcaaaacgccggaaaaaccccgctatgtggccgggattctggggccgaccaaccggacggcatcaatctcccccgatgtgaatgatccggcttaccgcaatgtatcctatgatgcgctggttgaggcataccgcagctctgtgcgggcactggtccgcggcggcgctgatatcattatgatcgaaacaatcttcgataccctgaatgccaaggcggcgatctatgctgttgaaactgaatttgaggcgctgggaattaaattgccggtgatgctttccggtacgatcactgatgcctccggccggacgctgaccggtcagacaactgaagccttttataactccatgagacacatccgcccgatttctttcgggctgaactgtgcgctggggcctgctgaactgcgccagtatgtggcggaactgtcccgtatcgcggattgctatgtcagtactcacccgaatgccggtctgccgaatgcgttcggcggttatggcctggatgctgccaatatggcgggctatatcagtgagtgggcgcagtctggtctgctgaatattgtcggtggctgctgcggcaccacgcctgaccatatccgtgcaatcgcacaggcggtggcagatattccgccgcgtgttattcctgatcgccctgtggcctgccgtctggcgggactggagccgctgaccatcgacgaaaattctctgttcgtcaacgtgggggagcgtactaatattaccggctctgcacggtttaagcggctgattaaagaaggtaattaccaggaagcactggatgttgcccgtaatcaggtggagaacggcgcacagatcattgatatcaacatggatgagggcatgctggattcacaggctgccatggtgcgtttcctgaatatgatttccggtgagccggatatcgcccgcgtaccgattatgatcgactcctcaaaatgggaggtgatcgaggccgggctgaaatgtatccagggtaaaggcattgtgaactcgatttccctgaaagagggagaggctgcttttatcgatcatgccaaaaaagtactgcgttacggcgctgccgtgattgtgatggcctttgatgaaaccggtcaggcggatacccggcagcgcaaaacagaaatttgtcagcgggcttaccgcattctgactgagcaggtgggattcccgccggaagatattatttttgacccgaatatctttgcggtggcaaccggtattcctgagcataacaactatgccgttgattttattgcagcctgtaaggacattaaggcgaccctgccgcatgcactgatctccggcggggtctccaatgtctctttctcgttccgcggaaatgatccggtacgggaagcgattcatgccgttttcctctattacgccatccgtaacggcatggacatggggattgtgaatgccgggcaactggctatttatgatgatttaccgtctgcactgcgtgatgcggtggaagatgtgatcctgaaccgccgcaaagatgccactgaccagctgctggcgctggcagaagaatatcgcggcagcaaaggggaaaatgatcagccgcagctcgcggaatggcgcgggtgggatgtggaaaagcgtctggaatatgcgttggtgaaagggatcacggaatttattgttgaggataccgaagctgcccgtctgcgggctgacagcccgattgaagtgatcgaaggtccgctgatgaacggcatgaatgtggtcggtgatctgttcagtgagggaaaaatgtttctgccgcaggtggtgaaatccgcgcgggtgatgaaacaggcggtggcgtatctggaaccttatattcaggcagcgaaaaccagcggctccagtgccgggaaagtccttctggcgacagtcaaaggcgatgtgcatgatatcggcaaaaatattgtcggcgtggttctgcagtgtaataactacgaaattatcgacctcggggtgatggtgccctgtgaaacaattctccgcacagccattgaggaaaaggtggatattatcgggctgtccgggcttatcacgccgtcactggatgaaatggtgtatgtagccaaagagatggagcgtcaggggttttccctgccgctgctgatcggcggggctaccacatccaaagctcatacggcggtgaaaattgaaccgaattacagcggtccggtgacctatgtacagaatgcctcgcggacggtcggggtcgtggcagcattattgtcagataaacaacgggatgaatttgttgcccgtacccgcaaagaatacgaggttgtccgcgaccagtatgcccgccgtcagccgcgctctgcaccggtgacactcgcacaggcgcgggcaaatgcatttgcggcggactgggataattatacgccgccacgcccggcatttaccggcgtgaaaactgtcactgcaccgatttcggtactgcgccgctatattgactggacacctttctttatgacctggtcgctggccggaaaatacccgcgtattctggaagatgaggttgttggtgaagaagcccgccgcctgtttaaagaggcaaacgcaatgctggatgagctggacagaaccggcgcactgacaccgcgcggggtggcggggatcttcccggctaaccggatcggcgatgatatcgcggtttaccgtgacgaatcccgcgaagaggttctgttatacagttgtcatctgcgccagcagacacagaaaaaagatgatttcccgaatgcctgcctggcggattttgtcgcgccaccggggattccggattacctcggagcctttgccgtcaccggcgggcttgaggaggatacactggccgcacagtttgatgcggcacacgatgattacaataaaatcatggtgaaagccctcgctgaccggctggcggaagggtttgcggagtatctgcatgagcaggtgcgtaaaaccgtctggggctacagtccggatgaaaacctggataatgactcgctgatccgtgaaaactatcaggggatccgccctgcacccggctatccggcctgcccggaacatacggagaaaagcaaaatctgggaactgctggatgttgaaagacataccggcatgcggctgacggaatcttatgctatgtggccgggggcatcggtatccggctggtatttcagtcatccgcagagccgctattttgcggtggctcagatccagagagatcagattgaggattatgccgcccgcaaaggtatgccggtgaaagagcttgagcgctggctggccccgaacctggggtatgatccggaagactgagtattatcgcatgtcagtctcctgtcccggtttgcgttaaccaccgggtactgttctgcgtatagtgaattccgctgtatcactgtacgccattatcagaacagaaggagaaccgtatgaattcagtatttatcattgctgacggccgggccggggaggtgatatgacactccccgttttcaggccgttaattatatctgccacttttgtattatgcagcgcattcgccggtaactgccgggcggagactgatctgccatgcactatgaccctgcaacacagagccatcatgctggatggcgcgacgtgcatcagcaaaaagcggttaccgggctgccctgtgctatgccagccgtcagaggtgcaggaaaaaaacgttcaggttacctgttttcgtcccggagagcctttaccttttgacagaactgcagatgtcactgtcccggtggtctgtgaaataatactccctgtggatatttcaccggacaccacaccataatctgaaataaaacaggataaccggccgggatcctttcaatcgttttctcaattatcacgcaatgtgacagcctgctcttgtcattgtttttttcatccccatttatagataagtaattatcccgtactatggctgacaacagccgtgaccgggcatatcagattcagccataaaagggagtgatgagacaatgtaccgtttctatattcaggatgctttacctgccgggtgcctgcccgcgtattcgctgccgaaagcagatcagcctcattattatgaattggatgagagtatcctcaacgctgcactgaatatcatgcagatcacggatatcctggataccgatgatgtgctggacgatgactgctttaaccgtatctggctgaaaagcgagctgacacccgcccgggcgtcagaggtctatcacttcttatatcagcagcaactgccggaaccggtaccgtcaccggatgaaatcgccgcctttaaacaggcgagagccgatgaactggcgctgctgagccggcgcagcccgaaagaggggtatgtgcctgtccataaatttgccacacaggatgcctggcggatcatgccggaagaatgcctgcttattgccggtgttctgactgatcacatgctggaagataacaatatggtggtcagtaacatcgcatcactgtgcaaaatcagtcacaaaacactggaatatgccctgagaggctggcgtgagtttaatttattcgcggcagaacacggcggttatcaggtttgctgatgattcagtaatttttgttacgcaagaataacactagatatgaattattactttcgaaactagtaaataaaattaattgctattgaagcaataatacataattagcaattaaaatcagtataaataactctgatagttattgataaaaattgtttatattgttttgtacaaatatgagttttattaatggaaagaccggcgggttaccgtataatttttcatgagggatatgattaatagtgataaataattcattgttacttatgtttcctcccgtgatcgtcttactcttcttcatattgggagctttcaatatcgttatacagcggacagtatacggtatgcatgtatcggcaatactcgtcacttgtgtttcatgttgatctctgtttcgtgtgattgatcgcctgacgctgaccacgtcaggcgtttttttatctgaaaaaggagaggatcagaacagatcgcggtgaagggcacggatgatatcttcggcatcattgccggggaccagcaggcacatgttgtgtccgcttgcaccataactgatcatgcggatattaaacggctcaagggcgctgaaaatcgttttacccagcccgtgtgcacgggtcagttcattaccgataaccgcgaccagcgccagattctgctccacttcaatacggcacagtgcggacaactcgtcggtcagttcatcactgagcaatgttccgttagtgtgtgtggaaccgacggtatccagcgtcagggcgatactgacttctgacgtggtgatcacatccacggaaatattatggcgggagagaatagtgaaaatttccgccagaaagccgcgcgcatgcagcattttcaggctgtgcagtgtcagcagggtttgctggcggcgtaatgtcagggcgcggaacagcggcggattcgggtcattatcacacaccagcgtgccgcccgcaccgctctctttgctggagccgacaaacaccgggatcccgctgcgtacagcgggcagcaaagtggccggatgcaggattttcgctccgaagttcgccatctccgccgcttcatcaaaggtaatatgatcaatcggataggcatccgggacaatgcgcggatccgtggtgtagatccccggcacatccgtccagatatccacacgctggcagccgagcgcttccgccagcagtgccgcagtgtaatcactgccgccgcgtccgagcgtggtggtgcgccctgcagcttcgcggccgataaatccctgggtgatcaccgggccctgtgacagacgcggggcaaggagctgatcacagcgcgtgcgcagcacagcggtatccggttcagcccggccgaagcagtcatctgtctgcatgacctcacggacatcaaaccattgcgcctgtgcgccctgctcgcggagcacttcggtaaacagcagcgtcgacataatctcaccatgactgacaatctcatccaccagagcgctggaggttgccagtgccgctgcatccgataaggtggtgatattgcccagcaggcggtcaatctcattgtgcaccgctgcgttctccggcagacgggacaggatttcatattgtgtgtcacgaacctgtttcagacatttttcacgttgcgcgcgcgggcatccctgagctaattcgattaatgcattggtgatcccggcggaggcggataacaccaccagtgccacaccgggggtctgcagaacgaccccggcacttttctgcatggcgtcataatttgccacactggtaccaccgaattttgcgataacctgctgagcaggcgcggaagatactgacgccataatgaattcccttatcccgtaaaatgaaaaatgtgagctgtgttacactgatagaattatcgggattgccggaatgagtcaatattgattaacggataatcaatatctttcataatgacaggcaaattatcgttttttgcgatattcggttccggcgctggttttgtttctgttttttgagcaatatcacggaatgacagatgcataacacctttatcgtcaggacagagtacactttgttgacacgattcagttttggttttcaatgaaaagagagctgcaatgaaaaatattaaccccactgatactgcggcctggaaggcgctggaacagcattacgacacaatgaaaactgtgcatctccgcgacttatttgcgcaggataacgaccggttcagccgtttttctgccacgttcggtgaagaaatgctggtggattattccaaaaaccgtatcacacaggaaacccttgataagctgctggcactggctgaagagtgtgatgtgcgtggggctgtccgcagtatgttttccggtgagaagatcaaccggacagaaaaccgtgcggttctgcacaccgcgctgcgccaccgtgataataccccggtgatgactgacgggcaggatgtgatgccggaggttcgcgccgtgctggaaaaaatgcgcgtgttcagtgagcggatcatcagcggggagtggaaaggttataccggcaggccgattactgatgtggtgaatatcggtatcggcggttctgatctcggcccttatatggtgacagaggcgctgcgcccgtataaaaatcatctgggcatgcattttgtctccaatgttgacggcacccatattgccgaaacactgaaagcgctggatccggaaaccacactgttcctgatagcttccaaaacctttaccacccaggaaaccatgaccaacgcccattccgcgcgtgactggttcctggcggcggccaaagacccggcgcatgtggcgaaacactttgccgcgctgtccaccaatgcggatgcggtggctgagtttggtattgataccgccaatatgtttgagttctgggactgggtcggcgggcgctattccctgtggtcggcgattggtctgtctatcgtgctctctgtcggttatgacaacttcacgcagttgctcgatggtgcgtatgccatggacaagcacttcaccgaaactgaattctcacagaatattccggtgctgctggcgctgattggtctgtggtacaacaatttcttcggtgcggaaacagaggcaattttgccttatgaccagtatatgcaccgctttgcggcctatttccagcaaggcaatatggagtccaacgggaagtatgtggaccgtaacggtaaggtggtttctcatcagaccggtccggttatctggggcgaaccgggcaccaacgggcagcatgcgttttatcagctgatccatcagggcaccaaactgatcccgtgtgattttatcgcaccggcacagagccataatccgctgggagatcaccacagcaaactgctgtcgaatttcttcgcgcagaccgaagcactggccttcggcaaaacccgtgaacaggtggatgcggagtttgccgcacagggcaaaaatccggcagaaatggattatgtcgcgccgtttaaagtctttgagggtaaccgcccgaccaactccatcctgctgaaatccattactccgttcagcctcggggctctgatcgccatgtatgagcataagatttttgttcagggcgtgattatgaatatctatacgtttgatcagtggggcgtcgaactgggcaaacagctggcaaaccgcattctgccggaactggcgggtgacaagccggttgagagccacgacagctcaaccaacggcctgattaaccggtttaaaaactggcgtcagtgctgatttttctttaaagcctgttttatgagcaaagccgcgctgcattatgcagagcggctttatttttagcaaaaaattttcagtaacgcgctcatttcctgccgggttttgttaaagtgtatcagaacgcatattatgcccctgataaccggatatattcatgacacaaacagtgataacaccccccatccgctggtttgataatgcggaaatgatccccgccggggtgctggactggttatcagaattagggtcaatgacgcggcgctttgaacagcactgcaatgaagtgacggtaaaaccgtattgtgaaaaatatatctcccgtgaagcgctgactgaagaagagcagatgcatctgcccggcagtgcacgctactggttacgggaggtggtgttatatggtgacggggttccctggctgaccggccggacagtggtgccggaggagacgctgacaggggaagagcagcagttactgaaaatgggaaatgtgccactcgggcgctatctctttaccagcggttgtctgacgcgggattatatccgcttcgggctctcagaaacccactgggcccgctgttcgcggttgtgcctggccggtaaaccgctgctgctgactgaagtttttctgccggcctctccggcataccccgcataagtgaatatctcggagaagaataacgtggaacgaagcatggtacgcagcaagtggcaggcatacagccgtctgatgcggacagaccgcccgattggctcactgttactgctctggccgacctactgggcgttatggatagcggcccggggcgtcccggactggcatattctgatcatctttaccattggagtgttcagtatgcgtgccgccggttgtgtgattaatgatttcgccgaccggaaatttgacggctcggtggaacgtaccaaaaaccgcccgctgccgcgcggtgatgtcacggaaaaagaagccaaaattctgtttgcggtactggtgctggtgtcattcggactggtactgacgctcaatacgatgaccatctggctgtcggtcgccgggctggcgctggcctgggtgtatccgtttgtgaagcgggtcagccatctgccgcaggtggtgctcggggcggctttcggctggtcgattccgatggcgtttgcggcggtcagtgaatcgctgccggcagagtgctggctgctgtttgcggtcaatattgtctggtctgtggtgtatgacactcagtacgcgatggtggatcgcaatgacgacctgaaaatcggcgtgaaatccacggctatcctgttcgggcgctttgataagatgattatcggcatattgcagctggtaatgattctgatgctgttatggataggactgatagttaacctgtccgggatcttctactggtctctgctgctggccggtgcgttatttgtctatcagcagcggctgatggccgatcgcgaacgcgatccgtgttttcaggcctttatgaataataactatgtcgggtttattctgtttctcggtatgctggtcagttatctgtaagtacggatacacgtaataaatccggaacaagatacctaaaaaatccgtgcaacatgaagcaaatataataaataacccaatacagcaactgatcctgtgccggagagcagcaggagcagaaaacaaagatcacttttattcgtcctgtattggatagcagctacacaaagcagaatcaacagtaatgcaagcataattacggtaaacagaacggcaatacccattattttttcctcttatctgtatatttaacgccggacttcgctttgttaaccggcaaataaaaaaggagaccggataaccagtctcctttttttgtactcagcgtttaccggtatcagtcagacggattactgtcatcgctttctgccggtacagcttcttccggctccaggctgacactttcgatagtcagacggacttccggtgacatcagctccgccagcacgttatagaactcaccggcgttggcttcaatcacatcatcattgtcattgatatagccttcttcacgcagtgtgccgaccagggtggcaaacacggctttgtcgaagaattccggtgcgttgataccgtgcagaaccgacagacgctgtgccagcatccggctctctttttccagtgccgaacggctgatttccggggtggcattcagcagcgacagggtgatcgcataacgctgtaatgtctcgcggatcccggctgccagcagctgtaacggacggatacgggccggattaatgaccagcatattatcatcacggcggcagattaattgctgacggcacagttcatcaatgatggtatcgaggatcgccggcagctcttcctgactgtaacgcataaacagttcggctttcagcagcggatagatcatcccgacatgttcacgcagtgtatcggtgctgacgcggcggtgatggatcaggatactggtcaccagagacggcagtaccagcatatgcaaaatgttattccggtagtaggtcatcagtaccgcattttcacgcggcagaatgatgatatccccgaggctgtctttctcaacctcgaacttattcatctgcaatgcatgttccagcagctcttccgcactcttcgccggggtggtactgtccggggaatacggtacattgcgcagcagctggagatagcagtcgagctgttcgatcagctgttcgcgggtcagtgcgcgctgacgggaagccagcagagctgtggtacacaggttgatagcattcgcggcagcagcattattgatgctcaccataatgttatcagccagagatgtggcggtcggtgtcagccaggacggacgctgcggttcgaccgggtcgatcgcctcacgccattccggtacctgttttgtcaggtattgtgacagcggaatcggctgcccgaagtttacataaccctggccgaggttacgcagtttgcgcaggccgcgcaccatctgcataaaaccttctttttgcttggtggcaccgcgcagctctttggcgtaagtacctacttccatcacatgctcataaccgatatagaccggcaccagggtgataggccgcgagtcaccgcgcagcatggcctgaagtgtcatcgacaatgtgccggtttttggctccagcagacgcccggtacgggaacggccgccttcgacaaagtactcgatggaataaccacgcgagaacagctcactcaggtattcacggaaaaccgtggagtacagtttgttgcctttgaagctgcggcggataaagaaagcgccgaggcggcggaaaatcggtcctgccggccagaaattgaggttaatcccggcggcgatatgcggcggcaccaggccctgatgatagagcacataggaaagcagcaggtagtccatgtggctgcggtggcagggcacatacactatctcatggccgtcctgtgccagctggcgcacccgctccgcattatggacattcagcccctgatagaggcggttccaggtccagccgaggacgcgatcagccacgcgcagggcgtcataggtgaagttagcggccacttcgttcatcatggaaacggcattctgacgtgctttttcaatggtgatttttttggctttcgcttcatcttcaacggctttttcaatcgctttggatttcagcagcttattgaacagctcctgacgcaccggcagtttcgggccgatagcggccatacgctggcgcgagaagtgaatacgggcgacacgggccagtttattagcgataatagtgtcagtaccgtgttcagaggccattgcgcccatggacaccggctgtgagaagcggacaaaactgtcgcgtcccagccagagaacggcaaaaaatttctggatcccgtttaacagacgcagatgcggcacaccgtggtgtccctcgcggcccggtgaacggccaaacatcacagagaccggcagcatctgaatatccagcgccggattattgcggtgcagatccagataggcatggaaaatatggacggaatctttacgcggattcagggcgtaataacggaacacacgcgggccgtcatcaataaagacatagcccggcaatgtggtattaccgatgacattatcttccagcggatccggcatgccctgtgcgagacactgacggcgcagtgtcagcaggtccgccttagagtgataaggaagaacatagagtgtcggacgttgtgtatccagccccagctcattgaccggatccgtcgggatcggcttactttttaccaataattttaatggtaaattcaatacgttatagtatattttacgccaaagtgacataaatgtatgaagcctcttgttgacaattcgcgttcagcataccagaaaggcgaagccagatctgtgttgcggcagcaataaaatcgcggaaaaatagtggcgatcagtcagataatcacattactaacagtgacagaaatgaaaaaaaataccggatttatacgattaattaaagcggcaggttattcaaagaaaggacttatcgcggcatggaaaaatgaagctgctatccgtcaggaattgctgacgctgatcccggccattattattgcctttgctttctcttttaccgctgttgagcgggtgctgctgattggttctgtggtactggtggtggtgattgaacttatcaacagtgcgattgaggctgtggttgaccgtatcgggacggaatatcatgaactgtccggccgggccaaagatatggggtccgccgcagtatttatcgccgcattactggggctgtttgtctggattatgctgtttaccagctggttcctgcgtctctaacagccgattttttgtgaaacctgcggcgtaacacgtattttcctcatgttatggttcccaatcccggaatacctgtatatactcacagtctgactgtataaacaaacagggggcgaaatgaaagcactgacggcacggcagcaacaggtttatgaccttgttcgtgaccatatttcgcagacgggcatgccaccgacgcgtgcagaaattgcggcacgcctgggttttcgctctccgaatgcggcggaagagcacctgaaagccctggcgcgtaaaggcgtcattgagattgtctccggggcgtcccgggggatccgtctgcttctggaagaagaagaggatgaaggtttaccactaatcggccgtgtggccgcaggtgagcctttattagcgcaggaacatatcgaaagccgttatcagattgacccgatgctgtttaaaccaagtgcagatttcctgctgcgggtaaatggtatgtcaatgaaagatatcggtattatggacggtgacttactcgcggtgcataaaacccaggacgtgcataacggccaggtggtggttgcccgtatcgaagatgaagtgacagtcaaacggtttaagaaagtgggcagcaagattgagctgcacgctgaaaacgaagaattcagcccgatcgtggtggatttacgggaacagaactttactgttgaaggtctggcagtgggtgtgatccgtaataacgactggcactgatttccgggacagccgcctgaaacggtatccgcttaaaaaccacagtacgccggagacggacactgtggtttttgtttttcagcgtccgcgtttacgcggttcgttatgttcatggtcatgcaggcatttatctctgcgggtgcaggattcaatatcataacaagggcggcagtatccgtgcgcctcaatcacactgtggcggatatgaaattgcgcggcatccgccaactgagtgatttgtgaatcaatcgcctctccgtcccgctctgtcacactgttacagcgatcgcagataaacagtactgaagtatggctgggtttatcaaaatgcgggcacatcacaaagctgttggtggactcaattttgtggataaatccctgctccagcagaaattccaggccgcggtagattgtcggcggttttgcctgcggctcggtttcgcgcagcagatccagcagctcataagcactgatggctccgggctggccggcaatcagctgcagaatcgactttcgctgagacgtcatgcgcacactgcgtgacagacacagtgcttctgctttttttaataaagtctgaatatcaacagattgcatgacatcaccttccgctaatcaataaatatatgaacagctcactctaacatgaattccggcagaataaccggtatccgcgctattttgtcaaaaaagggctgccaattcagggcaaattatggtgagctgttggtgcaaacacataaaaagcacatgataataaaacggagtcctgaatgagtatcgaaacggttcgtgcctggttcggcacgcatgccccggatgtcacgattattgagaccacacagccgactgccacagtcactcaggcagcagaagttcatggtgtccgcccaggtcaaatctgcaaaacactctcttttaagctgacggatgacagcgcgattctgattgtgatggcaggggacgcccggctggataataaaaaattcaaaacacagttcggctgcaaagccaaaatgctgaatgcagaggaagtagtgcatttcaccggccatccggtcgggggagtctgcccgttcgggctgccggtaccgctgacagtttatgcggatcattcactccgtgagtatgacacggtgttacctgcggcggggtcggcgaattccgctgtccggctgacacctgtgcgcctggcggaactgacaaacgcacagtggctggatgttaccactcagccggtataaacagatggcaccgcatcagcggtgctgtcacacactcagtattccggtggctggatctccggctccgtattcacgccggcgtcggtactgcgggggatgacgttatcatcatccggcaggtgctggcgggtaaagaacagcagactgtcttctataaagtagtaaggggagacgccgaagacctgggagatcctcagaatgatttccagtgaaatttttgtgctgccgatttcgtaacgggagatttgctgttgtgatacaccaatcagattgcccagttctgttgatgtgacaccggtgatcctgcgcattttgcggatttgcccgccgatgagcttgtacatctcgttaatgctggtgttcaggttattatctgttttattactcattatcatctgtcagtctggttaaacaataatatattaatgtttgtcaaattaaacttattcttcatcacaacccatttcatcaaaaaaataactaacactaatattcaggacgtctgcgagcattaacagtttatccagaggaattaagctcgctcccgtttcataacgggataactgctgttgtgagatattaatttttattgatagctctttacctgtcagacagtttttcagtcgctgacattttattttgccgccaataaacattgccaactcatatttatcatatattgtcataaattatgaagataaacggttgtcattaataatgttaaaatttaacttgacgtatttatttcctcaaatagtttctttaaaaagtataatcgatacccttttaatatgtaatagatacaaaaaagcaacaagtgagaaacaataaagactaaaatactacgtattaacactataacctcagcgatttcatgttgttacaaagaatacccggtttttaacatcttacatgaatgatgagtaagcggaatattctgatatttagtcgggattatacctaatataaagatattgatgctgattttgagttcaaaatgggtgatttaactaccttttcatgctttgacggaatgacagacaacccggaagtgtgattgttgtcttacaatatggctgaagatagtttgttaaattttctgagggcattatgagaaaatacaaaggttaaaatatctgaatatttccataaaatacataaaatcaggcgataatatttgtcagtaattgtattgatatgtgttattttatttacttataaaataagtaatgttggcggaaatctattccttcattaaataaaaaaatccaggttgattataatttcactatataatgaaatatacagcattattttttcttttaattcacgggtttagttataggtgatggttgtaaaaaacaacaattacgtgtattttctgctgtcgtcaggtgatgagtgaaatttaacagtatgcggaatttattgcttttattgttagttatcgtgttattgggaccattgggtattgatctttatttaccggctattccggcaattgcaaaaggcctgggcagcagtgagtcattgattcagtcaactatctcgttgtttattcttgtattaggtgcaggtcagctgatttccggtcacctggtggataaattcggccgcagaccgatggcgatggcgggcatggtattgtatatcgccggttccctgactgctgcctttgcggtgactccggggatgtttatcgcttcccggttaattcagggagcgggtgtctgctgtacctcagtggttgcttttacctgtgtccgcgattgctttaacggcaacgaagcagcacgtgctttcggttttttaaacgggacattaaatattgttccggcgctggcgccgctgctgggcggtattatggcggaatattacggctggcggctgccctttggttttctggcgctgtatgcctttattctgctgattctgacggcaaaatatctgccggaaacccggccggaaagcagtgtgcagaataaagagaatccgctgaagagcctcgtttctgtgctgttcagcaagcggtttttgatcttttccctggtgaatgccgggacaatgggaatggtattaacgtatgtttccctggctccggcggtactgatgggcgatgcggcactcagcccgttacagttttcggttgtgttcggcgctaacggattctggattatggggatcagtatgatcgccaaccgggtgatccgcagagccgggcggcctgtttgtctggtttccggcggtgtactgatggcgctggggtgtattgcgctgacactgagcccgctgctgctccctgcacaaatacagaatcactggctgatctatatgctgccggtggctgctgcctgtgccgggctggcctttattatgggaccggcaaccagctatgccctggagccttattctgataacgcaggtgttgcctccgcactggtggggtttatgcagatggcgggcggcgcagtactgacgctggttgctatcgcatcacccttaccgccgaaaactgcactggccgtcactatgctgtgcggcgccctgctggcatggaatgcgtaccgggtgagtaaaaaggaacagcggcaggcgtgatgcagaaagcggagatatcatacctctgtgatatactccgcctttgtttttctttctgactgatgtactgagatcccggatacaccatgcaccaaaacacaccaacagaaaaaaccactgaaaaccagcagttacacgctatcggcggctataagaaccttaaccgtttctccgtggcaccgatgctggactggactgatcgccattgccgctatttccaccgcaaactcagccgccacgcgctgctgtataccgaaatggtgaccaccggggcgattctgttcgggaaaggggactatctggcgtataacgaggcggaacatccggtggcattgcagctcggcggcagtgacccggcggcactggctcagtgtgcgaaaatcgcacaggaacgcggttatgatgaaatcaacctgaatgtcggctgtccgtctgaccgtgtgcagaacggaatgttcggtgcctgtctgatgggtaacgcctcactggtggcggattgtgtggcagcgatgcgggatgtgacagatattcctgttacggtcaaaacccggatcgggattgatgatcaggacagttatgaatttctgtgtgattttgtcggtacggtggcggatcgcggtggttgtgagatgtttattattcatggccgtaaagcctggctctccggcctgagcccgaaagagaaccgggaaatcccgccgctggattacccgcgcgtgtatcagctgaaaaaagatttccctcacctgattatggcgcttaacggcggtattaaaacattggaagaggcgaaaacccatctgcagtatatggacggcgtgatggtcgggcgtgaggcatatcagaacccgtcaatcctggcgcaggttgataatgtgctgtttgatgctgccctgccggtgaccgatacggtcgcggcggtggaagccatgtatccgtatattgaggcggaactggcgacagggacttatctcggccatatcacccgccatatgctggggattttccaggggatcccgggggcgcgtcagtggcggcgtcatctgagtgaaaacgcccataaagccggggccgatctgcgtgtgattgaagcggcactggaatttgttacgcggaaaaatatcgcggaataatcagtcagtcataaaaaagcccgccgtttctcagaaccggcgggcttttttcattctgtgacgattacgggatcagaatgctggatccggtcgttgcacggccttccaggcgtttgtgtgccagagccgcatctttcagcggataaacctgatccgcagggatggaaatagtcagtttaccgctcaggatcagatcaaaaattgccttgctggcttcgttaagctcttcgcggttggtgatgtaaccaaagaccgaagggcgggtcacatacagtgagcctttcttatttaagatcccgaggtccacaccggtgaccgggccggaggcgttgccgtagctgaccatcaggccgcggcgcttcaggcagtccagtgacggcagccaggtatctttgccgacagagtcatacaccacaccgactttttcaccgtcagtgagtgccagcacccgctcaacaatgtcttctttattgtagttgatggtttcccaggcgccggcggctttggctttctgcgccttttcatcagaacccacggtaccgatcatcttcgcgcccagcgctttggcccactggcaggcgatttgtccgacaccaccggcagccgcgtggaacaggaagatttccccggcttttacctcataggttttgcgcagcagataaaacgcggtcagacctttcataaagcaggcggcagccgtttcaaagctgataccgtccggcagaatggcgagcttttcttccggtacgttatggatttcgctgtacgcacccagcggagactggccgtagaccacgcggtcaccgactttaatatgttttacgtttgcaccggttttcaccaccacaccggcggcttcagagccgacaccggaaggggataccggcgcagggtacaggccgctgcggaaataggtatcaatatagttcacaccgattgctttgttttccacctgaacttcacccggtgccggatctgccggcgtaaagtcacgataaaccagcacatcggtgccgccgggtgcatcaaattcaatacgtttagccatggagggaacctcattcggaaaaaaagagtgaccacttacctgcaaacagcgcagaaacagtaagcggagcagttaatcatatgatttattgtatttggcataattgcatgtcactgaaaattactcaagcttcgtgcaatcagcggcaaaggagggctatactacccgctctgtcccgttcagggacgcaggtattctccccggcagacgcactgataagtaagagagtttcatggccagatatcccaaggacaccaagaccgataaaccccgtgaccatcagatggaagggctgaaattaccgccgcattccctggaagccgaacagtccgttctcggcggactgatgctggacaacgagcgttgggataatgtctctgaacgtgtgaccggcgaggactttttcagccgcccgcaccggacgattttcagtcagatgcagcgcctgctcgagcagggacggccgattgacctgatcaccctgtctgaagcgctggaaaccggcggagagctggaaaatgtcggcgggtttgcctatctggccgaactttcgaaaaatacgccaagtgcggcgaacattaacgcttatgctgatatcgtccgcgaacgtgcggtgatccgcgatatgatttctgtcgccaatgagatcgccgatgccggttacgatccgcaggggcgttccagtgaggatctgctcgatctggcggaatcccgcgtgttccagatcgccgaaaaccgtgccaataaagatgaggggccgaaggggatcgaggcgattctggaagaaaccgtcgagaagatcgaaaaactttatgcccagccgcatgacggggtgaccggggtatcgtccgggtatcaggatctggataaaaagactgctggtctgcaaccttctgatttaattattgttgcggcgcgtccgtccatggggaaaaccaccttcgccatgaacctgtgtgaaaatgccgccatgaccgaagaaaaaccggttctgattttcagcctcgagatgcccggcaaccagatcatgatgcgtatgctggcttccctttcccgcgttgaccagacccgtatccgtaccgggcagctcgatgatgaggattgggcacggatctccagcaccatgggtattctgctggaaaagcgcaatatgtatattgatgactcttccggcctgaccccgaccgaagtccgctcccgcgcacggcggattttccgcgagcacggcggcttaagcctgattatgatcgactacctgcaattaatgcgtgtaccgtccctctctgataaccgtaccctggaaatcgctgagatttcccgctccctgaaagcactggccaaagaattacaggtgccggtggtcgcgctgtcccagctgaaccgtagtctggaacaacgtgccgataagcgtccggtaaactccgacctgcgtgaatccggctctatcgagcaggatgccgaccttatcatgtttatctaccgtgacgaggtgtatcacgaaagcagtgacctgaaaggcgtggctgaaattattatcggtaagcagcgtaacggccctatcggaaccgtccgtctgaccttcaacggccagtggtcgcgttttgataactatgcagggccgagttatgacgatgaataaaccgtctgaatataatacggacggaataataaccctgataacaaacaagacatcaacaacccctaaccaaggaacccctatgaaagcggcaacagccgtcattgaccgtggtgcgctgcgccacaactggcagcggatccgggaacttgcaccggacagccgtcatgttgcggtggtcaaagcaaacgcctacggccacggattagtcgaaatcgcccgtgaactcaatgaggcggacgcgtttgcggtggcgcgtctgagcgaagcgcacgcgttgcgcgccggtggtattgttaaacctatcatcttactggaaggttttttcgatgcggcggatttaccggtgattgttgccagtcgtctggaagtggcggttcattttgaagagcagttagtggcgctggagcaggcgcagttatcggatccggtgaaagtctggatgaaaattgataccggtatgcaccgtctcggcgtgcgtccggaagaagcggaagcgttttatcagcggttgtgtaaatgcaaaaacgtacagcagccggtgaatatcatcagccatttcagccgcgctgatgaagatgatgcacagccgacagaagcccaaatcacccgatttatggcatttgctgctgataaaccgggggaaaaatcgatttccgcgtccggcggtattctttactggccgcaggcacacctcgactgggtgcgccccgggatcattctgtacggcgtatcgccgaaaagcggtaccgaagccggtgattacggcctgaaaccggtgatgaccctcaaatcccgcctgattgctgtgcgtaaacataaagccggggaagcggtcggttacggtggaacctgggtcagtgatcgcgatacctgtctgggggtgattgccgtcggttacggtgacggctatccgcgcagtgcgccatccggcacaccggtggtaattaacggacgccgtgttcccattgccgggcgtgtttccatggatatgataactatcgacctgggaccggattgcagtgataaagcgggtgatgaagtcattttatggggggattcactaccggtggagcaaattgcagaagccagtggtatcagtgcctatgaactgatcactaagctgacctcccgcgtggcgatggaatatctggacgaataaaatgtgacgcgatatgttctgatagtgagaaaaattacaatcaggagtatcgcttgtgttcgaacatgtagacgcctacggcggcgacccgatcttaacgctcgttgagcatttcaaacaggatccccggaaggagaaggtcaatctcagcattggcctctattacgacgactccggggtgactccgcaactgaacagcatcgcacaggcgaaacagcgctataacgcgcaggataccggggcctccctgtatctgccgatggaaggtttttccccttaccgcagtgcggtacagacgctgctgctgggcgatgacagcgggcttatccgcgaaggccgcgtggcgatgatccagactctgggcggatccggtgcactgaagatcggcgcggatttcctgcaccgttacttcccgggatcggatgtctggctcagtgatccgacatgggaaaaccatcaggcgatctttgccggtgccggattcaaaactcattattatccgtattttgatccgcagaccaaaggcgtgaagtttgatgagatgctggcaacatttgagacgttaccggcaaaaagcatcattttactgcatccgtgctgccataacccgaccggttccgatctgacaccggagcagtggggcaaagttgtcgcggtggtgaaaaagcgggagctgatcccgttcctggatattgcttatcagggcttcggcggcggtatggaagaggatgcttatgctatccgtgccatggcggcggcagaggtaccgtgtttcgtcagtaactcgttctcaaaaattttctcactgtacggtgagcgagtgggcgggctgtctgttctctgcccgacacagcaggaagcagagcgggtgctgggtcagctgaaagcaggtgtgcgtcgtgtctattccagtgcaccgtcttacggggcaaaactggtctctgaagtgctgaatgatactgcgctgaaagcacagtggctggcggaagtggagaccatgcgcagccggatcgcagagatgcggacagtgctggtggataccctgaaaaacacactgccggagaaaaactttgatcatctgctgcatcagcgcggaatgttcagttacaccgggttcagtccggagcaggttactgcactgcgtgagcagcatgcggtgtatctggtcggttccgggcgtgtctgtatggcgggggtgaaccgtcataatgtggatgcgattgcgcgggcttttgcggcggtcagccgttaatcctcagcaataaaatgatgatgcgcggaataattctgttccgcgcctgtttcagcgtagctgactgtctttactgccgcgccggttatagccgctgaatgcggcctgctttttatccgcttctgcctgacaattcacacacaactgcacaccgggtattgcttcacgccgtgcctgcgggatcgggtcaccgcactcttcacaaaacagcgcgctttcccctgtcgccagctggctgcgcacccgcgcgaccgcatcatccagtgtggcatcaatctgctcctgaacagcagaatcacttgcccatccgcttgccatgtccgcctcctgtttccggtggttgtctgatactttattttatcacggattgcttattatttcaccagcacggaaagcggacgaaaaataccgcagccgaagctgcgggattttcagaggcgggagacgattaatagcctcttttcaggatcggcttcaggaagcgggcggtgtgtgagcgttcacatgcagccacctcttccggggtgccggcgatcaggatttcaccgccgccgctgccgccttctggacctaaatccacaatccagtccgcagttttaatcacatcgaggttatgttcgataaccacaatactgttgccctggtcgcgcaactgatgcagtaccgccagcagttgttcgatatcagcgaagtgcagaccggtggtcggctcatcgaggatatagagtgtctgcccggtgccgcgtttggagagttccttcgccagtttcacccgctgcgcttcaccgccggagagggttgttgccgactgcccgaggcggatgtaagacagtccgacatccatcagggtctgtaatttacgcgccagcgccgggaccacatcgaagaattcgcgggcctcttcaatggtcatatccagcacttcgtggatatttttccctttgtatttcacttccagggtttcgcggttatagcgtttacctttgcactgatcgcacggcacatacacgtccggcaggaagtgcatttccactttcagtacaccgtcaccctgacaggcttcgcagcggccgcctttgacgttaaagctgaaccgtcccggtgtgtaaccgcgcgaacgggattccggtacgccggcgaacagttcgcggacaggcgtaaacacaccggtataggttgccgggtttgaacgcggggtccggccgatcgggctctggtcgatatcgataactttatcgaaatgttccagaccttcgacagacttatacggtgcaggcgtaatggtggtcgcgccgttgagctgtgtctgggcgatcgggaacagcgtgtcattgatcagggtggatttccctgaaccggaaaccccggtgatacaggtaaacaggccgaccggcagattcagtgtcacatttttcaggttgttgccgctggcaccggtgatggtcagcattttggccggatcggccacattgcgtttttccgggatactgatccggcgttcgccgctgaggaatttcccggtcagggaatccggcgtgctgataatatcctccagtgacccctgggcaacaatctccccgccgtgaacacccgcgcccgggccgatatcgataatatgatcggcggcgcggatagcatcctcatcatgctccaccacaatcacggtattaccgagattgcgcagatgaatcagggtttccagcaggcggtcattatcgcgctgatgcagcccgattgacggctcatccagcacatacatcacaccgaccagaccggcaccgatctgactggcaagacggatacgctgagcctcgccgccggacagagtttctgccgagcgggaaagtgtcaggtaattcaggccgacgttaaccaggaatttcaggcgatcctgaatctctttcaggactttttcggcgattttcgcgcgctggccgctgaatttcaggttattaaagaaatccatcgcatgcccgatgctgaaatcagaaatctgcggcagcgtggtgttatcgacaaacacaaagcgggcttcttttttcagacgggtaccgccgcaggaaatacacggacggttgctgatatatttggccagttcctcgcgtacggccatggattccgtttctttataacggcgctccatattgtgcagcacaccttcgaacggatgatgacggactgtcacatcaccccggtcattggaatatttaaactcaatggattcacggcctgaaccgttgaggatcactttctgaattttggccggtaactctgaatacggggattcgatatcaaacttataatgatccgccagggacatcagcatctgataataatagaaattacggcgatcccagccgcggatagccccgccgccgagtgacagattcgggttctgtaccacgcgatccggatcgaaaaactgctgaacacccagaccgtcacaggtcgggcaggcacccgccgggttgttgaaggagaacaggcgcggctccagctcactcatgctgtatccgcagaccgggcaggcaaagttcgctgagaataccagttcttcggcgctgttatcttccatatcggcgataatggcagtcccgccggacagtgtcagtgcagtttcaaaggattctgccaggcgttgcgtcagatcatcccggactttaaaacggtcaaccaccacttcgattgtgtgtttgatctgtaattccagtttcggcggatcagagagatcacaaatctccccgtcgatccgtgcacggatatagccctgtgccgccaggctatcgagcagtttggtgtgttcgcctttgcgctctttgacgaccggcgccagcagcatcaggcgtttgccttccggcagggtcagcacattgtccaccatctggctgactgtctgtgccgtcagcggaatatcgtgatccggacagcgcggctcgcccacacgggcaaacagcagacgcagatagtcatgaatttcagtaattgttcccacggtggaacgcgggttatgggaagtggatttctgctcgatggaaattgccggggaaagcccttcaatatgatccacatccggtttttccatcagcgacaggaactgacgcgcataggcggacagggattccacatagcggcgctgcccctcggcatagagtgtatcaaaggcaagggacgacttcccggagccggataaccccgtgataacaatcagtttatcacgcggaataatgaggttgatattcttcagattgtgggtgcgggcgccccgtatatcgatattatccatgtaccacttcccgggagtttcagatagcgaacaatttattcagcctgatattattgcacataatttactgaatggatatccagtatcagaagaaatctgtgtataatctcagcagcatttgcctgacagctgattgcattttgcgcagcagattttagagaagacacgcaaatctgcaaaggaaatcacggcaaaagattaccgtttcaaaaaagccactcagacgtgttagactagatccttatatgttttaaacaatttcatcgggagcatttcatggccagcagaggcgtcaacaaagtcattcttatcgggaacctgggtcaggatccggaagtgcgttacatgcctaacggcggtgcggttaccaacatcacactggcgacatcagaatcatggcgtgataaacaaaccggcgaaatgaaagagaagaccgaatggcaccgtgtggtgatcttcggcaaactggcagaaattgccggtgaatatctgaaaaaaggttcacaggtttatatcgaaggttcactccagacccgcaaatggcaggatcagagcggccaggagcgttacaccacggaagtcgtggtgaatatcggcggcagcatgcagatgctgggcggccgcagcggcggtggcgacaatatgtcccagggcggcggctggggtcagccacagcagccacaacaatcccagcagttcagcggcggcggcaacccgcgtccggcacagcagccggcagcagcagcgccgcaaagcaatgaaccgccaatggatttcgatgacgatattccgttctgattcagttccgctgaaagtaccctgcatctgcggggtatttttttgcccggattttctgactgcagcccggaacagacaaaaaaataccccttatgtcggtgacagtaaggggtgatgtctcatgccgttggatgaacacatgagattgcccggggttaacaggcagtgtagcttatgtttttataagtcctgtttttgtcctgttcgtctgatttttcatcataacgtgtatttttattataagtgtctgtcgtaatcggatgtatgcttgcgcttattaaagaaaaaacccaatagaatcattgggtatcaataagttatatactcaatttttattaaaatgcgataagaggcttaaagagcatgtgtcggattacgttttatcggtaaacctgaaacgtgacaatcacgatagtaattatatgtgattaaaatcacataaaaatggttgttttggcctgctttgtaatttcaatgtaattttaaagcttatttgtaacaaataaatcacattaaaatgatgttttgtttccggactggccggatgagtaaagccggatttttatcatactgagcaataaaatagataaagaaacgatttttagtgactggcagtgataatgtgaacacacgctgcttccggttatttcactgcaatatattccgctgcaatttcctgaaattgagttttatagctccgcattatgattacctttcccttttttatcgctgttttccttgtgaattagtgctgtttcacactgctgaaataaattggatattttggtatatgtttataaatcaattagttaattgtttttgaattttataccagtgatttatcagtgacgaggatcacaattcagcggctgaataaaaaataaatgaaaaaaggcttgtacagatttcattcttatgtttttttaaagtacgaaccgaatttattcacacacaatttactgttgagagatatcccgtgaaaccattcacccgtccgcaaaacgtactactaacaaccgcgctatcagacgcggttgtcgtcgtgcgtgtggtagtggtggtggtcgtcggcagcgcgccgtaacgggctgggatcagcaacaggatcactaaccccgccggcgtaaaccgagcggggtttttttatgtcaggctccgcgaaactgaaccggttgttaagaaaaggatgatgttatgggagcttcacagcagactcaggcaaaaacccggatgacgggggcggaattaattatccgcatgttagaacagcacgggatcacctctgtgtccggtattccgggcggggcggcactgccgctgtatgatgcactgggcaacagccggatccggcatatcctcgcccgccatgaacagggtgccgggtttatcgcacagggtatcgcccgcaccaccggtaaagcggcggtgtgtatctcctccagcgggccgggcgcgaccaacctgatgaccgccattgcggatgccaaactggattccgttccgctggtctgtatcaccgcccaggtctcctcgccgatgattggtaccgatgccttccaggaagtggacacttacggcatgtctatccctatcaccaaacacaactacctggtgcgcaatgttcaggatctgccgggtattatcgccgatgcattccgtattgcggaatccggccgtccgggaccggtctgggtggatgtgccgaaagatgttcaggcagccatcattgagattgatgaattaccgccaatcatgccgaaagatccgttaccgctgtttgatgcggaaaaagtcactgaagctgccgcgatgattaatcaggcaaaacgcccgattctgtatatcggcggcggtattgtggcttcgcagtccccgcagctggtgcagagcttcgccgagcgcgccgggttgccgaccaccttgacactgatggggttaggcaccatcccgcagcagcatccgctctatctgggaatgctgggcatgcacggcgcgcgttataccaatatgattttgcaggaatcggatttgctgattgtggtcggggcgcgctttgatgaccgcgcgatcggcaaggcggaacagttctgtccggatgccaaaattattcatgtggatatcgaccgtgcggagatcagcaagatcaaacaaccggatatcgcgatcaacgcggatgccgggcaggttctcgccatgctgctgccgcagattgaggtgaatacccgtcaggcgtggaatgatcatatcacgcagatcaaacaagaatttccgctggagcagattaataaatccgatccgttaagtcatttcggactgatcgccgctgtggcggatgcggtggataatgatgcaatcatcaccaccgatgttggtcagcaccagatgtgggtggcgcaggcgtatccgttatgccgtccgcgtcagtggctgacctccggcgggctgggcaccatgggctttggtttgccggcggcgattggtgccgcattggcagagccgtcacgtaagattgtctgctttaccggggacggcagtattatgatgaatatccaggagatggcgaccgccgccgagcataatctggatatcaaaattattctgatgaacaaccaggcgctggggatggttcaccagcagcagacactgatgttcaacgagcatattgtggcatctgcctatccgtatcagactgattttgtgacaattgccaaaggcttcggattacacacctgtgatctgaataaagagagtgatccgcatgccgcattgcaggcggcgattgatcgccccgggccgtgtctgatccacgcattaatcgatgtcagtgaaaaagtgtggccgatggtattgccgggtgatgccaatatcgatatggtcacagcctgatgacggagaacagaatcatggaaaaaaataatcagcctatcgctctggaactggtggtccgcaaccaccccggtgttatgacacacatttgcggtctgtttgcccgccgggcgtttaacgtggacggtattctgtgtctgccgctgccgggacaggatcacagccatatctggctgctggtgaaatcggatgatcgactaagccagatggtcagtcaggtggaaaaactggaagacgtgcaggacgtgaaatacaacgaagacatcagtatctttgagcaactgaataaatatattcagtagaatgataaaaccgggcagataagcccggttttttgtctgcggttacggcgatgtctggccgatatgggagtaggacataatcagcgtgccgctcagctcgccttccatacagatataagagtggggaatatcacaggagaacgcatagaaatcccccggttccagcagcacagtctgatcttcattaaagcgcatcatcagcgtaccctgatggataagaatatgctcatgggtgccggtgctgtgcgcggggctgttaataattgcaccgcggatcatcttcaggtgccagatctccgaaatattccccatgccgacacggaatttaaaatcttccgcatattcccctttaaagactttatttttttcgtaacggggataaccttcattactggcggtaaacagatcccccagcggaaaacgcagtgcgacggcaatggcctccagtgtatcgatacgcggattggaatcaccggattccagtttggacagcgcggctttcgagatgccggagagttttgaaagatcattgagtgacaggttacgcgcctgacgcagcagtttgaccttctggccgatgtgggcactggtttttagcataatgtaattgataccaatgaaatttgcagggaaaccctgttagtattgcacacttgttgtacaacggtaagccgtgattttccggaaaaacaggtctgacaggtgatactatcagatgaaagcatccggcatggtgataattaacatatgtcattaaacgggtgctcaccatgatctataccctgccatgggcagattttttcatctgttttacggttctcttcttcggttacctggtcttcggcatggtcggctttggctctgcgctgatctcaagcccggtactggccttctttattcctgtctcacacattgtgccgatgctggcgctgatggatctgggtgcggcggtgattaacgtcacccgcgacgggcgcaaagctgattttgccgagctgaagtggatggggccgctaatgataggcggcagcctgattggcgcggcgatcctgctgaaaacacatcctgatttgctggcggtgttcctcggtgcttttattgtcctctatgcactctattccctctttattaagaaagcggtgcggcattacccgcagaaatacattattccgttcgggatcggcggcggtattctgagtgcgctgttcggggcgggcgggtttgtttatgccatctattttgccgggcggattgaagataaaaaccgctttcgtattacacagaccaccctgatcggcttcagtacattaacccgcgtgattattttcctgatcatggggatttactggaacagcgaaattgccattaccgcgctgctgtttctgcctgcgatggtggcgggaattgtcctcgggcggcatatcaccatgcgcatcccgaaagaggcatttttccgttttctgaatatggtgattctgctggccgggctgacgttgcttatcagcaacctcgtgcactgaccgccgtcagcgcagcacttttttagcacattgccgggcgcgcagctgttcgtccggggttttgcttttactgaaacagtcgcggtaacgggcggcataggcactgtattgtgcctgtgcctccggcagcggcagggacagccgatgattgataaaggtaaaactgccgatctccgcatgctgataatccaccgggtttttccattccccgccccagcggagaaaaccgtgactgaaaaccagcggcagcacggtttccatttttccgttacgaatattttctctgttggtcagcgctgcagtggattgtggcgggctgatggtcacacggccgtttttgtcgcggaagcggtaagggttctgctgcggattaatgtcgatcgccatgccgtaagcgtgttttgaccaggctttctgactcgcctgacggcggccgttaaatgctgacgtattattggcagccatggaggcctcatcatcgccgccgaaggcctctatcggctgcacactgtgcagcgggaatttctgccggtacaactcatcaaacagtgcttccgtttcaggggcaataatatcggcgacagtaatggtgccggtgcgggtttcgccctcaaaggtgataaagcggacatccacattgaccagccgttcacagggtaccgggttttctgctgtgataatacccagcgctgtcatggcgcggcaggtgtccgggccgagcggggtgatcgccgcctgtgctgccggtaatgcagaacagagcaggctcacagggaggagaaaagcagtcagtttcattatatattccgtcatcaggcaccgggacggatgatgataacccgtcagcggcacagaggtgaaaaaattcccggatttggccttgattatcaggatttttcctaagataatcgtttgcctcaaaaaatcacatcttttctctgtaaaaagccaaacgtttgcgtcatgtgtgtccggtttttccatccggaaaccggcggattttttctgaaaacgcaatcgtttacgtgatgtgacacaaaattcattaacacaggtgatgacatgtctgcgacacagccgcaaagcgggtgcaaattagaccaattttttaaactgactgagcgcggcaccaatgtccgccgtgaagttctggccgggctgaccacattcctggcgatggtgtactccgtgattgttgtgccgggcatgctcggtcaggcgggtttcccgcatacggcggtctttatcgccacctgtctggtggccgggttcggctccctgctgatggggttgtgggcaaatctgccgatggctatcggctgtgcgatttccctgaccgcttttaccgcattcagtatggtacttggtcagaatatcccgattccggtcgtgctgggcgcggtgttcctgatgggggtgctgtttaccctgatctctgtcaccggtatccgcacatggattctgcgcaatattccgatgggtattgcccatggtacggggatcggtatcggcctgttcctgctgctgatcgccgccaccaatattgaccttgtggttaaaaacccgggtgcgggcatgccggtgttactgggggatttcacctctttcccggtgatgattgcactggcgggtctggcggggattttcggtctggaacgcctgaaagtgccgggtgcagtactgctggtgattattgcgatttctgttatcgggctgatttttgacccgaatgtgaaatatcagggcttcttcaaactgccatccctcggtgatgacgggctgtcactcttcttcagcatggatatcatgggtgcactgaagccggtggtcctgccgacggtgctggcgctggttatgacggcggtgtttgatgcgacaggtactatccgcgcggtcgccggtcaggcgaatctgctggataaagataatcagatcattaacggcggtaaagccctgacgacagactccgtcagcagtatcgtggccggtgttgtcggcgcggcacctgcggcgggggatatcgaatctgcggccggggccgctgcgggtggccgtaccggactgaccgcaactgtggtcggggtgctgttcctgctgatcctgttnnnnnnnnnnnnnnnnnnnnnnnnnnnnnnnnnnnnnnnnnnnnnnnnnnnnnnnnnnnnnnnnnnnnnnnnnnnnnnnnnnnnnnnnnnnnnnnnnnnnctctctccgctttcttatctggttccggcgtatgccacggcaccggcactgatgtatgtcggcctgctgatgctgagcaatgtcagcaaactggatttcggagactttgtcggctctatgtccggtctgctgtgtgcggtgtttattgtgctgaccagtaacattgtgaccgggattatgctgggctttgcctcactggttatcggccgtatcgccgggggtgaatggcgtaagctgaatatcggcactgttcttatcgcagctgcactggtggcgttttatgctggcggctgggcaatttaagtgataaatcaccacttaacggatgctggtggtgacgatacgctttatttatacgatttgtctcaaaatactaattaattgcccgaattaatggcctgagaagataaaatagcagtggcggataacgcatccgccgctgctttttttgtatgatagtggcaaccggcggtaattttttctcctccgggggtcttattgcggtttttttgccgttattaacagtatctttttgtcagcgggctgattaagccctaagttcagtaagggtaatatggaaatattctttacgattcttattttgattctggtcgtgtcggtgtccggtgttctcaccaaaatgatcccgtatcgtattccgttacccatcattcagatcgcgatgggggctctgcttgccttcccgcagtttggtctgcatgtcacgttcgaccctgaactgtttctcgtcctgctgataccgccgttgctgtttgttgacggctggaaaaccccgacccgggaatttatgcagaaagggcgggaaatcttcatcctggtgctgttcctggtgctggtcaccgttatcggcatcgggtatctgatctactggctgatgccggggattgagctgatcccggcctttgcccttgcggcggtgctgtctccgacagatgccgtggcgttgtcgtcgattgtcggcaaagggcgcattccgaaacagatgatgggcattctggaaggggaggcgctgatgaatgacgcctccggcctggtcgcgctgaaatttgccgtggcgattgtcatgggcacgatgattttctccgtcaccggtgtcacgctggaattcttcaaagtcgcaatcggcggcctgctggcgggggtggcagttacctggctgtacagtaagtcgctgcgcctgatgagccgctggagcggggatgacccggccacgcaaatcgtctttatgttactgctgccgttcgcctcttatctgattgcggaacacatcggtgtgtccggtatcctggcggccgtggcggcggggatgaccatcagtaaatccggagttatccgcaatgcgccgctggcgatgcgtctgcgggcggataatgtctggggaatgctggaattcgtctttaacggtctggtctttattatgctcggcctgcagttgccgggaatttggcaggtgtcggtgattgaggcggagctggatccgaccgtcgaaacctggatgctgtttaccgccgttatcgttatctattttgctctgctggtgctgcgtttctgctggctgtggatgatgaaaaccgtcagccgcctgaccttaaaacgcaagccgctggatttcaccttctacaccacccgtgaactgtggctggcatcatttgccggggtgcgcggggcgataaccctggcgggtgtgctctctatcccgctgttcctgccggacggcacaccgttcccggcgcgttatcagatggtgtttatcgccgccggggtgattatcttctcgctctttatgggggtggtatcgctgccgttcctgctcaaagggatgcatgtcggggataaacaggcggatgccaatgaaatccgtgcggcgaaagcggcgatggcggaagtggcaattgtcagtatcggcaagatggaagagcgtctgtccgccagttcggacgaggcgctggatgcggaagctatcagtgaagtggcctccagggtggccgggcatctcaggcggcgtactgccggtgatgatgagatggaatataatctccaggtggaagatctggagcgccgtttccgtctgaccgcactgcgtgccgagcgcggggagctgtatcaccagcgcgcgacccgtaatatcagcaatgaaaccctgcagctgctgctgcatgacctggatctgctggaagccctgctggttgagaaagaaacataaccgatgccgttactgattattaccacaattctgtgggccgcatcgttcagcctgattggcgagtatctcgccggtcaggtggacagctggttctctgtgttagtccgtgtgtcgctggcggcactggtttttctgccgtttctgcgctggcgcgggatcgccccgaaagtcattctgatgtatatggcggtgggcgcctgtcagctcggcattatgtatctctttgttttccacgcctacaactacctgacagttgcggaattcctgctgtttaccgtgctgacccccctgtatgtgacactgatttatgacctgctggagcggcgcgggttgcgctggggttatgtgttcagttcactgctggcagtgattggtgcggcggtgatccgctatgaccatctcagtgattctttctggacagggctgattctggtgcagctggcgaatatcttctttgccatcggccaggtcggttacaagcggctgatggaagtgcatccgctggggcagcgcacggcgttttcctggttctacctcggtgcctgtgtggtggcgctggcaggctggctgctgttcggtaatttcgccaagatgccgtccacgcagttacagtggggtgtcctgctgtggctggggataggtgcttccgggatcggctactttttgtggaactacggcgccacacaggtggacgccggaacactcgcgatcatgaacaacatgatggttccggcggggttactggtgaactttgccatctggcagcaacatccaaactggctcacattcagcattggcgcaaccctgattgtggcatccctgtgggtgcaccgggtatggatactgaagccgtctttacaaaaggcagattgtccaccgcgtgctgacgcgtcgcgcgaataaacgactcaacagccggctgacgctgttccccgctgcggtttgcggcatacagccggctccataatccctcgcctaaagtcttggttaccaccatcccctgtctttcaaaattctccactgcccagtgcggcagtgcggcgatccccatgcgggcggccaccatctggatcatcagcagggtgttatccacggtttttatctgcggggaaacaccggctggttgcaggaaacgccgccagatatcaaagcgctgacgctgtaccggataaatcagcagggtttctgcagtcagatcctgcggctgaatatgcagacggcgggccagcggatggtccggtgccaccaccagctttacctcataatcaaacagcggtgtgtatgtcagcttcccgttgtgctgctcatcaatatcggatgtcagcaccacatcgagttcgcgtttcagcagttccggctgcggatcaaaactgaccccggaagtgaaatcgacattaatctgcggccagctttcgcggaaatgcgccagagcgggggtcagccactgaatgcagctgtggcactcaatcgccacgcgcagcgcggtcagtcccggctcattgcattcacggatagcatctttcaccagcggcagtacctgctccgccagctgtaacaacacctgtccctgcggggtgaattgcagcggctgggttttgcggataaaaatccggtagccgagccggtgctccagttcactgaactgatgggaaagggcggattgtgtctgatgcaacgcacctgctgctcccgcgagcgaccctgactgattcagtgcctgaatcgtttttaaatgttttatttctatcatgaggaaccttcaggttagcgatgaagaatttgcgcttgtttcttatacagtacccgttgattatggatgtgtaaacatctggatggctaaatgataggattttttatgacgacacataatcacactctgggttttccgcgcatcggtctgaaaagagaactgaaaaaagcgcttgaaggttactgggcaggacagatttcacaggatgagctgcgcgataccggccgcaaattacgccgccgtcactggcagctgcaaaaagaggccggggttgaattattgccggtcggggatttcgcctggtacgatcatgttctcggcaccagcctgttgtttggtaatgtgccgccgcgtcatgccggtgcagacgggaaaattgacctcgataccctgttccgtattgcccgcggccgtgcgccttccggggaaccggcggctgcggcggaaatgaccaaatggtttaacaccaactatcactacattgtgccggagtttcagcgcgggcaaaccttcaccgtgagctggccgcagctgtttgacgaggtggatgaggcgctggagcagggctttgcggttaaaccggtgctgctcggcccggtgacctatctgtggctcggtaaagtgaaaggggctcagtttgaccgcttatcattactgccgtcactgttggaagcctataaaatcgtactggaaaaactggctcagcgcggtattgagtggatccagattgatgaaccggctctggtgctggatttaccgccggagtggcaggggggttaccgcacggcatatgatgcttnnnnnnnnnnnnnnnnnnnnnnnnnnnnnnnnnnnnnnnnnnnnnnnnnnnnnnnnnnnnnnnnnnnnnnnnnnnnnnnnnnnnnnnnnnnnnnnnnnnnnnnnnnnnnnnnnnnnnnnnnntgcagggacatgcaaaactgctgctgaccacctattttgacggagtaagccatcacttaccgctgatccgtgagttaccggttcaggggctgcacgtcgatttcgtcgcaggcggtgatgatattcaggccatccacgacgcattaccggcggactggctgctctctgccggtctgattaacgggcgcaatgtctggcgtgccgatctgcggcagaaatatgatgtaatcgccccgctggccgggaaacgcgacctgtggatcgggacatcctgctcactgcttcacagcccgattgacctgcgcgatgaaaccaaactggatgaagaagtcaaaagctggtttgccttcgcacagcagaaatgtgaggaactggcattgctgacccgcgcggtcaacagcggctcggcagatgatattgccgcgctggcggaatacagtgctccgattacccgccgccgtgattcttcccgtgttcacaatgctgcggtggctgcccggctggcggcggtaaccgcccgcgacagcgaacgtgccgcaccgtatgccgaacgtgcagaggaacagcgccgccgttttaacctgccgctgtggccgaccaccacaatcggatctttcccgcaaaccacggaaatccgcgggctgcgtctgaacttcaaaaaagggaatatcgataaagcgttctaccgcactaatatctcggaacatattaagcaggcgattaatgagcaggagcggctcggactggatgtgctggttcacggtgaagcggaacgtaatgacatggtggagtatttcggcgagcatctcgacggctatgtctttacgcagaacggctgggtgcagagctacggctcgcgctgtgtgaaaccaccggtgattatcggtgatatcagccgtccggaaccgatcaccgttgactgggcgacctacgcgcaatccctcaccagcaagccggtgaaaggcatgctgaccgggccggtgaccattctctgctggtcattcccgcgtgaggatgtcagccgtgaaactatcgccaaacagattgctctggcactgcgtgatgaagtggacgatttgcagaaagccgggataggtattatccagatcgatgaaccggcactgcgcgaagggctgccgctgcgccgggcagaatgggcggagtatctcacctgggcggtggatgccttccggctgaatgcggcggtagcggagaatgacacccagatccacacccatatgtgttactgcgaattcaatgacatcatggattctattgcggcgctggatgcggatgtgatcaccattgaaacatcacgctcggatatggaattgctggaagcatttgaagatttcgattatccgaatgaaatcgggccgggtgtttatgatattcactcgccgaatgtgccggaagtggagtggattgaagcccttctgcgcaaagcggcggataagattgccgtggagcgcctgtgggttaacccggactgcggcctgaaaacgcgcggctgggatgaaacccgcaaagccctggcgaacatggtggaagcggcgcgccgtctgcgggaaaatccgctgacttcccgctgagtttatttatatataaagaagaaaaaagccggtcagtaatgaccggctttgtgttatgtgctgtcagctgaccggacggaaatccggcccgctgaagcagcgtgttggccggccgcgctcgatctggtgatgtgaccggtggcgctcgctgttcagtgatgcggactgctgttgctgatattggctcagatgccattcaatcaggcggcaggccagttttttgttggcatgctggctgcgttcagactgcactttgactgaaataccggtggcaatgtgcgtggcacggacagcggattctgtcttattcacatgctggccgcccggcccctgtgatttcagacgttcaaagacaatctcactgtctgatactgcctgcggcgcagtaaaacggcggatgccgataaaccagtttttacgccggtgtttcgggcggagcgggctggcacactgccactgcaatgtcccgcaccagcgatccgccagagcagccgcatactctccgtccagtgacagcagggcggaatgcaggccgtgctgtgacggcatttcctccgcaatggtcacggtgaccgacgactgtgcagcctcctgtaaaaagagacgcagcgcgtgcttcaccgccagacagcactcctccgggccgtgagcggcagaaaactgtaataacatcagcagcactccccgctcgttttgtaggtcagcagcggtttcagccgcgccaccacggtaatcagcccggcacctgacaggctttcaatcactgtctcaatggatttataggactgcggtgcttcctcataaatcagctgcttattggcgcagataacccggctgccgagatcggtacgggataactgcgccggggtatagcggtgagaaaggcgtcctttgcactcggtgcgcatccatttacgtcccgcgccgtgcgcgagagagtaaaggctgtcagcggttgcatgcggtttcaccagataactgtaatcaccgcgtgagccggggatcaccacataatcatgatccaccggggttgcccctttccggtgcagccagccgttacggccgttcaccgtgcaggcttccaccaggttgtgattgatatcgagtaccgcctcaccgttggtacgcagttgctgcatcatccgcagtgcaatcagcgcccggttgtgctgtgcaaaatccagcgcctgctgatgtgctgccagatattccgccgcttccggcgtgttctctgtcagcccgtcgtggctgaactgctcaacatgatgacgcagaaccatctgccccagcccgcgtgaaccgctgtgaaccagcagcaccatacgctgtttatccagtccggacgcggcaaacagcccgtcatcacagaccttatcgatttgctgaaactcagcaaaatgatttccgccgccgacagaagacagagaagcggcaaacggatgcgatgcgaagtgatcgctcacatgctctgccagccagtctgcgttcgcatggtcatgcatgctgcgcagttgcttctcagctttgtccgcgttgagtttgctgattttcagctctgtctgatacagcgccataccgcagccgatatcgttaccgaccagcgcgggataaaaacggccttcagagaaaaatgccgcacccaccggatagcctctgccgggatgcagatccggcataccggcaacagccgtcatacccggtaattgtgcggtggtgatcagttgttggatcgcgttactttcgatccacgtcgcatccgaggcgatataagagacgcccggcgcgacaaaatgcatataattgcccataatccattccggaaaatagtgaaaattcgggtttatggcgggcagtcaggaagaaacagagaggtaacagggacgggtaatacggagaaataacgctgtaataccggtgtgataatcagttctgcaagagcccgcaaagagtgcacagtaatgttgtcatatgaacctccttacgttctgaaagtgattgtcagcacgcatcgcgtgccggaatggtgcggatagtagagtgaggtggataaaaaatcaacctgtgttttgttttttcagagagcagtccggtgacattttcagcataaatcgctgtttatgtgatttgaatctcatttttatgtaattgattcatcgtcacgtatcaatgaagtgataataatcactaaattttgtgtggtgacacgctacagtgtcctcaataatcattttttcgctaaggagttcaggatggctgatgtatttcatttaggtttgactaaagcagatttacagggtgcgacgctggctatcgtaccgggcgatccgaaccgggtcgaaaaaattgcccgcctgatggataatcctgttcatctcgcgtctctgcgtgaattcacctcatggcgcggcgaactggacggcaaagcggtcatcgtctgctcaaccggtatcggcggcccgtccacctctatcgcggtgggagaactggcccaactggggatccgcacattcctgcgtatcggtaccaccggtgcgattcaggaaaacatcaatgtcggtgatgtccttgtgaccacggcggctgtgcgcctggatggtgcaagcctgcattttgcgccgatggaattcccggccgtggctgactttgaatgcaccaccgcgctggtcaatgcagcgaaagcagccaaagcaacagttcatattggtgtgaccgcttcttctgatactttctatccgggccaggagcgttatgataccttcagcggccgtgtgacccgccggttcaaaggatcaatgaaagagtggcaggaaatgggcgtgatgaactttgaaatggaatccgccacactgctgaccatgtgtgccagccaggggctgcgtgccgggatggttgcgggcgttatcgttaaccgcacccagcaggaaattcctgatgaagcgaagatgaagaaaaccgaatccaataccctggatattgtggtggaagccgcccgtcatctcatctgatcgtcactggtttcatgaatcagccgtatcgccgggttttccggtgatgcggcttttttttaatcattcattctgtaaatctgatacagtgatcgtgccgaacatactgataataatgataaagaggtatcaatgaccagacagacattaccgcatccttccgtactgccgctcgacggcgggatcaatttccgtgacctgggaaacaaagtgctgccggacggcagtaaaatcaaacccggcctgctgttccgtgccggggcgctggatcgcctgagcgacaacgacttaactcgcctgacagagcagaatctgtttcagatcctggattaccgcgacagcggcgaaattgctgataaaccggatcgtctgtggaatggcgcgctgtacacgaacgcaccggcaaatccgatgtcaaaggaagtggatgctaaccttgagaaactcggcaatgaagcgctgacggagtttgatccgaaagcctttatgctgcgcctctatgaactgctgccgctgggcaacccggcgtatcatgcactcggtgatatgctgcgcaacccggaaaaaggcggcattgtgcagcactgtgcggtcggtaaagaccggaccggtgtgggttcggcactggtgctgtttgcactcggcgcggataccgatatggtgatggaagattacctgctgaccaatgacactctggcaccttaccgccatgaactgctggcggaacacgcgaaaaccatgccggaagcggtggtggagaaattcgcctatgtttactccgtacagcctgatttcctgaataccgcactgaaaagtattcactctcattatggcagtattgatacctggctggcgaaagatatcgggctgacaacagcagtccgcgacaaaatccgcaaccatttccttgagtaatatcagacagtaagggggattttctggcaccggcagatattatcaccaccgttaccgcatttgtccgagaacatgaaatctgggcattgccgatcgttttcgtgctggcattcggtgaatctctcgcatttctttccctgttgtttccggcaacagtgattctgctcggagtcggggcgctgatcggggagggagggctgaattttctgccggtcttcctggcggcggccaccggtggctttttcggcgactggatctcctattacatcggctactactacaaggataatgtccgccatatgtggccgatttcccgctcgccgcaaactctggtcaggggacatcagttctttgagaaatggggaatatggggtgtctttttcgggcgcttcttcgggccgttccgtgctgtggtaccgctggtggccgggatctgtgcgatgccgcagcgccattttcagctggcgaacatgtcttctgccgtgatctgggcattcggcctgctggcaccgggggcgttcgggctgaaatggatggccgggctgatgggcggatagcgccgcattttcaccggattacattgatttttgcgtgacgcgccgaaaaaaacggcggacagcaaaaagacagtggacatctgtacagtgctattttaccgtaagcggcgtaagtgactcgcggaggagacggccatcgtggatattcagtggctttatggttttatcggcattctgagcggtattctgctgggcggcggtgtggtctggttcagcctgcaacagcggctggcggacaaaaaccggctgttacaggataatattgcgcaacttgccctgctggatgaaacccggcgtcaggctgaatactggcagcaggccagagagcagagtgaacagtcactggaaaatgcccgtcatatcagtgcacagcaggaagcggaaatccgtgagctgaccacccggctggaagaaagccgcctggctgctgaagaaaaacagcggttgctgcttaacagtgagcagcgcctgaatactcagtttgaaaacctggccgcccgtatttttgaacagagtggccgccggacagatgaactcaaccgccagagtctgtccatgctgctgcgcccgttccgtgaacagctggataactttaaccggcaggtgcaggaaagttacagccaggaaagccgcgagcgccacactctgacacatgaaattcagcgcctgcagcagctcaatctgcggatggcgcaggaagcggtcaatctcaccaatgccctgaaaggcgacaataaaatgcagggtaactggggggaaactattcttgcccgtatcctggaagcctccggtctgcgcgagggccatgaatttgccacccaggtcagtctgaaaaatgaacaacaaagccgttatcagcccgatgtggtgatttatctgccgcagaacaagcaggtgattgtggacgccaaagtgtcgctggtggcctatgaacgttatttcaacagcgatactccggatgcccgccaggcggcactgacggaacatatcaactctgtgcgtcagcatatccgcggtctgagccgcaaagaatatcaggatctcagcgggattaactcactggactatgtactgatgtttatcccggttgaaccggcgtttctggcagcagtcgggcaggaaagtgtattactggacgaagccctcagaagcaatatcatgctggtcagcccgtcaacactgctggtggcgctgcggacaatcgccaatctctggcgttatgagcatcagcatgaaaacagtcaggcaattgcacagcgtgccgcccgcctgtatgacaaactccgactgtttaccgaggaaatggacggtatcggccaggcgctggataaagcccagagcacgtaccacggggcgatgaaaaaactgaccaccggccggggaaacctgctgtcacaggcagaaagcttccgggaactgggcgttgaggtaaaacgcccgctggatgaaattctggtgcagaaagcccgcctcagtgaacagcaggacaccgctgcggatgaactgccggaggtggcggctaatttcgcagaacaacacaatgggcatagggttttgcggtaaaggctgatacacttttccgatcactaattcatgcacacaggcaaaacaggcaagaagagaatggaagagcaatcccgggatacaatcgattttggttttcgcactgtaaacagaaacgaaaaagcaggtatggtggcaaacgtctttcattctgttgccgcaaaatacgatctgatgaatgacctgatgtctttcggcatccatcgtgtctggaaacgttttactattgatgccagtggtgtccgccgtggtcagcgggtgctggatcttgccgggggaaccggtgatttcaccgcaaaattctcccgtatggtcggtgaaaacggtcaggtgatcctcgcggatatcaacgattccatgctgaaaatgggccgggaaaagctgcgtaaccacggggttgtcggcaatgtgaattatgttcaggcgaacgccgaagaactgccgttcccggatgactacttcaactgcatcatcatctctttcgggctgcgcaatgtcaccgataaagacaaagcactccgttccatgttccgtgtgttaaaaccgggcggccgcctgctggtgctggaattctccaaaccggtgattgaaccgctgagtaaagtatatgacgcttattccttccacgtgctgccgcgtatcgggcaggcggttgtgaatgatgcggacagctaccgctatcttgccgaatccatccgcatgcatccggatcaggaaaccctgaaaggcatgatggaaaatgccggatttgagcatgtttcctacaccaatatgaccggcggcattgtggcgctgcataaaggattcaaattctgatatggctgatacgtttgcagaaaatatcccgtctcctgtcagtccgcaggcactttatcctgtggttgccggatttctggaaacggtactcaaccggctgttgtacagtgaaaatgtactgaaaccggcccgcgcccgtctgaccggcaaaacactgaccctcaggctgacagagccggatatgcagttcacgctgatcttcagtgaaaaacagctggatgtgatttcccgctgggaagacccggcagactgtgtgctgcaaacccgttttctcactctgctgaaactgaaagacaaacaacagctttcagctctgatccggcagggtgatgtcattattgacggcgatatgcaggtcattcagcacttttcagcactgctggatatggcggaatgggatccggcacattatctggcaccgtataccggtgatattgccgcgcagacactgacacagatcgccgtaaaaggcgggcagtttatccgtcgtgcggtatgccgccagcaggaatatctgaccggcgcactcacccgtgagtgggcgcttgcgccttccgcgctggaagccgctcatttctgtgatgaagtcgcggatactgcgcaaaccgcagatgaacttgaggtgcgcctcgcccgtctggaaaaaaaagcaggaaccgggtatgagaccgagtgaaataaaacgcctctattttatcatccgcactctcctgaattacgggctggatgaactgatccctaaaaaccgtctgagctgggcaatccgtctctggcgtcgttcactgttctggatgccgaacaagcataaagacaaagtgctgggtgagcgtctgcgtctggcgcttcaggaactggggccggtatggataaaattcggtcagatgctctccacccgccgggatctgttcccgccggctattgctgaccagctggcactgttacaggatcgcgtttcatcatttgacggcaatctggcaaaaaaaaccattgaagatgccctggaagggccggtggaaacctggtttgatgattttgatatcacaccgctggcatccgcctcgattgctcaggtgcacactgcggttctgaaagaaaacgggcaggcggtggtactgaaagtgatccgtccggatattttgccggtgatccaggctgatattcatctgatgtaccggctggcgaacatggttcccctgttaccggacggcagacgtctgcggccgaaagaggtcgtccgcgagtatgaaaaaacactgctggatgagctgaatctgcaacgcgaagcggctaatgctattcagctgcggcgtaattttgaaaacagcccgatgctctatgtgccggaggtttatccggatctctgccgtgaaaatgtgttgatcatggagcgtatctacggcgttccggtttctgatattgcggctctgcatgagcagggcacaaacatgaaactgctggccgagcgtggcgtgcaggtcttttttacccaggttttccgtgacagcttcttccatgcggatatgcatccgggcaatatttttgtcagccgcgaacatccggacgatcctcagtatatcggtatcgactgcggtattgtcggttcactgaataaagaagataagcgctatctcgcggaaaactttattgccttctttaaccgtgattaccgcaaagtggctgagctgcatgtggattccggctgggttccgccggataccaatgtggaagattttgaatttgctatccgtacagtatgcgaaccgatttttgaaaaaccgctggcagaaatctctttcggtcatgtgttgctgaacctgtttaataccgctcggcgctttaatatggaagttcagccgcagctggttttattacaaaaaaccctgctgtatgttgaggggctcggacgccagctctatccgcagcttgatctgtggaaaaccgcgaaaccattccttgaatcgtggctgaaaagtcagattggcgtgaaagccgtgatccgcagtatcaaagaaaaagcaccgttctgggcggaaaaactaccggaattaccggaactggtgtatgacagtcttaagcagcagcgccgtcttcagtccggtgttgagcggctggcagagcagatgaaacagcagcaggctgctcagcggaaagctaatttctcgctgggtatcggcgcgacattgtttgtctgtgcgagcttattctatctggccggcgcacctgttgcaccctgggttctgatgttttttggtatgcttacctgggtaacaggatggtggcaatccggtaaaatgaagtaaaggttgagttaaagcaaggtttcaaccgatgttgtgtatttccgtatacggctgtggttgtatataatgaagtaagtaggtccatatcaatttgaggtaaaactaatggccggtattaatatttggcaattgttaattattgctgtgattgttgtactcctgttcggaacaaacaaactccgtaccctgggatctgatttaggtgcatctatcaaaggctttaaaaaagctatcggtgatgaagatcagaacaaagcagacacaacaacagccggaaaagacgcggattttgaacaaaaaaatatcgcagaaaagaaagctgattcagctgagcagccagagaataaaaacaaagagcaggtataacccgtgtttgacatcggttttggtgaactgatcttagtattggttatcggacttgtggttctgggacctgaacgccttccggttgctgtgaaaacagtagccggctggatccgtgtgatgcgttcaatggctgccaatgtgcagaatgaactgacgcaggaactcaagcttcaggagttgcaggataacctgaaaaagatggaagagcaggccggtaaagccatttcacctgaattgaaggcgtcaatggatgatctgaaagaagcagctgatacattacgccgctcttatcaggaaccggtggatacactgaaaaagcagctcgacccggaagcactggctgaccaggaacttgagatcccgtctgcccgtccggcatcagccggctctccggcggcggaaaatccggctccggcagcaccatccccggttgctgcagaagaaatccctgcccggccatcaccggaagtcagtgacacagaacctgtaccgtcaccggtaactgctgctgcgtcagattcacagaaacattaatagattacggtaaaagtacgttatggctgttgaagacacgcaaccgctgatcactcatttaatcgaattacgaaagcgcattctcaacagcctggttgcagtctttgttgtgtttgttgcgctggcgtatttctcaaatgatatctatcagctggtatcctcgccgctggtgagcaaactgccgcagggctcgaacatgattgcaacggatgttgcatcaccgttcctggcgccgattaagctgaccattatggtctccatttttatttcggcaccgtacatcctgtatcaggtctgggcttttattgcaccggcgctgtataagcatgaacgccggttgttaatgccgctgctgtttttcagcaccgtgctgttttatatggggatggcattcgcgtattttgttgtcttcccgctggcgtttggtttctttacctcgacagcaccgcaggatgtggtcattgcgacagatattaataactatctcagctttgtcatggcgctgtttatggcgtttggtatctcctttgaggtgccgattgccattatcctgttgtgctggagtggtgcgacgactgttgcctcactgaagcagaagcggccgtatattctggtcggggcttttgtggtggggatgctgctgacaccaccggatgtattctcgcagacgctgctggctatcccgatgtatttgttgtttgaagtcggtgtgttctttgcccgtttctatgtaccgcgcagtaaagcacaaccgcaggatgaagaagccgaagagtaacgcgatactgcttcaggtaaaaaccgccttaataacagggcggttttttgtatccgggtgacggaaatactcagagtttccggataaagctggtgttatccacttttttggtcagctctttactgatcagcgtcagcagcagcactgagcgggtgtcaccgtccggctcctgataaatcgcttccaggcctttaaacatcccttcagtgatttccacaatatccccgggctgcggaacattctgctctgacatgctgacacattcggcatttttcagctcttcaatcaatgatgcgggaacaacagcaggcagtggtccgaaacggacgaaatgattgacaccgcgcgttgagttaatcgtggttgtatgaattgtctcgggatcaaaagaaataaacaggtaattcgggaacaggggctcattgaccgtcacacgtttgccgcgaaccactttttcaatattcgccatcggtgtcaggcattccacctgctgccgctgcaaatgttccattgcccgcggaagttgtccgcgtttgcagtacaataaataccaatccttcattacgctatccaacacaaacggggcttatataaaccctgataataacaaatttgttttactatgagtgcaacaaatggcgatttaagacaaatgagtgtgaattcagtcccttatttgagttgctttttaccgtagaatgatgtcatttaatgagttataaactaattatcgtatttataatgacagaataataagggcaatgtcgatggacatttttttactcagtaacggcaaactttccggtaacccgcaatggctcagctatgcacaggaccgcatccggacaatgataaaaacccgcgggatccgctctgcagtactgattgcatatgccgttatccgtgcagatcacgaccagcgtgcccgtgaactttccgaagcgctgggcattgatgttacctgtatcgaacattttgattccccggttcaggctgtcgaaaatgcggaatgtattcttgtcagcggcggaaatacctggctgctgaatcagttactgcatgagaatggcctggttgtgccaatccagcgcgcggttcgtgaacgaaatatcccgtatatcggctggggtgccgggggtaacgttgccacgccgagcatccggaccaccaatgatatgccggtgcgtaactgtgtggtgatgccgtctctggggctgttccctgttcagattaaccctcactatattgacgcggtcatcagcggccatatgggtgaaacccgtgatgagcggattgcggaattctgtgccatcaatccggatgagattgttgtggcgctgcgtgaaggcagcggcttccatatcaccggaaatgagctgcattacttcagcggcaaaaatgaaggattcaaactctttcagcacaacaaaacattcccggaacaatttgataccagcgccctggcagaccgggttccgttccgctgctgctgatccctgtacttgtaacagtgggcgggattcctataatggagtcccttccacctgctgacagattaataacataatgaaatatcgggacctgagagattttctcaccattctggaaagtcagggcgagcttaaacggatcaaaactgaagtcgatccttacctcgaaatgacggaaattgctgatcgcacactgcgtgcgggcggccctgcattgctgtttgaaaatccgaaaggttattcaatgccggtgctctgtaatctgttcggcacaaccaaacgggttgcgatgggaatggggcaggaagatgtcaaagcactgcatgatgtcggtaaactgctggctttcctgaaagaaccggatccgccgaaagggttccgtgatcttatcgataagctgccgaagtttaagcaggttctcaatatgccgaccaagcggctgagttccgctccgtgtcagacgcatgttttcaccggcgatgacgtggatctgacaaaaatcccggttatgcattgctggccggatgatgcggcaccgctgattacctggggactgaccgtcacccgggggccgtttaaagatcgccagaatttaggtatttaccgccagcaggtgctggggaaaaataaactgattatgcgctggttatcgcatcgcggcggcgcactcgattttcaggaatggtgtcaggcacatccgggggagcgtttcccggttgcagtggctctgggcgctgatcctgcgacaattctcggtgcggtgacgccggttccggataccttgtccgaatacgcctttgcggggttactgcgcggtaataaatccgaagtggtgaaatgcatttctaatgacctggaagttcctgccggtgctgaaattatccttgaagggtatattgagccgggtgaaaccgcaccggaagggccgtacggggatcataccggttattataatgaagtggatgatttccctgtcttcacggtcacacatattacccagcgtgatgaacctatctatcactcaacctataccggtcgtccgccggatgagccggcaactctgggtgtggcactgaatgaagtgctggtgccgattctgcagaaacagttccctgaaattgtcgatttttatctgccgccggaagggtgttcataccgcctggccgttgtcaccatgaaaaagcagtatgcgggacatgcaaagcgggtcatgatgggagtctggtcgtatttacggcaatttatgtacactaaatttgtcattgtctgcgatgatgatatcaatgcccgtgactggaatgatgtgatctgggcgatcaccacccggatggatccggcccgggacactgtcatgatggagaataccccgattgactatctcgattttgcatctccggtatcggggctggggtcgaagatgggactggatgcaacaaataaatggcccggcgaaacctcgcgcgagtggggcaaaccgattgtgatgaccgatgaagtcagacaacgtgttgacgccatatgggacgaattaaatattctcgataattgagggagcacatggcaacgttaaactgcaaagttacctctgttgaatctataacggatacggtataccgcataaaattattaccggatggtgatttttcattcaaagccgggcaatacctgatggtggtgatggatgaacgggataagcgcccgttctcaatggcatccgcgccgtcatcccggcaggaaattgagctgcatatcggagcatccgaatttaatctttatgcgatggcggtgatggaccggatcctggataaccgccgggtgaccattgatatcccgcacggcaaagcctggttccgggaaaacagtgacgcaccgatgctcctgatcgccggaggaaccggtttttcttacacccgttctgttctgctggcggcactggaagaaaatccgcagcgtgatatcacgttttactggggtgccagagagcatgtttatctctatgacctcggtgaattgcaggctctcgccgaaacacatccgaacctgaaaattatccctgttgttgaacagccggatgatacctggcgcgggcgcaccggtactgtgctcagtgcggttctggatgattttggttcactggccggaaaagatatctatattgccggtcgttttgaaatggccaaaatcgcccgcgaacgtttctgccaggagcgtggtgcagatgccggccgcctgtttggtgatgcattcgagtttatttgaagaaaatcccgccccctgacggcgggagtatgctgataacaggtcagctaaacggttaaagcagtatcagcgacgtattgtgcaatgtgatgaagcagaaaacgtcgctgttatttataacgttctcagtgatcagccgcggacacgttcaatcacggttgctatcccctgaccgaaaccaatacacattgttgccagaccgaactgcgcatcccgctgctccataaccgtcagcagtgaattgataatccgggtgccggaacagccgagcggatgcccgagtgcaatcgcgccgccatgcagatttactttgtcatcataacagtcagataatcccatacctttcaggcaggcaagtgcctgtgccgcaaatgcttcgttcagttcgataacatcaatatctgccagcgtcagcccggcctttttcagaactgcctgtgttgcctgtaccggtccgtatcccatcagtgccggttcacagccggtaacactcatcgccagaatcaccgcccgcggagataaaccatgctcacgggcatagtgctccccggacagcagagttactgatgcaccatctgagattgctgaggaattaccggcggtgactgtaccgctgaccggatcaaataccggacgcaatgccgcaagttcagcaagactgccgttatcgcgtacggtttcatcccgggtggcaatgacaggtactccggcctggttatgtccctgaaccggatggatttcacggctgaatctgttatcacggaatgcctgtgcggcccgctgatgtgaacgcagagcaaattcatcctgtgactcacggctgacagaaaactgccgcgccagtgcttcggctgtcagccccatcatgccggacgctttggccgtgtgcagtgcggcagccggattgatatcgataccctgtatcatcgggatatgacccatatgttcaacgccccctgcaagtgccagtttaccgtcaccggtctgaatcaggcgggcggcatcatgcagggcctgcattgatgaaccgcacaggcggttcacagtgacggcaggcacagtgtgcgggatctctgtcagcagggcggcatgacgggctatattaaatccctgttcgccggtctgctgcacacatccccagataatgtcatcaatatcgccagcgttgatattattacgttttaccactgcactcattacttctgctgagagtgtatccgcacggacatgccggaatataccgttttttgagcggcccattgaggtgcggagaccatcaattatcatgactttttccatataaacctcactgtgcagtaacagggtgactatccggttgcggataataaggagtgttattaacagcatgtgcccgcagactgtccggaatggtataaagcggacccagtgtgctgtattgctctgctttttcacagaaagcgcgggtgccggtatcatccagataacggaaaacaccgccccggaacggcggaaaaccaaggccgtagaccagagccaggtctgcttctgccgggctgctgataatgccttcctcgtagcagcggatgacttcgttcaccatcggaattatcaggcggtcgataatctcgtctgcagtaaagtcacggggcgtgcgtcccagtggtgcaagcacttcttcgagctgctcatcgggctgtttctgcaggcggcctttgccgtcatcagtatggcggtaaaacccgaggcggcttttttgccccagccgtttcagcccggcaaacagactgatgacattgtgctcttcaacgaccatccgccccggatagccctcagccatcacatgctgtacatgattagccgtatccagtccgacaacatcgagcaacagcgccggtcccatcggccagccgaattcctgttccatcacacggtcaaccgttttaatatccgctccgccggagaccagcagagaaaaggcgttcagatacggaaacagtacccggttgataaagaatccgggacaatctcccaccacaaccggtgtttttcccattttgtgggcgtagtgcaccacagcggcgattgtatcgtctgaggttttctctccccggatcacttcaaccagcggcattttaggtacgggattgaaaaaatgcattccgcagaaattgtgcgggcgtttcagcgcctgagccagttcactgacagggatcgaagaggtgtttgatgtcagaatgcagtgttcactgacctgttgttcaatatctgccagcactttttgtttgatggctttgttctcaacaaccgcttcaaccacaatatcgcagtcactgagttcattatcatggcggacagggtggatagcggcgcgtattccggcggcctgaaccacggtcatttttcctgactgacactgtttttccagcaattttactgcttcatcaataccggcctgtaatgcggcgggctgaatatctttcagatgtaccggaataccgctgtaagctgactggtaagcaataccgccccccataatgcctgcgccgataacagcggcctgttccggtgcatcacgtaaggctgtctgctggcgggtgaggcctttaacatattgttcattcaggaaaagtgagaccagagccccggcggtgagtgtccgggtcagtggtacaaaatgcgcggtttcgcagcgcaatgcttcatcgcgcgggagtttcgctccggcttcaattccgtttactgccgccatcggtgccgggtaatgttttcctgccttttgccggacaagggctttggcggtgataaggctcatctgtaattctgcagggtgcagctgtaacgccgcttttttctgctgccgtcgtgcctgccagttaatccggccactgatcgcctgctccagcagcatcagtgaaccgttaatcagttcatcatcctgcacaataccgtcagccagaccgagtttcagtgcttcaccggcagtcacgatttttccctgtgtgatcagttcaagggcattgtcgcagccaatcaggcggggcagacggactgagccgccaaagcccggcatgatgccgagtttggtttccggcaggccgatacgcagatcgtcagtggagaggcggtagtctgttgtcagtgcgcactcgcacccaccgccgagtgtgaatttccgcagtgcggcgacagtaggcacgggcagatcttcaatccggttaaacaaccggttggcgaaattcagccattcagtcagctgttccgccggtgcattaaacagcgtcagaaattctgtaatatctgcccccaggataaagctctctttggcggaggtaataatcaggcctttcaactgcggtgtttgttcaaggcaggcaacggcttcatccagtgaggcaattgtccgggtatccagtttgtttatcgctccctgcgcatcaaaaacaagttttgcaattccttctttttcccagctgaccttaattgattcactgtgataaagcatacggttctccttaaatattgcatcgctccggtaaaggatgagaacaccatgtggtatgaccagatgaggtaattgtgatttttttgttaacgaaagcaaatgaaatgatgattttttgcgctgaagatcacgcaaaatgtctcaatatgcagaaacagaaaagaaaaacgtcgtgacgcgccgaagattcccggtaaataaccggggatgacatagcctgccatatccataatcgcggagatcatgctaagcttttgtcactatcataatgaaaaaaggtcaattcccatggaaaaaatggcatccctctaccgtgagcacatcgcaacattattacaacggacccgcgatattcttgcgcgcgagaaactggattcgttactgatccactccggtgaaccgatacgcatttttctcgatgatcgtgactatccctttaaaagtaacgtgcattttaaagcatgggtgccggtaactgatgtaccgcattgctggctgtggactgatggcgtgaacaaaccaaaattatggttctattccccggttgattactggcacagtgttgaggcgttaccttcttcttactggacaaacgatgttgaggttatccatctgaagaatgccggtgatattgcttccatgctggcatcacaggataaaacccgcactgcgtatatcgggccgaataccgatcgcgccgcagcgctggggatcagcagcaatcatattaacccgaaagcggtgctggatttctttgcgtttcatcgttcatataaaacagattatgaactggcctgcatgcgtgaagcacaaaaaatggcggttaacgggcatcttgccgcacatgaggcttttttatccggcctgagtgaatttgatatcaatatggcgtacctgatggcaaccggccatcgtgatacagatgtgccgtatgacaatatcgttgctattaatgaaaacgctgctgttctgcactacaccaaactgaataaaaacgcaccgcatacacggcacagcttcctgattgacgccggtgcggagttcaacggttatgccgcagatttaacccggacgtatgctgctgatgctgacagcgatttcgcacagctggtatcggatctgaatgatgagcagcagtcactgatcggtgatattaaagccggggtccgctataccgattaccatattcagatgcatcaccgcatcgcgaagctgctgaaaaaacataaaataatcaccggaatgtctgaggaagccatggtcagcgaaggggtaaccacaccgttcctgccacatgggcttggccatccgctgggtcttcaggttcatgatgctgccgggtttatgcagaatgatcagggtgagcatctggcagcaccggaaatgtatccgttcctgcgctgcacccgtattctggagccgcgtatggtgctgaccatcgagccgggactgtattttattgaatctctgctggcaccgtggcgtgaaggtaagttcagtcagcattttgactggaaacgtattgagcagtttaaaccttgtggcggcatccgcattgaagataacattattatccatgacaacagtgtggaaaatatgacgcgggatctgaatctgccgtaatgaaatcgtaccttataccggctgagccggttatgtttactgaagagataaaaaaaagccgtttcatcactctgttgcagcatacggacggggtggatgaagcaaagcaatttattcagtctgtcaaagatgaatatcccgatgcccggcaccattgctgggcatttgttgcggggcgtccggatgactctcagcaactgggattttctgatgacggtgagccgaccggaacagccggtaaaccgatgattgcaccgctgctcggcagcggaatcggggaaattacggcggtggttgtccgctatttcggcggaataaaattaggcaccggcgggctggtccgtgcatacggcagcggggttcagcaggcactgaaactgctggtaacgaaaactaaaatcccgcaggtgatctgtgaaataacctgtgattacagttttatcagccaggcagaattagtggtccggcaggtggatggtacgataatcaacagtgatttcggtgcggatgtgacgttacgtatttcgattcctgctaccttactgagtgaggttagtgataaattacgtgacctgagccgggggatgtttgagcttaaatgctctgatgacaccaccggaaactgatttctgaggactctgctgcaatgcattttcgcgccataacccgtattgtcgggttacttgtcattattttttctgtcaccatgatcattcccgggattgtggcgcttatctataaagacggtgcaggtaaagcattcagtcagacattcctggcagcattgattataggcctgctgctctggataccgaaccgcaataaaaaaagtgagttaaaaccgaaagaaggttttctgattgtggtgctgttctggacagtactgggcagtgtcggggcattaccttttattttttctgagcgcccgaacctgtcggtgacagatgcattttttgaatcattctccgggctaaccacaacgggtgccaccacactggtcgggctggatacgctgcccaaagcgattttattctaccggcagatgttacaatggctgggcgggatggggatcatcgtattagccgtcgctatcctgccgctgctgggtgtcgggggaatgcagctgtaccgggcggaaatgccggggccgctgaaagataacaaaatgcgcccgaggattgcggaaacagcaaaaaccctctggctgatttatgtgttcctcaccatcgtctgcgcaattgccctctggtttgcggggatggatgtttttgatgcgatatcccacagcttttccactatcgccatcggcgggttttccactcatgatgccagtatcggttactttaacagtccggcaattaacaccatcattgccattttcctgctgatctcaggctgtaactatggcctgcactttgcagtactgaccggacgcagcctgggtgtctactggcgtgatctggaattcaggatgtttatttccctccagcttgtgctggtcgtgatctgtgcgttggttttgtggaagtttgatgtctatgctacggagggacaaaccctcaaccaggcatttttccaggttgtctcgatggcgacaactgcggggttctccactgacagtttctataaatggccgctgttcctgccgatgctgctgttgtgtgcggcatttgtcggcggatgtgcggggtcaaccggtggtggtctgaaggttatccgcattatgctgctgttccttcagggggcgcgtgaactgaaacgccttgtgcatccgaatgcggtttacactatcaaactgggccgcagggcattgccggaacgcattatcgaagctgtctggggattcttctccgcctatgcactggtctttgttgtcagtatgctgttactgatagcgacaggtgttgatgagttttccgctttctctgcgatagccaccacactgaataacctgggaccgggactgggaacactgggtgagaactttacaaccctgaatcccggcgggaaatggatccttgttgtgacgatgttatttggtcgtctggaagtctttactttgctggtattgctgacgccgacgttctggcgtgattaacggagtgtttcatgtcgtacttgttgctttattccggccatgacgggcagacaaaaaaaatcattactgaaattgccctgcatttgcgcaaagcaggggcagagtgcgatgtccgctctttgcaggataatcagccgctgaatctggcgccgtatgagaaggtgctggtcggggcatctatccgctacggtcactttaaccgggcgctggataaattcgcgaagttgcacgcggtgcagctgaatcagatgaaaaccgcattctttggtgtgaacctgactgcccgtaaaccggaaaaacggacaccggagacaaatgtgtatgtccggaaattcctggccgcaaccccctggaagccgacagcctgtactgtattcgccggggcattgctgtatccgcgttacggctggtttgaccggatgatgatccgtctgattatgaagatgacaaagggtgagacagataccaccaaagaagtggaatacacggattggcaacaggtcgaagcctttgctgctgagtttgttcagatttaaagcaaatcaccggcattttgccggataaaacaccgttgtggtgaaaaaagtggcgaacagaaaaaaagttgaaataaa

SEQ ID NO: 34 - DNA, 39471 bp, unknown
  Altogen 322075 strain
  misc_feature (33577)..(33588): n is a, c, g, or t
  misc_feature (39443)..(39443): n is a, c, g, or t
tctgatcgataaagagatgcgcgtggcaatgacgctgaccggcgcaaaaaccatccgcgatatcacccgcgactcgctggttaatctgccgggctgatccgttttttatctttattctgaagccactccccggagtggcttttttgttttatgtggttttcctgtgtgattggtacgattaattatgatcaaactcacacaaaacaacataaagcaaaataattagctaataattaaacagcattaaataagacaaaatcccgacatcaccagtcaataacactgcaaaaatcatatccacacactattttacccgaaacgaatcaattcagtgattatttcataaacaatacgccctattttgatgtgttgatttacgttgttataccaagcaatatcaacaaaaaacaacaataagtcgttacttaccctgaaccccctgaggtccgattatgaaaaaaattgtcatactgggcagtagtggcgggaacctgtacaacctcggtggtgcagatcctgaaaaacttctgagcgaaatctacacacaatgtcagtccgccggtgtttctgttgctgcggtgcagtttattgcagcacaggcgtcgatggatgttgccaaaccctctaccgccgccgcggtctacaccctgacagaagcagatgccgtgcctgcggtgacgttctccggcaccctcgcagaggttaatgacgccgtgcgcggcagtgatgaacagattgcccggctgatagaacagggcgatatcgacggcatcattattatgagcggcgatccgcacaacgccaaccgcctggcacttcaggccgcagcggaaaagaaagtgccgatcgccggtaccggcggcacctcgatggcccatatcgccgccgccggtgccaatgtgattgccacctcgggtaccaccggcaccaccagcaggacccgggctatctcgtttatctcctccctgtgcaaacactggggtattaaattccgtccggttctgggcagtacaggcagcaccggcgggccatccgataagagtctgcttaagcggatgaatatccgcggcattatgatccccgcgctgcccggctttattgccatggcgattgtgctggcgctgagccacatcccgggactggaaagcctggatgcgattttccagctgctgctcaaagggctgccggtgattgtggcggtgattgccgccaaacaggtctccgaactggatgaggtttcgattgtttccggggtcgtcgccggggtgctctcggtcgagggtggtctgatcggcgggatcgcaggcgggatcatggcgggtatttttgtccgttacctgtttgccctgtgcatcagctggaagttcccgatgaccaccgtcaacatcgtggcaggcggggtttccggtctggccgccggtcttatcatgttctacttcctcagcccgctggcactgctggccggtaactacatcaaactggcgctggaaagcaccctcgccttcagcccggttctggcgggactgctggccggtctggttatctggcctgcgatcctcggtggtgtgtatcacgcggtgatcctgccgctggtgctgctcgagatggaaaaaaccggtgtcagcttcctcggcgcggtggatatggtcgggctggtgatggtggccgccggtattaacctggcaaacgtcattgccccgcgtgaacgcagtgaggctgcggttgccgccccgggactgcttatcaatctgggattcggtacctttgtggaatcagcatatcccttcatgtttgccaacaaaatcgtgttcggcggtgccattctttccgccgggatcggcggcatgatgctcggcatgtttaatgtcaaaggggtggcgtatgtcccggcgtttgcctctccgttcttatccagtaacgcactttacatggcgctgaccatgaccgtgattctggttttaacctgcgccataactgtcatcgccaaccgtttcagtgccgtgacaaccgtgaaagccgcaggctgatgcaaagacaacacagcaaagaataagtgtgaaaaatatcacacgccaacaccaggactttataaaaacggcacctccgggtgccgtcatacaaaaacacaaaaaaagtaataagaggttgatatgtttataggtgatatgaataaaaaacgtgaacaggccatggcgaaagtcagaaatgctattgcgctgcacaacgggcagactctgctcagcacaggtatcaccggtgatgacgcgcgactggcgaaagcagtgtgtgatgccggggtcaaaatgctggagccgaaccatccggcactggcgctggctcgcggacacagaggcgtgaataacatgcacgccgccgagcagatccgccatgagatctccaccgcgcagatggcggaagccgtcaacggtatccgcaatgtgatcccggatgatgtctttattacggtcgggatcgccggcggattcaccgaaaccatcccggttccggtgacagaagaggatattttacagatcgcccgtgccggagctgacggcctgcacacccataaatccacttttgaggatctggcggatattgtcagtcttgcgcaccgcttcggcctgaccgtggatgcctacatcggccacccggacgatctgcacacctttggcatcccggcggaaaccccggaagaagtcgcggaagtggcaaagaaaatggaagccatcggcgtggatatgatcggcctgatgaccggtatgagctacgagggcgtggctgccggtgaaattccggagcagattaaagcccggctgaaagcgctggtcggcgcggtcagtgtcccgacactggcggaaggcggtattaacgtcgccaatgccaaagcgtttaaagaaaccggggtgaatattttagtggtcggcaccgcaattgataacgtggtatgtcaggcggccgcacaggtcacccaatcctttattcatcacaactgaccggtatttccaatgcgggggcaccgctcccgctgaggctttttatgaccacactggctatcgatctcgacggtacacttttacatccggataaccgtatttcagagggcaaccgcctggcactgctggcgctgccgccggaaacggatattgtgatctgctctgcccgcccgctgcgggcgattttgtctctgatgaacggcgccgggctgcttccggtgatccgcgctatcggcgcctgtaacggtgcggtgatttatgactgctgcacacagtccgttctcagccgggcaaccctctctccggccatgttatccgcgctgcaaaacctgctcaccaccggctggcatgctttcggtgaggatgctctgctctgtccgccgggagaaatatcagaatacaccattcatgaagctgaattattcggcctgacaatacaaacgcttgcgacagacgatattttcagccggacagatatcattaaaatcaccctgtgcggggaagcggaagccctgcggcaacgggctgaaatccttcgtccgcagttaccggcaaaggtcagcgcattctttaccgatcagcactattttgaactggttcccgcatccgtgagcaaaggaagtaccctgcaaatactgacggagcgcggtattctgcggccgggaaccatcatagccatcggggatcaggaaaacgatctctctttatttgccgcagcggatctgcgcgtggcaatgggcaatgccgtaccggcactgaagcaggccgccgggtatattacggctgattgccgggaggatggtgttgccgccgcacttcatcattacagagcggcattccgcaacgacgcataatgcgctaatattgttcatgtttacgagtgtgatgagaacggtcatgaatccgataaaaagaaaggaatacattctcgatctgctgaatcagcagggggaagtcagtgtgcaggatcttgcagatacactgaatgtcacctctgagacgatccgccgtgatctctccattctggagaaagaaggcgagatcatcaaaattcacggcagggcgatgaagaaaaagagtgtcagcgaaggcagctttgaacagcggctggaactgaaccgcgaggaaaaaatgaccctcgcgcgctatgctgccgggctgatttccgagcacgacacactgtatatcgattcctgttcgacaacgctgctgttttccgcgcagttaccggcgattgcgtttaccgttttcaccaactctgcccttattgcggataaaattgcctcacagaacccgctggcaaaagtgtatgtgctgggcggtgaatacagccatgaattccgggccaatctcggcgcgaaaaccctgcatgaaattgatcatatttatgcggacttcgcctttgtcggcgcaggcggtgtgcgcgatgaaggtattctcgtcaaaagcgttgaagaaggcatgattgcgcggaaaatgctggaaaaaagtaagcagaaaattattctggccgactccagcaaattcggccagcaggggattttaaagatcgcggagattgccgttatcgataaaattatctgtgacgataaatggcagaaagcgcacgaattccgtgaaaaatatccggaaaaagtcgttatcgtgccgtaagggaaaaaaccttacggctgtgacggctcgctgtgatggccggtcatccgcccgtccttcatcaccacattgaggctgccgttataaaattccgccaggaaaacggtctcagggtcgtcaattccctgctgtttcaggcgctctgccagccactcctcatcatgaccaatctgctccagctcatgtttgcgcggcacaccgtctttcatcacaatgactgacggcatctgtgactggtcacaaatcaccgtcagctggccgtccggctctatctgcgcataatacacatcgcggtatgaatagatcccctgcgcatgcatgcgggaggtaatattcagaatatcaattttattgcgcttctcatgaatactgtccatgataaacgccccgtttttaataatcgggatcgggttaccgatagtcaccgcgcgcagcacactgatatgtttgctgacccaattgattatgctgataaaacccacgcccatcagcagaataataatatattgcgtcagcggaatagtatcactgtaaataacaccgccgataatgccgcccagtacaaagtttccaataaaatcaaccggtgtcatttgtgataattgggttttcccggagatattcatgtgcgttaacacaataacaaagccgatgataaatttaacgataaccagaagataatatgtcatggtatttccttacactgacaaacgatgctaaccaactgaaataaaacacgttaccatgttacgcttataagattacattctgtattgatattaccggatatttttatgcagcgggatattattttatgatgttactgataaattcccctcagcactatacaagcggcgcttcattttctatgctgaaagagataaccctgacagaaaattatatctgtcagcagactgcctgattttattatataatcaataatcgcggacacgatgttatccggttattttactcagtattgctgaagaggagttaatcatgaaaaaagcattattaagttcactcatccttgcgggggtatttgcgctggccaccgggtgtgacgacagcagcaaaacggatcccgccgcgcagaaagcacaggaaggtgccgcgcagattaaagaagccgcagagcaaaaagcggatgaaataaaacaggatgccaaagaggcggcggataaaacagagcagaaagccgctgaactgaaacagaatgcaactgaagccgccggtgatgccaaagaaaaagccggtgcggtgatggctgacgccaaagagaaagcagccgaaatccgtgacagtgccgatgccaaagcggatgagctgaaaaaagaggcagatgccctgctggctgatgccaaagataaaggcgaagatgccaaaaaagccgcggaagaaaaagccgcagagctgaaacagaaagcggatgaagccaaagccgccgctgataaaaaaattgatgagctgaaacaggatgtcagcggaaaacccgcagatgctcagtaaaccggaacaggtaatatcccgtaccaatccgtaaaacagccgtcagccggaaacaatgagtgtttccggcttttttattgtgttatttcaagcagtttgccggtttccgtaaataaaattcacagataaaaacatctctttttcccgcaaaaataccccgtgacttgccgcagagtgacatttttggcactataatcctctttttttcaccaaccggggggaataaaatctaatatcaccgctttttttccgcaggttcagcctgtattcatctccgttttttctgatctcccgctgacactattttgccggggtttctatttaccgctacgcagccgcgtaccgttttcagaaggaaaatctgacgctttgatgcagttctcccctttttactgccggcgttatctgcaactgataaaaggaataattcatgagtcatcaggacactgaacaatccgcaaaaaaaatgaagattaacccgccggttttttatatttcggccctggttattctcctgattgtcggctttgccgccctgtttccccagacggcggacatacaccttaaagcccttcagaccagcctgtttaaaaatgccagctggttctatatcctcgccgtcgccctgattttactgagcgtcacctttatggggctgtcccgtttcggtgatattaaactcggccctgatcacgcccgtccggcttacagctatatttcctggttcgccatgctgttctccgcagggatggggatcgggctgatgttcttcggcgtcgccgaaccggtgatgcactatctttccccgcctgtcggcacaccggaaacggttgaagcggcaaaagaggccatgcgcctgaccttcttccactgggggttacacgcctgggctatttacgcggttgtggcgctgatccttgcgtttttcagctaccgccacggcctgccgctgacactgcgttccgccctttacccgattatcggtgaccgtatttacggcgcagccggtcacgcggtggatattttcgctgtggtcggtacggtattcggagtcgcgacctctctcggttttggcgtgttacaggtgaatgccgggctgaatcatctgttcggcctgccgcagacagaaaccgtacaggtggtgctgattgtggtgatcacctcactggccaccctgtcagtcgtgtccggtctggataaaggcatccgttttctgtcagagctgaacctcggcctggcggttctgctgctgattatggtcggtgtgttaggcccgactgtgctgctgctgaaatcctttgttgagaacaccggcggttatctttctgaaatcgtcagtaatacctttaatctctttgcctatgagccgaagtcagacgactggctgggcggatggaccctgctttactggggctggtggctgtcgtggtcgccgtttgtcgggatgtttatcgcgcggatttcacgcgggcgcaccatccgtgaatttgttttcggtgtgttgtttgtcccggcgggctttaccctgctgtggatgaccttcttcggtaataccgctattgatctgatcaaaaatcagggtgcaaccgccctcgccgcggtggtgaaagaggatgtgtcactggcactgttccagttcctcgagtatttcccgttctccacggtgctctctttctttgccatgctgatggtgattgttttcttcgtcacctccgctgattccggcgcgatggtcgtggacaccctggcctccggcggcgatacccacacgccggtctggcagcggatcttctgggccggactgatgggcgtggtggcgatcactctgctgctggccgggggattatctgccctgcagaccgtaactatcgccagcgccctgccgtttgcggttgtgctgctgttctcaatttacgggctgatcaaagccctgcggattgatgtgcataaacgcgacagtcagcaactggcgaccattgcaccgaccgccagccgtaacccgatcccgtggcagcgccgtctgcgtaatatcggttatttcccgaaacgttcgctggtcaaacgctttattgatgaagtggtgtcagaagcgatggatatggtatctcaggagctggaaaaacaaagcacacaaagccatatcgaccgcagccgcgacgaccggatcacctttgaggtcgatctgggggatgatatgaactttatctatgaaacccggctgcgctattacaatcagccgtcctttgccctttccgggatgaccgacgaggaaaaagatgaggagcaccgctattaccgcgcggaaatccatctgaaagagggcgggcaggattatgacattatgggctggaacaaggagcagattattcatgacatccttgaccagtacgaaaaacatattcacttcctgcatctgctcggcaagaagtaagtctgtcactgtaaaaatgccgctctctgagcggcattttttattcttcttcgttgtcgcgctgcggcagtgcaaccaggtcatccagcagtgcatagagctggcgtaccttctccggcgtgaactgtaattccagcgcctgatagccggtctccacttccgcctgcacacggtgatacagcgccgttccttcgtcagtcagggagagatagagtttgcgctgatcactgaggggcttgaggcggtgaataatgcccgctttttccatccgcgtcagaataccagtcaggctgggacgcagaatacagcttttctgtgccagaagatgaaaatcgagcgacggggtcttagccagtatgcgaatgatccgccactgctgctccgtcagttggtgtgctttcagggtcgggcgaaagtagccgaggaccacttcacgggcctgcaaaagggcgataagtaatgattcatgcataatgggtaatttctccgcgatgtactcacatcataaacatcgacgttatcaaaaaaaggcgcaattttatcgggaaaatgcgcaatcagacatcctctgttagaataaaaagcatatcagtcataaagacccaaaggactctccttttattaacgctatattaacaataaatcaatggtcttctgctgatatctcagtgccctcatcacttttttgagaaaacgcaacggagctctctatgttcacctcatcgttaaccaatccttccttttccctgctgcgcaccggcggctatatcaatggtcagtggaccgatgcacaggataaggccacgtttgatgtgaccaacccggccaccggcggactgatcacccgcgtcagcgacctcggcgcacacgaagcccggcttgccattaccgccgctgaaaatgccctgccgggctggcgcgccctgaccgccaaagcccgtgcgcagatcctgcgccgctggttttttcttgtcatggagaatcaggaggaactggcacagctcctgagcctggaacagggcaaaccgctggcggaatcacgcggggaaatcgcctacggtgccagctttatcgaatggtttgccgaagaaggcaagcgcgtgtacggcgaaaccattccggccacacagagcggacagcggatcgccactatacgccagccgatcggggtggtcggtgctatcacaccgtggaacttcccgaatgcgatgatcacccgcaaagccgctcccgcactggcggcaggctgtaccatggtactgaaaccggcagcggaaaccccgctttccgctctggcgctggcggcactcgcggaacaggccggtattccggccggagtgttcaatgttgtcaccggccttgatgcggcagctatcggcggcgaactgaccaccagcccggtcgtgcgcaaaatctcctttaccggctccacccgtgtcggcaagctgctgatggcgcagagtgcggagacggttaaaaagctctctctcgaactgggcggtaacgcaccgtttattgtgtttgatgatgccgatctcgatgcggcggttgccggggccatggccgccaaattccgtaacagcgggcaaacctgtgtctgcgccaaccgtctctatgtgcaggacggcgtgtatgatgcctttgctgcgaaactggcggaggctgtcagtgccctgcatgtcgcgccgtacaccgacgaaaaagcacaacaggggccgctgattaatgaggccgctatccgcaaagtcagtgagcatatcgccgatgcggtcagcaaaggtgcgactgttgtcagcggcgggaaaccggcggcacagggcggattattttttgagccgaccgttctgaccggtgttacctcagacatgctggtgacccgcgaggagacgtttggcccgctggcaccgctggtacgtttccgcgatgaggaagaagccatccgcgcggcaaataacagtgagttcggtctcgccgcttatttctattcccgcgatatcggccgggtctaccgcgtggcggaagccctggaagccggaatggtcggtattaatgaagggattatttccactgaagtggcaccgttcggcggtatcaagcaatccggcctcggccgtgaaggctcccgccacggtattgatgactatctggaaatcaaatacctctgcttcggcgggctccgttaatccccgttgatcaccgcctgcggctgtccttccggcagccgcattttctgactctcccttgtatttttccccggctatcattagactgcgtatcattcgcaaataagcaacaattgcgtcacattttttatcccaccgggagttggtatgtctttggataattcacagcgtctgttgttccgcgacgcaatggcgacactctccgctgccgtcaatattgtcaccaccgacggcgacgccgggcgtggcgggctgactgccaccgcagtctgctctgtcacggataccccgccgaccctgctggtgtgcatcaaccgcagcagtgcgctcagtgaggtgttcagagccaacgggcgtttgtgtgtcaatgtgctcacccatgaacatcaggcactggcgtgtgattttgccgggatgaccggcctgagtatggacgcgcgttttgccggtgatcactggcagccgggagcgctgggacaaccttgtctgcacggctcactggcctgtctggaaggcgtggtgactcaggtgcaggaaatcggcacgcacaatatctttatggctgagatccgcaatattgatgtccgcgacgaaggtcacggcctgatttacttccgccgcgatttccgcactgtcgaaaccggtgatatccccgctgctgcagttgcctgatcctctttcattattgtcataatattcgttaacacatcatgtgttaacgaatcattattcatcagaaaaatatctgttacattttgtcatatttaattccgcctccctccggacaacagaataaataaccatcaatctgctcaatacgccatcaacaaaaccattgcggactaattattgatgtcaatctaatgaattttatttcaattatgatattaattattgcagtaagtgtgatctgtctttgagatgctcaggcggcaatatattagtctgagccctttggcaaataccctgacaaatacgcaaacactcaaccttacgcaagagtttatcttttagcttttcctccgcgatgccgggaaggcttttgcgtgatgaataattattaataagaggcattaaaccatgagtaaacccgcgcaggttggtttgtttaaccaacccaagccattcttcatgatttttatcgtggagctgtgggaacgcttcggctattacggtgtgcaaggcatcctggccgtctacttcgttcagaaactgggattcagtcaggaacaggcattcatcaccttcggggcattcgccgcgctggtatacggtctgatctctatcggtggttacgtcggtgaccacgtcctcgggaccaagcggaccatcatcttaggggccatcgtgatggctgtcggttattttatgaccggcctgtctatcatgcacccggatctgatcttctacgcactgggtaccattgctgtcggtaacggcttattcaaagccaacccggccagcctgctggcaaaatgctatccgccgaaagacccgcgtctggacggggcatttaccctgttctatatgtcgatcaacatcggttccctgatttccctgtcactggcaccggttatcgcggacaaatacagctataccgtcacctataatatctgtggtatcggcctgctgatcgccctggcggtcttcctgttctgccagaaaatggtgcgtaatatcggttccgagccggatcacaaaccaatgaaattcggcagcctgctggtcgtcatcgccggtagtgtggcaactgttttcctgtgtgcatggttactgcacaacgtcattattgccaactatgtgttactcggcgtcaccgctgtggttatcttcttcttcttccgcgaagccttcaaactgaaaggcgttgagcggaataagatgtatgtggcgtttgttctgatgctggaagcggttatcttctatgtgctgtatgcccagatgccgacttcactgaacttcttcgctatctataacgtacatcacaccattatgggtattgatgtgcatccggtcagcttccaggcactgaacccgttctggatcatcgtgctgagcccggttctggcttacttctacagcaagatgggcgcacgcggcaaagacttctccatgccgggtaaattcaccatcggtatgttctgctgctccgccggtttcctgacagccgctgcttccggtatgtggtttgccgatgcgtccggtctgacatcaccgtggtttatcgttctggtctacttcttccaggccgtcggtgagctgatgatcagtgcgctgggtctggcgatggtggctgcgttcgttccgcagtacctgatgggctttattctcgggatgtggttcctgactcaggcaatggcaacactgctgggcggctacgttgcgacctttaccgcaccaccaaaaggtgtgaccgatccgcttcagactctcggtatctacactgatgtgtttggtaaaatcggtatcgcaacggcagttgccggcctgattatgtgggctatcgtaccgaaactgaacaaaatcatgaaagaagaaaaaacagcctgattgtgttaaccggtgctgcggcggcagtaccggttttccgtctcgtttgcgtaatgacacgctgttctgcataacccgggctatccgggttttttattatctcccaatcctgcttttctgcccggtttcacattttcccgcacaccatttctcaaatattggtatccctgctatacgttaattaactattaattaacaaatagtcaatcaatccctcatacaaaaccctgcacgatcaacggagataataatgataaccccatggcgaacacctgttcttctgctctctctgctgctttccccgcaattgtatgccgcttccgaacccgctgctgaagcccgcaacgggatggttgtctcttcccagcatctggcgtcacaggccggggctgatattctgaaagccggcggtaacgcggtggatgcggcagtggctgtcggctacgctcaggcggtggtgaatccctgctgcggtaatatcggcggcggcggctttatgaccctgcatctggcagacggaaaaaatattttcatcaatttccgcgaaacggccccggcgtccgcttctgcggatatgtatctcgataaagacggcaatctgatcaaagatgccagcctgtacggctacctcgccgccggggtgccgggaacggtgaaagggctggattatgccctggaaaaatacggtaccatgaaacgggagcaggtgatggctccggcgataaaactggcccgtgacggttttatcctgacccgcgcagataccgatgtgctggacaccaccaccgcccgctttaagcaggatccggaagcagcgcggattttccttaaacctgacggctccgcattccagcccggcgaccgcctgattcaatccgatctggccaataccctggagcgcatcgccaaagaaggccctcccgccttttatgaaggggaaatcccgcaaatcgtggaaaaagcctctcaggcaggcggcggtaagctgacagccaaagatttcgcggattacaccatttctgaggtcgcaccggtcacctgtacctatcgcggttatgaatttatatctgccccgccgccgagctccggtggtgtgactatctgccagaccctgaacatcctggaaggttatgatctgaaagcaatgggctttaactcagcggattatattcacactctgacagaggcaatgcgccattcgtatatggatcgcaacaccttcctcggtgacccggcgtttgtgaaaaacccgaccgaaaaactgaccagcaaagcctatgcggaagagctgcgcaaaaaaatcattccgggtaaagccacaccttccgctcaggtgcagccgggtacaggtccgcatgaaaaaccggaaaccacacactattccgtggtggataacaaaggcaatgcggtttccaccacctataccatcaatggccgtttcggtgcggtggtgatcccgccgggtaccggtttcttcctcaatgatgaaatggatgatttcaccaccaaaatcggcgagaagaatatgtacggtctggttcagggtgagcgcaacgcgattgccccgggcaaacgtccgctttcttccatgagcccgaccattgtcaccaaagacggtaagattttcctggtgctcggttcgccgggcggctcacggatcatctctatcactctgcagaccgcgctgaatattatcgatcacggcatggcaccgcaggaagctgtgaatgcgccgcgtatccaccatcagtggctgccggatgaggtgtattacgagcagcgcggtgtgtcaaaagactcactgaatctgctggataaaatgggttataagatggttgaacagacaccgtggggtgccgccgagctgattatggtggggttaccgggtgccgccggagtcagtgcggactcttccggcaatgatgccgccgtgtccggtaaggtgcgggaaggctatttatacggtgccaacgatgtgcgccgtccggccggggaggcagcaggagtcgagtaatctcccggccggatttgtaaacgcagcatgccctgtccgtcacggacagggcattttttacggcaaccagctgatatcaataattaaatattaacaccgtgctgagatgctaatgcagacagaccaccggcgaagccctggccgactgctttgaatttccactctgtaccgtgacggtacaactcaccgaagaccatcgcggtttctgttgatgcatcttcagacaggtcgaaacgggcaatttcactgccgttatcattgttacagatacggatgaagctgttgctgaccataccgaagttctgtttacgtgcttccgcatcataaatcgtgacggagaagaccagttttttcacatctgccggaagggtgttcaggctgattttaacctgctcatcatcaccgtcgccttcaccggtgcggttgtcgccctggtgctccaccgcgccgcacgggctggttttgttattaaagaagatgaaatggctgtcggataatacttttccgtcgtcacccaccataaatacagatgcgtcgaggtcaaaatcctgaccatcagtcacacgcgcatcccagcccagaccgaccatcgccacgctcattgacggggcttctttggtcagggagacgttaccaccttttgtaagagaaactgccattttcggactcctgctgcggattataaagagggctggttatcagcccgctgaaaaaaaatactcaggacgcgttgataccgtactgtgcacagactgatgacagaccaccggcataaccctggccgacggcacggaatttccactcggctccgtgacgatagagttcaccgaacagcatcgcggtttcagtggaggcatcctcagtcaggtcataacgggcgatttcggtattggtatcatcattgaccaggcggataaatgcgccggatacctggccgaaactctgacggcgggtctgcgcgtcatggatagtgaccacgaagacgattttgtcgatctccgccggaatcatatccagtttgatgatcagagattcatcatcaccatcgccctggccggtgcggttgtcgccggtatgggtgactgaaccgtcagatgaacgcaggttgttatagaaaataaagtctgcatcgccacgcactttaccggcggcggtcagcagaaaggcagaggcatcaaggtcgaaatcctgaccatctgtggaacgaacatcccagcctaagccaatcaggacgtttttcattgaaggggctgttttgctcagcgacacgttaccacctttagaaagagaaacgctcatttcacttactccttagttaaatcagtgacgggtggcggataattacttatccgcactttccgttttttccgggaaaacaaagctggcgataatacccagtgccaggaccccgagcaccacgaacaggctgctggtggccgaaatatgtaatccgtgaccccagaggctgtctgtcgcattcagacccagtttcaccgcgataaagaacagtaacgcaataaccgctttttccaggtgaaccagatactgcttcagtgcttccaggacaaagtacagggtacgcaggccgaggatcgcgaacatcatggcgctgtaaacaatcagtggctcacggctcaccgcgataatcgccggtacggagtcaaacgcaaacatcacatcggacagttccaccacggccacacacagcatcagcggtgtggcatacagagcggcttttttaccgcgtccgatagtgacgtccttgttctccggttttgccagctcggcatccacttctttctgggtcagcaggaaggcgtgtccgctcagtttcggccagatcgggaacagttttttcaccatccggtaagcaatgtgctgcgagtaatcttcaatctcttccttatcttcgcggttacgcagcatcatgacagcggtccaggcgacgatcagggcgaaaatcacttccacatacggccccaggctcagcagaccggtacctatcgccacgaaaatcccgcggaaaacgatagccccgataatgccccagtacagcacccggtggcggaaacgatccggaaccgagaaccaggagaaaatcgccatcatcacaaacaggttgtcgaccgacagcactttctcaagcgcataaccggtgacgaacaggctcgcaacttccgaaccgtggtggatatagagaaacccggcaaaacccattgccacagcaacccagaaaacagaccagattgccgcatttttcagtgaaaccggcttatcgccccggtgcataaacaaatcaataaaaatcgcaccgattgcgaggatgacgaaaacggtgactgtttccatcggaaaaccgatatgtgttgattccataattaacccttaggtataaaaatcagagaccgaactctgccgggtcaaaccccagagcagcggcgatctcttttactgctttctgctcatcctgatcgaagttaccgtcactcttcgcgactgcaatcccgacacgcaccgctaactgcgctgcttccggctgatccttcagcgccaggatatatttcatggtttcacctttgccgatttccatgtcgaaatcgaaactggtgaccaatttgttgaaaaatgtaatgacttcttcggtttcaaatactttcagttcttcggaggatttcagaaaaccgatcattttctgtttttcttccgcactgaccccgtcactggaaaccgcaatgcgggcacagacagcgattgtaccttccataaacttacggtttctgaaacgactgacctgttttgtcagctcttcgcggcctgaattaaacgcacttttgacccggttaagtatactcattgctgtatcctcacttaaattatttcgagccggctttccagcggaaaccccacccgaatgcttcatccatatcgctttgatttttaaagaaacggttaaggcgttcgacttttatcgccccgttctcattgaccaggcgggcaatcgcgcacatggtgcggcggtcgtccccttctgtcagccgggtttcccccggcggctgctccggtacaaagaccgtcaccacgccatctgttttgtcccagctcggcacgccctgataaataaaggcgtagatgaggatttggcggatatgtttccactcgccgccgttgatatgcagccactcaccttctgaaaccgcgccggtgcgatcatcgccctgcaactgaataaagggttcacgccggtaatcaccaaatgcattacccagtgcctgaatcaccgatttctgaccattctgtaactcaacgaatgcgcccagatccaggtcaatacctttgttaccgccaccgaacacattgctgaggaagcccccggagttgctgttctgaacatcacggtgccagttcagattaatgcggatttcaccgaaattatcccgcttgctcagactgattgacggtttttctttgctcagcgatatcttgcttaaactgattttgctttctgccggttttggcgctggtgccggttctgccgccacatccaccccgaagtgctccgccagcggtttcagtccgccgttgaaaccctgggcaacaaagcggaatttccactcattattacggcggtacagttcgccgaggatcaatgccgcttcctgacgaccgacggtgtccacaatgccgctgagcagtttttcacgatccgcctcaacctgaacttccaggctgcgcagaccggcaacagtctgcccgccgtcacaggtgaccacaaatgcgactttctgcacatcctgacgcagacggctgacatccaccgtaaagacggtattgttgccattctgctgccagctgatggtgttgtcatcattctgcggctggccgtagaagaccatatccggatcgccctgcactttgccgtcagcatacagacggaacgcagaggcatccgccgccgcaccggacagcaccgtcacccgcagtgttttcagcggtacgggcgcattcgccccgggcgtcatgttcatcagcgcaccaccgtactgacgatgtcggaagacatgtcatcaatcgtgcggccgcggcatgcagcaccgtgtgcggtaaagttccactcaccgccgctgcggcacagggaagcaatcacgataccggtgtgtgagccctgctcattcagctgataacgcaccagctctttaccgctctgatccagcacacggcagaaggcattttccacatcgttaaatgtctgaccacggaagctgttcaccgtaaatgccagatattcggtattctgcggcagacggttcaggtccacgcggatcacttcatcatcgccgtcaccctcaccggtcaggttatccccttcatggatcacggatttacagtctgatttcagtttgcggaaccagatggtgtcgagaatacggccgtctttatccagcaggatgcagctggcatccagatcaatggagtcgttaccgccaccgaacagcgaaccgagaaaacctttctttttctgaacaggatcccagccgagaccgaaatgcagctgatttaatgcggcagatgccttgctgagagataccgtctgattcttcgtcaatgaaaccatattttcattccttaaacgggagataaaacccggcaacaggtgctggtgataatgaattttaaaaaatcatatcatgacggagttctttggcaagatatatttcaaattaaattaataatgtatattaaacatatagttagaatagaaataatgacattcatagttatagataatgtcaggtttcgtcagcggattgtcaatttaaacataatcataatatgattgacatgtaaattaatcctaaataaactcgatcccaatctatcggataaaacagaacaggaataaacaataatggcgcatgcgatctggctgacggaaggactctcttcccagcgtgatttgatccggaatatcaggctgttcgcgcagacattacaggttgatctcacgatttttgcctctcaccggcagccccgtcatgagatcctgtcagaagcggatttttccctgactgaaccggctgacgataaagatcggctggcatttatcctgtctgttacggagaaatacggtattcaggtaatccacgccgggcggaatatcccgtggtttgaaacacacagaaacacgatcacggcttccggcacccggctgataaccggtgtcgcttctctgtccgattacaccgtggcggatgataaagtccgctttgctgctgaaatggcatcacacggcctgccggttgtgccttctgtgcagattacctctgcggcgcaactgcgtgatgcactctctcattccccgtttccggggctgccgctgtgcattaaaccggttcagggcatttacggtgccggtttctggcagtttgatgacaacgcgcagccgatggccatgttcacaaaccctgaacggcggatcaccacaccgcagcagtatttgtccgcccttgaaagcgctgacaaatgctccgcgcaggtactgatgccttatttgccaggcccggaatattccgtggatattctggcggataacggtgaggtactggccgctgttgcgcggcgcaaagacggttctctgcaataccttgaacatgacggtgccgcatttgagctggcctgcgcctgtgcgcgggtgatgaagacggacgggctggtgaaggtgcagccccgccatgaccatcacgggcagccgctgctgctggaaatcaatatgcggccgtccggcggcatcggttataccgcgctgagcggcgtgaatctgccgggtctgtttgccctgtacagtcccgggctgcttagtgcagatgaggtcagagaatatgaccgcactgcatttcgtccggcaattgtccgcccgctgaccgaagccgtcagctacccgtcttccctgaacaatgcaatacactgaggtcactatgcccggtttttcccgtcccggtcaccaccggttcaccctgacaaccggcacgctggaagtccgcagcgatgccacaccggaaactctggatgcgctgttcggaatcgcagagcggcgtaacccgaaacgggcgtttctgtttgtcagcaaagtactgggccgccatatcccggtcgagccggaaattatgcgcggtgtttaccgccgcctcagtgagcagtttccgcaggatctgccgcagccgctgctggttatcggtatggcagaaaccgctgtcggtctgggagcaggcgtatacagcgaaatccgccgtcagtacccggaatctctgtatctctcttccacccgccatccggcggacggcgaactgctgtgtgaatttaaagagaatcacagccatgcgaccgatcatctgctctatttcccggccgatccgcagctgagaacccggctgcaacaggcaaaaaccctggtgctggcagatgatgaagccaccaccggcaatacgtttaccaatctgctgaccgcattgtatgaaagtggtcagctgcctgatttacaacagattgtgactgtcacactgacagactggcgtgaggatccggtcactgttcagcacgggttgccgttgcggcatgtctctctgatcagcggcagctggcgctgggaagctgatccggatgcggccctgccggagatgccggatgtgaatgtcagcgctgcgggagccgtgccaatccgccgtccgcagacgcgggtacggctcggtctgcatgatccgcacacggattttggcagtacggtgacggcagcacccggtgagcggatcctggtgctcggctccggggagtttgtccgggagccgttcctgctggcggaacggctggcagaggcaggagcggatgtaaaattcagcgccctgacccgctccccgatagccccgggcggtgctattgaatccgttatttccttcacggataactacggtctggggatccccaattatctctacaatgtggcacatcagtcatttgaccgcattctgctgtgcaccgaaacggatccggcggcgtttgatccgcagttattacaggcgctggcccgctgtgctccgctgacggaggtgatttatgacgactaaaccggtgatcctgagcgatctggatgacaccctgttccagacaaagcgcaaaatgacgcaggagcaggcacttactccgttccgcgccggtgcggttgatcgcacattgcagccgcgcagttttatgacagaagaacaggccatgctgacagactggctgctgacgcatgccgatctcattccggttacagcacgcggtacggaagaactccgccgcgtcactatcccgttcagttcttatgcgatcaccacacacggcgcagtgatcctgcaaccggacggctcaccggagtccggctggcagtctgagatgctggccgccctcagcccttaccgtgaacggctgttgtcacttcagcagttttgtactgagcggatggcagagcgcggtattgatgcatgggcgcgtattaattatgagtacggtgatgtgccggtctatctggtgatgaaacacactgacagtacccgcacagcggaactgtatgccattgccgcagagattgaacaacagtttccggctgacggattttacatccaccgcaacggcaacaatatcgcctggctgccggatccggtggaaaaaggccatgctgttacttacctgctggcgttattacgggcagagcgcggcacctttccggttatcggcctcggcgacagcctgagtgattaccgctttatgaaacactgcacctggttcgggatgccgtcccgcagtcagtttgcggaggcggtcgccgcccggattttcagtgaggtatccgatgtataatttcccgacgttctcaggcagttatctgcctgatgatgtgcagtttctgctccggccggtcactattgatatgaccccggtggaactgaaagagcagctgattcagtccggacagaaacactattccgatatgctcagccaggagcccgctcccacggactggcatcttgatctgtttaaccgcgcactgaaaaaaggcgcaccgcgtctggcgcgggatgtgagcgcccttgcccgcacactgggtgactattttgcggctcagccggttgtgctggtcagcctggtccgcgccggtgtgccgttaggcgtgatgctgcaccaggcgctgcgtgatgcgggaaaaatctcacaccattacggcatcagtattatccgcgatcgcggtattgatacggtggcgctggagtggatcgaacaccatcacggcaccgccggtattgtgtttgttgacggcgggacaggtaaaggcgccatcacaggtgaactgatccgctccctgaaagacagacccggctacccggccgatccgcgtctggtggtgctggccgatcctgccggatgcgcctggctctccgctgcggatgatgactggctgatcccgtccggcattatgggagccccggtttccgggctgatttcccgctctgtctggtcggaaacagggccgcacggctgtgtgcattgtgagcacttacaaccttatgagtgcagccggacacttaccgatactgttgccgcgctgcgccgtcaggaaaccgcggctccggctgcggccttcccggagccggacaccaaaacagcactgcggaaaaaaagccgtgcggtgatcactgcgctggctgaacgctgtggtgtcaacgatctgaacagaatcaaacccggtattgccgaagccacccgtgctgtcctgcgccgggtgccggatcacgtctttgtgcgcgactgcacagagccggatgtggaattgctgctttatctcgcccgtcagaaagggatcactatcacggaagccggcgatgccctcgggcagtaccgcgccgtcactattatcaggaaggtatcaccatgacccgacgtctctccccgtggaatttaggggcttcactctatatgcccgccacccgcaccgatatcacggatgcgattatcagtaataaaatcagcggactgcgttcactgattatttgtctggaagatgcggtcagtgaggcggatatcccgcaggcactggagaatttacagggcatcctggccgcgctgacagcggaaaaacagcgtgccggaaaccagaactggccgctggtgtttatccgtccgcgtcacccggaaatgggattgtggctgcgcgagcactgcgatctcagtgccgttgacgggctggtgctgcctaagttcacacagaaaacgctgccggtctggtggctagtggtgaaaaacaccccgctgtgtatgatgccgaccctggaaacagaagaagtctgtgatgtggtgcagatgcgggaactggcgcaggtacttaaatcccatccctgccatgacaaaatcatcgcactgcgtatcggcggcaatgatctgatgaatgtgatttccctgcgccgcccgcgtcatctcaccctgtatgacggcccgatgggttatgtgattaaaatgctggtctctgttttcgccccgcacgatttcgccatgaccgcaccggtctgcgagcatattgatgatcacgatgtcatgacacgggaactggcgctggatatcgctcacggactggtgggtaaaacggcgatccacccgaatcaggtggcagtgattgagcaggcgctgcgggtctccgctgatgagcacgcggatgcactgcggatcctcaactccacacaggcggtattcaagtcactgggagctatgtgcgaaccggcgacacaccggcgctgggcatctgccattctggcccgtgcacgggtgtacgggatcgcacagcggaaaacagacggacagccgtttaaaacacaaaacgggtgaaactgaggacagaaatatcatcagactgaatatcctgcactattatatctgaatgccttgatatatcctgatcagctgattaaatagaactgttatgcggaacagccgtttccggcataacagcggctttgtctctttgtttttatacaggtgtccccagactatgcaattaagcacacgacaggttcgtttattcaccctggcaaccctgctcggtaccggaaaaccggttccgtcagatgaaatcctggcgacactccgctgctcagaggcaactctgacccgtactttcaaagagttacgtgatacctggtcagcggaaatccgctaccgcaaagcctcacatacctatgaaatgactgactccggcacactggatcgcaaaacactgaaaaagatgagcgaagagctggaaaaccataacggtcagaaatcggtgtattacagcgggaaagtgtcactggataaagagaagaagaaggcggtttcgctgtcactgaccggcacaaccgtccggaaaatagcacatttatctatgctctctggcaaaacccgcagtgacgcggtagagatgctggtcaatcttcatatcgatgagttaattgaatcgataatccggcgaaatgaaagccagcagaaaaaataatccgtaaaaaaaatcgcccggcaaataccgggcgattttattattcacgcaacaaattacagaacgttaacgcagttcagttctttgaatgctttttccagacgttcgatcattgtctgctgaccggcacgtaaccatgcacgcgggtcatagtattttttgttcggcttgtcttcgccttccgggttgcccagctggccctgcagataaccttcatttttctggtagtagtgcaggataccttcccaggtcgcccactgagtatcggtatcgatattcattttcaccacaccgtaacccactgcttctttgatttcttccgcagtagagccggaaccgccgtggaaaacgaaatccaggctgttgtgcggcaggttatatttttcagagacgtagtcctgagagttacgcagaatttttggtgttaactgcacattacccggcttgtatacgccgtgtacgttaccgaatgacgccgcaatagtgaaacgcgggctgatggcattcagtttttcataggcatacgccacatcttccggctgggtgtacagagcggagttatcgaggtgggagttatccacgccgtcttcctcaccgccggtgcagcccagttcgatttccagggtcataccgattttcgccatacgggtcaggtaattgctgcaaatctcaatattttcttccagtgactcttctgacagatcgatcatatgagaagagaacagtggtttaccggttgcggcaaagtgtttttcaccggcatccagcaggccgtctaaccacggcagtaatttcttcgcgcagtggtcagtgtgcagaatgaccggcacgccgtaatgttccgccatctgatgcacatgatgcgcaccggagatggcacccagaacagcggactgctggccttcgcctttgaaacctttaccggcgataaatgcggcaccgccgtttgagaactgaacaataacaggcgcacggactttggccgctgcttccaatacggcgttgatcgagtctgtcccgacgcagtttaccgctggcagtgcaaaattattctctttggctaccgcaaagattttctgaacatcatcgccagtgacgacaccgggttttacaaaatcaaaaactttagacatgtcaaatttcctgtattggtctttcggaagttgtcacgggcagctcacaccgcccgttattgtcatctgattatgactgttactgttttgcacgttcttcgagcatgacaacggctggcagttttttgccttcgacgaattccaggaatgcgccgccgccggtagagatataagagattttgtcagcaatgccgaataaatcgattgcagccagggtatcaccgccgcctgcgatagagaatgcgtcactgtcagcaatggcgttagccacgatttcagtccctttacggaagttcgggaactcaaacacgccgaccgggccattccacagaatggttttggcatttttcaggatttcagccaggtgcagtgcggattcatcaccgatatccagaacctgctcatcatctttgatatcattggctgatttcagcaccgcttctgcggtttctgagaactcagtcgccacacggacatcaaccggtaccgggatatcacagctgctgagtaattttttcgcttccggaatcaggtcatcttcatacagtgaacggccgacattgtgcccttccgctgcgataaaggtgttggcgataccaccgccgacgatgatctgatccgcgattttggacagagaatccagtacggtcagtttggtggacactttagaaccgccgacaatcgccaccatcggacgtgccgggttatccagtgctttgccgagtgcatccagctctgcccataacagcgggcccgcacaggcaacaggggcaaattttgccacgccgtgagtcgatgcctgggcgcggtgtgcagtcccgaatgcatccatcacgaaaatatcacacagtgatgcatactgttttgacagggtttcgtcgtctttcttctcgcctttgttaaagcggacgttttccagcaccaccagctcaccggcattcagttccaggccgctgaggtaatctttttccaggcgcaccgggcagctcagtttatctgccagataatcaacaaccggtttcagtgaaaactcttcgttgtattccccttcaaccggacggccgaggtgagaggtcaccatgactttggcaccctgtttcagtgcggcttcgattgtcgggagcgaggcacggatacgtgcatcagaggtaactttgccatctttgacaggaacgttcaggtcagcacggataaaaatacgtttacccgccagatccagatcggtcatcttaattacggacatggtgaatcctcttgttgattctcttatcagttaaattgtgttcaattttctgccggggcacgccgtccctcagtgaaaaccagcctcagccattgccagagtggtatccagcatacggttcgcaaagccccattcgttatcgcaccagaccagcatttttatcagatgctgtccgctgacgcgggtctgggtgccgtcaacgatagcactgtgcggatcatggttaaaatccgccgagactaacggtaactctgtgtagtccactataccacgaaatgcccccgtcgctgcgttttgcagaaggcggtttacatcctgcgtggtgacattactttttacagtgacgctcaaatcaatcgccgtcacattaattgtaggcacccggactgaaatcgcctcaaaatgatcttcaaatttcgggaaaatccgccggatccccgcagccagtttggtatccaccggaatgatggagtgcccggccgcccgcgtgcgccgtaaatcactgtgatacgcatcaatcaccggctggtcatttatcgccgcgtgaatggtggtcactgtaccggactcgatgccgaatccctcatccagtaattttatcaccggaatgatgcagttagtggtacaggacgcattcgatacaattttatcctgcgccgtcagtgtgtcatggttaacaccgtagacaatggtggcatccaggtcattaccgccgggatgggaaaacagcacttttttcgcgccgccggcgatatgtgccagcccgtcatcacgggagccgtacacgccgctgcagtccagcaccacatccacaccgagctctgcccagggcagttggtgaatatccgcttcatgcaggatgcggatagtgtcatcaccgactttcagcacatttttttctttcagctgtaccggtttaaaaaagcgtccgtggcttgtgtcatattgaagtaagtgtgcaataccttcggaatccgccagctcattaatagcaacaacggtaatctgcgtgttacgcccggtttcatacaacgcccgcagcacactccgcccgattcgcccaaacccgttgattgcaatttttattgtcatagtatcctcagaaatagccaaattatcagcggactaagaataacggactcacgggtttttgtacggggtatttatcatagaaaccgcaatcttttttatcctctgcggtacattcagcacacccccaaaactgaaacggttcagctcaataaagacaggttatgctaaatgaaaaaagatcgcaagacagtcagaggagcagatataaaaaaagcgcattcggtcaaaaaaaccggaatgcgctttcagaatctgtatcagcagattatttcagcagagctttcgcctgagaaaccacgttttcaacagtgaaaccaaattcactgaacagctgaccggctggtgcagattcaccgaatgaatgcatgccgacgatggcaccctgcataccggtgtatttgaaccagtaatccgcaatacccgcttcgacagcaacacgcgcggtcacggctgacggcagaacagattcacggtaagcagcatcctgtttgtcgaatgcatcggtggacggcatggaaaccacacgcgctttacggccttcggctgtcagctgctcgtatgctttcacggccagttccacttcagaaccggtggcaatcagaatcacttccggctgacctgcgcaatctttcaggatatacgcccctttttcgatatctgccagctgctgcgcggtacgcggctgctgtgccagattctgacgggagaagatcagggatgtcgggccgtttttacgctcaatcgcgtatttccaggctaccgcagattccacctggtcacacggacgccatgtgctcatgtttggtgtcacgcgcaggctggcgatttgctcaaccggctggtgagtcgggccgtcttcacccagaccgatagagtcgtgagtgtaaacgaagatgctgcggatcttcatcagtgccgccatacgcaccgcgttacgggcatattcaacgaacatcaggaaggtcgcgccgtaaggaatgaaaccgccgtgcagggcgataccgttcatgatggcagacatgccgaactcgcgcacgccgtagtgaatgtagttacccgctttgtcttcattgattggcgctgagccggaccacatggtcaggttactcggtgccaggtcagcggaaccgcccataaattcaggcagtactttaccgaacgcttccagtgcattttgtgatgctttacggctggcaatgctggccgggttgtcctggaggttctgaatgaaggcgtttgcatccgcttcccactgtgcaggcagctcaccgtttacacggcggcggtattcacgggccagttcagggaaggctttttcgtagtgagcgaatttcacatcccactcagattcagcggcagcaccggctttcttcgcatcccactcagtatagatttcctgcgggatctcgaacggcgcatacggccagttcagtgcttcgcgggtagcggcgatttccgcatcacctaacggagaaccgtgtgcgtccgcagtaccggctttcttcggtgaaccgaaaccgataaccgttttgcacatcagcagggatggtttgtcagtaaccgctctggcttcttcaacggctgctttaatctggtcagggttgtgaccgtcaatgccgcgcacgacgtgccagccgtaagcttcaaagcgtttggcggtatcgtcagtgaaccagccctgaacattaccgtcgatggaaatgccgttatcatcatagaaggcaaccagtttacccagtttcagagtaccggccagagagcaggcctcgtgggagatcccttccatcatacaaccgtcgcccataaagacgtaggtgtgatgatcaacaatatcgtgacccggacggttgaactgcgccgccagtgtctgttccgcaacagcaaaaccgactgcgtttgcgataccctggcctaacggaccggtggtggtttccacgcccggagtgtagccgtattcagggtgacccggggttttggaatgcagctgacggaaggcttttaagtcatccatcgatacatcatacccggttaggtgcagcaggctgtaaatcagcattgagccgtggccgtttgacagcacaaagcggtcacgatcactccagtgcggattggtcgggttgtgcttcagatagtcgcgccacagtacttccgcgatatcagccatgcccattggtgcgccggggtgtccggaatttgccttttgcaccgcgtccatgctcaggaaacgaatcgcattagcaagagttttacgagaggtcattgtctactccaggttcggataaaaagcagatacaggctattttcgcagtgccgcgcacggatggcaatccttatcaccggtcagaggcaaagggtcggggctgaaaagacaacaatgagacgtcaggcgaggcttgtctgaggacagaaacaatacttcgcacaggcggcattttcgctgactaaatcgttttagcaccaggtattgcgcaacagcggaagtgacctattaaacccgattaccacgatgaatagcaagcggaaataccgcattctgtgcgcttatccggcggatggcgggagtttcctgccggcagcggaaaaattccgcttaccggcagacgaagatattacggtttctcttttttaccgacgacactgtcaaaattgaataaaagattcagcacgatagccagaacaaaggtcactatcacgccctgggaaagaataatccgcagcatttccggcagctgagaaagcgcttccccctgtccgttaaacatcagcccgacactgaccgaaatcccgaccaccatcatattgcccattttggtcatatcgacggattttgtcagtgtgtctatccccgccaccgtaataaaggcaaaaatcaccagggtcgcaccaccgaaaaccgaagcggggatcatggtcgcaattgcggagaatttgggaataatgctgaggataatcaggatcacgccgctgcacgcggttacataacggctgcgcacaccggaaataataatcacccccgcattgttaataaaagaggtcagtggcgtacagttaaacagcccggaaatggtcactgccaccccttccccgcgcatcggggagttcagggcattaccttccatagagcggttacacaggcggccgacagtggagaaagtaccgacagaatccagagtggccataaaggtaccgaggaacatcagaataatggcggtcagatcaaactgaatgccgtaatgggcgggacggacaaacgaaaaccacccggcgctgctcaccgggccgaaattgaccatatccatcaccacagccaccagtgttgccacgatcaggccgataagaatcgacatttcccgcagtgcacctttaccgaagcggtttaacagcacaatcaccgcgatagtcagcacaccgagaaaaatgccggccgggtcgccgtaggaagcgtcccccggatagccgacaatgccggaaaacgaaaccggcagcagggaaacgccgagcataataagataacagccgatgactatcggtttaaataagaaggcgatttttccgtacagcggcgcaagaaagaacagcagtaccccggagaccagggttccgccgaagacataaggcagcgattcaagccccccgccgaaccgcgaggcaataataaaaaccggcggcatcgccacaaacgaagtgccgaggatcagcggcagactgacgccgacgtatttggtgatactcagtgactggataagtgtccccacgccggagacaaaaatcgcggctgcaatcagcagggtggtatcttcctgcgacagtttcagaacctgggaaatcactatcggcacggcaatggtgccggtaaacatggcaaaaatatgctgaacagcatacggaaacagtttccgcatcggcatcatttcattgacttcatcactcccggtgtttgttttcataaatacaacctctggattggttttattgtttttaccggcacagcggcgacggccgcgcaaccggttacggaaaacaaacagcaagatatgtgccagcacctgaacattatttattcacataaagtatgagtgtggtcacaacgcattatcaaaatgataagagaggtaatagcgggggatgataatgatacagggcgattgtacagcgtaaaaacagaaaagccctgacattgctgtcagggcttctgtaatctggcggaacggacgggactcgaannnnnnnnnnnntgtgttccttttcgggaacggtgcggataatacgatgccggttcccgttcgtcaatacctgatttgtgtaaatccatgcaattgcacagtttttcacctgagcatactgttttatacgggccaccgcacacgacacacggtctcccgcaacgcgctcatccggtttcagggcgcagtttgtttttccagatcaagcagataaatcatggcctcatcccggctctccccgcacatttcccgcgagggctgtaacccggcacagaccgccggacgcagcggtgagccgaaaatcaggcacaaattctgctcagataactgaacgcagcgggtattggcgggtttaccgtccggcatccccggaatcggtgatgagatggacggcgcggtgcagcaggcaccgcagtcactgcggcaggcaatcagctccgccagatgcacgggttcgccccttttttctccgccagatccagacgcgcctcgtgcgcggcaatttcctcatctgtggcatataccacacgcagaccgctctgcgggcgggtaacgcgctgaatagtctgaacgttctcttcgccgctgctctcattatccgctgaaaaagccagtgatgtctggccgccggtcattgccagataaacatccgacagaatctcggcatcgagtaacgcgccgtgcagcagacgttttgagttatctatctgatagcggtcacataacgcatcgaggttattacgcttgccggggaacagctgtctggcgagcgttaagctgtcagtgatggtacagaattccgccgtcggcgggatcccccggttcagcttgcggaattcataatccataaagccgatatcgaagggcgcgttatgaataaccagttctgcgccacggataaattcaataaattcatccgcaatgtcggcaaaaaccggtttgtccatcaggaattcatcgctgatcccgtgcacaccaaaggcttccgggtcccccagccggtcaggccggatatagagatggaagttacggccggtcaggcgccggttgatcacttcaaccgcaccgatctcaataatattgtgcccctcgtagtgggcacccagtttgttcataccggtggtttcggtatcgagaacaatttgtcgtgtaatatcagtgctcataatggcgttttgtgtcagactcaggtaattgccaatcaatcagaggaagagtctaccagagatgagtgacaaggtagaaattttcaccgacggctcctgcctcggaaatccgggccccggcggctacggcgcgctgctgcgttataaaggccatgagaaagcactcagtgagggcttttttcttaccaccaataaccggatggagctgctggccgctattgtggcgctggaaaccctcaaacgtccgtgtgatatcgtgctgaccaccgacagccagtatgtccgtcagggcatcacgcagtggatccataactggaagcggcgcggctggcgcaaagcggataaatccccggtggtgaatgtcgatttgtggcagcgcctggattccgccatcacccgccatcagattgactggcagtgggtgaaaggccacgcagggcacccggaaaacgaacgttgtgatgaactcgcccgggcagcggcagaatccccgtcacaggacgataccggttatcagccggcaacggagtaatcctcagcgccgtttcagacagcgcggcggcgtctgctggcgtgtcgcgcccaccacattgttcagtttcggccgcagcaggcgcagcttctgcggtgtgaacgtcagcggcaccgtgcgtttgcgggccacaattacccccagacagccgaaaatccgtgcatgccggttgccgaaacttgccggatcacaccaggggatcggtgtggtaagccggtgatacataatttcgtaattgagcaggctgagccagtcgagcatacggaactgcgaaaacatccggctgcactgcggctcccggttcagacgccacgggatcagtttacgcgcccccagcaggcttaacgggttaaacccgctgataatcagccagccgtcctcaatcaggacacggtcagcctcgcgcagcaaccggtgcggatcactgctgtagcccagattatgtgccagcacacagacatccgcggatttgtccagaaacggcaattgcgccgcctccccgaatacctgtaaggtgttaccctgcggtgccacattcacctgatgcgggatcatgcagctgctgctgtcaatttcacagctcagcgcgccgatcttaatcagatgaaaaccaaacattttcggccaccagggcgccagctgtgcttccagcgattgccggaagcggcgtccgcagggaatatcgcaccacgagtccggcatcgtcagaatttttgtcgctcgtgcagaaaacatggctttatccttggttcacactcagaaaggtgaggtatctatggagcttatcagaatttccgcgttatcagataactacatttggctattacgggataatgcgcacacctgtgttatcgttgatcccggcgtcagtgagccggtactgaatacactgcgggagcggagactgaccccctcagccatcctgctgacacaccaccatgcggatcacaccggcggcacggcggagattgtttcacattaccccggtctgccggtttacggtcccgccgaaaccctgccgaaaggcgcaaatcactgcgtgcaggataatgacactatcacctgcggcgggctgacatttcaggtcatggcagtgccgggacatacactcggtcatgtggcctattattgcgaaccttatctgttttgcggcgatacgctcttctccggtggctgcggccgtatttttgagggtacaccggcgcagatgttccgctcggtcagccgccttgcggcgctgccggatgagacgctggtctgctgtgcgcatgaatatacacagtctaacctcgcctttgcgcgcactgtctggccggaaaaccgtgatattcaggcatatcagcaatatattgcagaattacgtcagaatcatgaagctacgctgcccgtcacactgaaaacagaaaggaaaattaatgtttttcttaactgtgataatattgatctgcaacataatttatcagtaagtaaacatacggcgacggctgaggaaacttttacgtctttacgcgcaaaaaaagatcaattttagccgtaatcgttgtcagggcggaataacaccagtatgattgcaaaacctacagactgaagaataataatgctgattccgccaacatgaaaatcaaagctacactccttgccgccgcaattttgctggcggggtgtcagactgcgccgcagaaaactgcacagaaacctcattatccttccggtaacggctttttactgactgctcagcagatgaacgcagcaaaggcatcctccgtcagtcccgaagatgatatctggggttatatccgtgatgaaatgaaaatgaacatcccggacaatgaccgcatccgcgccgaagaactttcttacctcgccaaaaagagctatctccacgatgtgacactgcgcgcagaaccttacatgtactggatcatcggtaaaatcgatgaacgtaacatgccgatggaactggttctgctgcccatagtggagagtgcttttaatccgcatgccacctcaccggcccaggctgccgggttatggcagattatcccgagtaccggcaaagcaagcgggctgaaccaaaatcagtgggtcgatgatcgccgcgatgtggctgcatccaccactgccgcgctggatttactggagcgcctgaataatatgttcggcggagactgggcactgaccctggctgcatataacagcggcgaaggccgtgtgctgcgcgcgatggaagcgaatgctgccgccggaaaaccaacggattactggtcattatccctgccgaaagagaccatggattatgtgccgcgtatttttgccctgagcaatgttatccgcaacagtgaccgtaacggtgtgaatttaccggtaccggatgcagagcgcgccctggcgcgggtgaatatcggtcagcagatttccctggatgtcgcggcacagttgctggatatgccggtttccagactgaaagattacaacccgagcctgaaacgcggtgtaacctcaccggccggtcctcactatctgatgctgccgaaaaccaaagtcgaccagctgatgagcgcgttatctgatgacgcggtacttgatgatatccgcacagcggtcgcgagaaacaatcagcgtactgaacagctgagttcaccggcaggccgtgcgcaggccgcaaaatataaagtgaaaagcggtgattcgttctacgccattgccaaccgccataagatgaccgtcgccgagctgaaaaagctgaacggactgaaaagcgctgcggttctgaaaccgggacagacgttgcaggtaaaaggcagcccggtggtgaaaccatcaaaagccgccaccaaaaatgcaatgcgtctggcgaagtataaagtgcgtcagggtgattcttactacagcattgcgcagcgtcatggtgtgacactgaaagagctgatgtcctggaacagtaaagtcaaaatgaaggacttgcatccgggtattgagttaacggtttatgttgccaataaacgcggctgataatcactgaatcacattactttctctgaagccctgcatgatgcagggcttttttatatccggtgatacctgaatgtatttccggctgttcttcttctttcccgcacttctgcgatatcagtacatccgcaccgatattctttcctgccggtataaaaaaacccgctgataaatcagcgggttttctgtgttgaactttgctttcgtgtttattatcagcggtgctgttatacccagaacaaccaggcgaaggccgagataacgataatacaggcgatattcagcacaccaccgacccgcaccatctcggactgtttgataaacccggtcccgaacactatcgcattcggcggcgtcgccaccggcagcataaaggcacaggatgcaccgataccgataatcatggtcagcgccattaccggcattcccagaccatccgccacaccggcaaaaataggtaccagcagtgcggcactcgcggtgttactggtgaactccgtcagcacaataataaaggtggtgacagcgataataatcaccagccagctgctgttaccaaaggaggttttcatccagtttgccatcacttcactggcaccggaatctttcaggatcatactcagtgtcagaccaccgccgaacaggaacagaacgccccactcagtgttgttctgaatctgtgaccagctggccaccccggtaataccaatcagcgcagcggcactcagagcgataatggtatcgaaatctttgattttacccagcagatcactcagcggtgcactgccgatccagcagataacggtcagaccaaaaataccgagtgtcagcagacgttttggtgtccactgaacctgctccacttcaatttcaaaacgggcacccagcttcggacgtaacatcaggtacataataccgaacataatcggcatcaggatcagtaccatcggaatgccgtatttcatccaggtgaagaagtccattcccagctggtttgcagcaataatgttcggcgggctgccgaccatggttcccaggccgccgatactggcgctgtacgccacgcccagcagcataaacacgaacgtgttacggtcgtgacggatatcgaggttccccagaatacccagcaccagcggtaacatcatcgcggcggnccccgggccgccgatactggcgctgtac

SEQ ID NO: 35 - DNA, 38478 bp, unknown
  Altogen 322075 strain
  misc_feature (32911)..(32936): n is a, c, g, or t
ccggtcacactgaacagcagaatcactgccgcccataaacgaccacgggcaatcagcagcaggcggttggcaatcaggcgatccagcccctggatatgcagcgccgtcgccagcgcaaagccgccgaagaacaggaaaatggtcggactggcaaaagactgcaatgccttacctgcgcccagcaacccgagaaatacagccagaatcgggatcagtaacgcggtcagcgtgacatgaatcgcctcagtcagccataaaacagcgacgaacaccatcagcgccagaccggcgttctctttgtcgctgtagggcagatatttcagcagcagtatcagcagcacaatgtccagagccagtatgatgagtccctttgtattaaaagaactcagcccggtggattgggtgagcgtttctgaagcgtccatgataattccctcagtaggatgaaaaagtattcacgaaaccgattgctgtcatagtttaataaccggcatttttgcgtgaatgctaaaaatgttaaacaatttatcttcatgtgaaatataaaaagtattaataacaaaatacatcacaaatcgttcgttttgcgatctgaggcaacagaataagtaaaaaaacttgtcatagcatggtaaatgaccagttttagtcattggggagacggatagaaagcgggggaatattcgtaagataagataacgcagtcataaaaaaaggtgtgtccgccggacacaccttttttaacattcacagtaacaattactgacctttgatctctttgcggccgtggaacggagcacgttcgcccagcgcttcttcgatacggatcagctggttgtacttggcaacacggtcagaacggctcatagaaccggttttgatctggcctgctgcggtaccgacagccaggtcggcaatcgtggcatcttcagtttcaccggaacggtgagagataacggcagtgtaaccggcgtctttcgccattttgatagcagccagtgtttcggtcagtgaaccgatctggttgaatttaatcagaatggagttaacgatacctttttcgataccttctttcaggatcttggtattggtcacgaacaggtcatcaccgaccagctggattttatcgcccatgactttagtctgatacgcgaaaccatcccagtcagattcatccagaccatcttcgatagaaacgatcggatactctttggtcagctcttccaggtagtgagtgaattcctgagaggtgaaggtacggccttcgcctttcagttcatacataccggtttctttgttgtagaactcagatgctgcacagtccatcgccagggtaacgtctttgcctaactcgtagcctgctgctttaacggcttctttgatatcagccagcgcttctgcgttagaacccaggtttggtgcataaccaccttcatcacccacagcagtgttcatgcctttcgctttcagcacttttgccaggtgatggaagatttcagaacccatgcggacagcttctttcagagaaggcgcgccgacaggctggatcatgaattcctggatgtccacgttgttatcagcgtgctcaccaccgttcaggatgttcatcatcggcagcggcatagagtatttgcccggggtgccgttcagttctgcgatgtgtgcgtacagaggtaaaccttttgatgcggcagcggctttggcgtttgccagagacacagccagaatcgcgtttgcaccaaagttggatttgttttcagtgccatccaggtcgatcatgatctggtcaactttcgcctgatctttggcatcctgacccagcagcgcctgtgcgatcggaccatttaccgcgccaactgccttcagaacacctttacccaggaaacgtgatttatcaccgtcacgcagttccagcgcttcacgggaaccggtagatgcgcctgacggagcagccgccatacccacaaaaccgccttccaggtgtacttcagcttctacagtagggttaccgcgggagtcgatgatttcacggccgatcactttaacgattttggacattaggttttcctcagtacaagttaaattttcagataagtaaccggcacttacagccggtcactcacctcacatcttattttagcagacctttctggttatcagaggctgccttgacaaaacctgcaaacagcggatgaccatcacgcggggtagaggtgaactccggatggaactgacaggccacaaaccacggatggttagggttctcgataatttccaccagtttgttgtccactgaacggcccgcaaccagcagacctgcatcttcaagacgcttcagtaacatgttgttcacttcataacgatgacggtgacgttcagtaatcgcatctttgccgtacaaccggcgaaccagggaattgttcgtcaggtggcatagctgaccgccgacacgcattgtaccgccgagatcgctctcttcgctgcggacttcaatattgccgtcttcatcgcgccattcagtgataagcgcaacgaccgggtacttacaatcagcatcaaattccgtggagttcgcgtcatccataccagccaggttacgggcaaagtcaatcagtgccacctgcatccccaggcaaatacccagatacggaatgttgttctcgcgggcatagcgggcagtcataatcttgccttccacaccacgggaaccgaagccgcccggcaccagaatcgcatccagaccctgtaacagttctgtaccgcgggtttccacatcctgagaatcaatcagtttgatgttcacagtgacgcggtttttcaggccgccgtgtttcagtgcttcgataacggatttataggcatccggcagttcaacatatttgccgaccatcccgatggtaacttcacctgacggattggcttcctcataaatcacctgctcccattctgagagatctgcctcaggagcattaatgctgaatcgtttacagatataatcatctaatccctgggatttcaagaggccggggattttataaatggaatctacgtctttcagactgatcactgctttttcaggaacgttacagaaaagcgcgattttggcgcgttcgttagcaggaatcactctgtctgaacggcaaatcagcacatccggctgaataccgatggataataattctttcactgagtgctgagtcggcttggtttttacttcaccggcagccgccagatacggaaccaaagtcaaatgcagatataaggtgtgttcacggccgacttccgccgccatctgacggatagcttccaggaacggcagtgattcgatatcaccgacagtcccgccgacttccaccagcaccacgtcatgaccttcaccgccacggatgatacgatctttgatttcgttggtgatgtgcgggataacctgaatggtggcaccgagatagtcgccgcggcgctctttgcgcagaacttcagagtaaacacgtccggtggtgaagttattgcggcgggtcattttggtgcggatgaagcgctcgtagtgacctaagtcgagatcggtttcagcgccgtcgttggtgacgaaaacttccccgtgttgggtcgggctcatggttcccggatcgacgttgatgtacggatccagtttcatcatggtgacattgagtccacgggcttcgagtatagccgctaaagaggctgcggcaatgcctttacccagagaggatacgaccccgccggtcacaaaaatataattagttttcatgctgaacctgaaagtttaggtgtaatagatgatggatataacaggacgggaaaatagtataccctaaccttattttggcgacaaataatctcgtcacctcttttcggttatccgtcgctcccggggcggtaaaaaccgcctttttacactaactaatcaacgtcttacattttataaaaaacttttcattctccggtaaaatcattagctgaaagcattaagcttacccctcacgggatttaacatcctgccaacttttctccatttcatcaagtgttgctgattccatagtcagtccgcgggcggcaatatcgctctccacctgacgaaaacggttctcaaacttacggcaggctttttgtaacaccatttccggtttatgtcccagatgacgggaaaaattcaccaccgcaaacagcaaatcacccagctcttcggccacgcgctcatcattcacctgcggctgattcacttcctccattacctcatccagttcctcatacactttgccgagcaccggcggaagtgtgtcccagtcaaacccggcagacgcacagcgtttctggattttataggcacgcatcagggccggcagtgtcgccgggatatcatccagcagggaatactgtgatttttcagcgcgttcggcgctttttcgctgctcccagccggaaatggccgcttccgcgccgatcccctgctcacgggcaaaaatatgcggatgacggcgggtcagtttgtcactgacagcggcggcgatatcctcaaaatcaaaacgcccttcctctttcgccatctgcgcgtaaaacaccacctgaaataataagtcacctaactcacctttcagatcgtcaaaatccgcccgctcaatcgcgtccagaacctcataggtctcttccagggtgtaaggggcgatagtggcataggtttgtgctttgtcccacggacagccgttttccgggtcgcgtaactgcgacatgatcgccagcaggcgttcaactgatacagacatgtgattaattcctgaatatgatttccgggaggataaaaaagcagacaggcgtctgcttttttcagttcagtgtaaccgatttccggccgttttactgagtgtgacgttttgcctcaatcacatccggcagctggttcagttttgccagcacacgactgagggtctggatattgtagatttccatatccatatcaatggtggcaatctgctgtttcacatcactgtggctgcgcaccccgagaacattcactttctcgttggccagaatagtggtgatatcgcgcaacaggccgctgcggtcattcgccaccacacgcaccaccagggaatagccgctggagtaactcgcactccagaccgcttccaccaggcgctcaggtgcctgctcctgcaattccgccagctgttcgcaatccgcacggtggatggaaatcccccggcctttggtgataaagccgacaatatcatcccccggaatcggctggcagcagcgggcaatgtgatgcatcaggttaccgacaccctcaaccacaatacggccgctgctctggtgagccggtgccggtttggccggcggggctttttccagggttttcagggcttcgcgatcggcctcttccgctgtcggcttgttcagtttgctttgcaggtagttcgacagctggttgatgcggatatcacccacaccaataccggccagaacttcatccagcgagtgaacgttataacgggcgatcagcagtttttccgcctctttcaggctgatatcctgcgcggccagttcgttgtccagcatctgccgcccggcgataatatttttatcgcgatcctgcttgcggaaccagttatggatcttggcgcggccccggctggtggtgacataccccaggttcgggttcagccagtcacggctcgggttcggctgtttctgggtgatcacttcaatctgatcacccatctgcaactggtaactgaacggtacaatacgaccgccgatttttgcgccgatgcagcggtgacccacatcgctgtggatgtgataagcaaaatcgagcggcgtggagccggccggtaaatccaccacatcccctttcggggtaaagacataaacgcggtcatcaaacacctgactgcgcacttcatccagcatttcaccggaatcggccatctcttcctgccacgcgatcagtttacgcagccaggcgatacggttttcgtaactgccggttttgccgccgcctgcggtaccttctttgtatttccagtgcgcggcaacgccgagctccgcatcctcatgcatctgccgggtgcggatctgaatttccagggttttgcccgccggacccagcaccacagtatgaatcgactgataaccgttcggtttcgggttcgccacatagtcatcaaactcatccggcagatgacggaaatgggtgtgaacaatcccgagcgcggcgtagcagtcctgaagacgctccaccacaatccgcacggcgcggacatcaaacagctcatcaaaggagagcgattttttctgcatcttgcgccagatactgtagatgtgcttcggccgtccgtagatctcggcctgaatgccctcttctttcatgtcgttgcgcagggtcgtgacaaagttatcaatatactcttcgcggtcaagacggcgttcatgcagcaggctggcaatgcgtttgtaatcatccgggtgcagataacggaagcagtaatcctccagctcccatttcagctgcccgatcccgaggcggttcgccagcggggcataaatattgaaacactctttggcggccagaacgcgctcgtcctcaccggcatctttcacttcgcgcagatgggctatccgctctgccagtttgataaccacgcagcggaaatcttccaccatggagagcagcatacggcggatgttatccacctgcaccgagctggtttcgtcgttatgggtggctttcagctgacggatagcatccatatccatcacacctttgaccagcagccagatagcgggaccaaaggcttcgcttatctcttcctctccgaggatctccgcttcggccagcggaaaaagcaacgctgcgcgcagactgtcgagatccatactgagggtggataaaatttccaccatctcaataccgcgcccgagcaacagcgccgcatcctgatgtccatcaaccttctgatgacagtaatgccagacctcttccagtttttcacccgtcaccgggttatgcagcccgaggctgttaatccagtgtgccgggtcaaactcaccggccggtgttaaatgcgcacttcttaccgcgaccatacattctccctactgactgaccggtggtgtctttgtgaaaagcaccatcgactccaaatggccggtttgcggaaacatatccagcatacggacagcattccggtgatacccggcaccatgcagaacctgactatcccttgcaagtgttgtgggattacaggaaacataaacgatgcgctcaggggaaagcgcaacaatatgcggcataatctcagccgctccggcacgcgccggatccagtaatactttgttaaacccggaagccgcccacggctccccggtaatatcctgcgacaaatccgcgtgataaaatgcggcattcgccagattattgagacgggcattctcccgtgccgtgcggaccagcgcatccacgccttccaccccgacaacctcaccggcgcgttccgccaccggcagcgtaaaattacccatcccgcagaagagatctaacacgcgatcgtgttttgtcagctccaaccagttcagcgcctgtgccaccatcagctcattcagggcaccgttcacctggataaaatcctgcgggctgaactgtaattttaacccggctaccgcgtaatgcggaggatgcggcgcacaaactgccacaggcggtgcaccggcactgccctgcagataaagcgcggtattgtgttcagcacaaaacgccgtcagtgcggacaaatccgcgtcactgagtggtgtcagatggcgcagcaccagcagcggtccgctttcggtatctgccagttccgcgtgaccgagttccggtgcggcggccagagacgacagacagcgctgtaagggtaccagtaatgcctccagacgcggaaccagcaccggacactgtgtgacagcaaccgttgatttgctctgcgcctgacggaatcccatggtcagctgttttgttttcggggaatacaccagcgccagccgcgcccggcggcggtagccgtactcttccccgctcagaacagggatctccccgcacgcctcacctgtttcgcgggtcagcagatacgcgagatacgccgctttggtttcccgctgcatggcaaccggaatatgctgttgctggcagccgccgcactgtccataatgacggcaggctggtttgcggcgcgccgggttatcagacaggcgtttcaccacactgcctttggcatagtgacgcttttcttccgtcagcctgacctgtgcggactcacccggcatcagatccgggataaaaacagtttttccctgaaggcgggcaatgccctgcccgagggcatcgagagagtcagcggtgactgtgacagtccgggactgccgcggggtctgacggggctgagaataaaattgcgccataatgataaaaaacgttgtctgtgaggccggtgattttcccataaagcagcgtattgaccaacggattcttcggatacactgcaaataacacgtcatggaccggtaaaaaatgcatggcgctgattataccatactgccggatagtgcctcagcactatttgttaaaaggataaatgatatttatcgttacacatcagtgctgccggtttcattatttataatgcctgataccgcaccacccgctgaataatacgcaatatcagccactgataaataataaatttacatgaacttaccggtgctgatttttttggcacaaaaaaaaccgttatttaaaaaataacggtttattgttaccggcaataaaaatgtatcctgatatgacagcgttatgcatcctgctccggccacaatccgccgaaatgcattaactccccgctgaccaggaaacgggtgatcatttcatccgccggggtcattctgtttgccagacgctcactgagtaactgcagccgcgccgcttcattcagcaggccatgctgctccagcgcgcgccgggcggcgataagcagtgtctcaaccaccgtggaaacagtcaggtcggcaaacggctcgcgggcaatcgcattaaagcgggcgtccggctgcacgctgtaattaaaggaaatggtgtcatccagcaccagcccgaggatccacgcacagaatgcgcccatcagcgccgggtccggaaccgcatcgaacgccttgaattcaatccgcccgtgttcaccctcgttacgtgccggataaataaagtcatgcggatacaccgccgagttggtcaggaaccctttacaggccggacggtgacaactgcgcagtgcggtacggcgggataaaccgccccataactgcccgttttccagcggaccgttcagcgaaagcgccaccagatacggtgcgaagaacgtcagtttttcaaccgcgtgcacaacacgggcgtcactcatttccggcacggaaatattgatatccgggccgcaggtctgcattaccagatcggcgtgacggaaagcagcgtgctcctcacggaatgctttttcccatgcattcagcggcggattaaactgatagcgcggtgaaaccggatgataagcactgattgccagccccagcccgcacgctttcaggcattcactcagctgcgcttcaatggtctgcagggaatccagcgccgctgtcaccgattctgccggtggcgtgcggatttctatccctttgataacctgggcaacgagtttgccttccggtgaaaaccgctcatcgccctcaacataccagtaaccggctttaatccccgcatcacccttatgcagcgaggcatcatccatccccgggcggttattcagtgcaggtgccagctctgacagggtaatattgtcaaaggatttaataccggcggcacttttattccggtattgtgtcagccaatattcaaattcaatcccgacccgatactctttttgcatacgtgatgtaatcccggttaatacttttggtgcgacggtatagcccctgaaacgaattcaggctgcgacaatatgatgtacatataataaataaaaaataataacgatttgttttatatttattaacatttacacagcaaatcgtttttatattccttccttaaataacagatatccgccaccgaatacagtgaatctatttcagcaacacctgcggattaatcgtagcaacaattccggtaatattgaaccggaattgtcatgtcatttgtgcgaaagtgctgtcatttatcagcagcttactgacaaacggagaaacgccggaattcttcgtaagcgtaatggtcggtcataccgctgatataatcctgaatcagccgggcgcggtaataaaattccaggatggtctgctcttcctgcggtttatctgccagtacggcaacggcttccccgtaggccgcccgctgcttgcgtgacagcttatgtaacagccgcgtttcgataaaatagtgtttgtggaagttttcacgcaccagatcggcgaaatccgcctgcggcatcattaacagcggccggtagaaatccagcaggccgttgatgatccggaatccctgtaattccagctcttccacttcgtgatgggtaaacacatatttaaacgcgacccgtttcagggttttcagcagacggtgctcttcacttttatcttccagcagcgcctgattgtaagtacccgcaaacacggcgggcagattatcaataaagcgctgcgcggtgtacggcaccagtttattggtgatataaacccgcagatacataaaaaactgatcctgcgggctgcggtgctgactgcgggtaagtgactgatacgcctgctcaacggtatcgcggaacagtgctgaatccgcagagccttccagcgcctgccactcctggcgcagataggtcaccagggtatccggggtcagaatacctttctccaccgcatcatccaggtcagcaatgcaatacgaaatatcatccgccgcttccataatataactgagcggaaaacggcagaattcgccgagctgtaattcatcacacagccgctgaatcagggtattttcagaccagtaatagcccggttttttggtgagataatcgaactcctccggcaccggatccaactgccaggcaggaagggtatatttcagcacactgcctatctgggcaaatgtcagattcagtttcagcagatgatgtgccatccgcattccctgggcattgccctcaaacaggcataaatcacggcgcagctgacggcgcagatgatccgattgcggtgagccggtcaggcgcagtgcggcaatctgacagttatcctcatccccggtctgtggctcccccagcaggttactgaaccatttctgaatcgccgcctccccgaaatgcccgaacggcgggttgccgatgtcatgcatcagacacgccatttcaaccacactctcaaaggcatccgtacgctcatccaggccgtattcttccagtttttgtgcttgtttcagctgactgaggatcgttttggcgatataccgcccgacctgctgcacttcgagggagtgtgtgagacggctgcggacggcggaattctgctccagcggaaacacctgggttttctgttgcagacgacggacagcagcagaattgataatacggccacgatcgctttcaaatgcctgattcaccagaaactcttgtgcagattcctccgcagaagcaccaaactggcggtgaaaattcagcttctttttaaaatcaataaccggcacgtcgcctccgtcttcttatccgcacgggaaaagacaccgcccgccgggattcggtgataaactgttgctaatccgttattatgcagttcaatttctattcagggagtatgacataatgaaagtcggtatcataggtgcgatggagcaggaagtaacactgctgcgtgatcagattaccaacatgcagaccctccgccacggcggctgcgaaatctataccggtcagattaacggtgttgatgtcgcactgctcaaatccggtatcggcaaagtcgccgcagcgatcggtaccactctgctgctggagctgtgcaaaccggatgtggtgattaataccggttctgccggtggcctcgcgccgcatctgaatgtcggcgatattgttgtctcctcggaagtccgttatcacgatgcggatgtcactgcgttcggttatgaaccgggccagatggcacaatgcccgccggcctttattgccgatgccggtcttatcgcactgactgaaaaatgcattcagaccctcggcctgaacgcggtgcgcggcctgatttgcagcggtgatgcctttatcaacggcgcagagccgctggcgcgtatccgtaccaccttcccgtcagtaatcgcagtggaaatggaatgtgcggctgtcggccatgtgtgccatcagtatcaggtaccgtttgtggtggtccgcgctatctctgacgtggcggataaagcctcgcacctcagctttgatgagtttctgccgctggcagcaaagcaatcgtctctgatggtggcggaaatcctcgccaatattgattcactgaaatgataaaaccaacattgcgcctcgccggactgctgtttctgctggccgcctgcggggcacaggcagcggcacagcgggtgatcgcgctctctccgtcactggcggagatggcgtatgccgccggtctgggggagaacctggtcggtgtcagcgccaatgcggattatccgccggaagcgaaaaatatcgagcaggtgtccagctggcagggactgaaccttgagcgcattattgccctgaaaccggatctgatcatggcctggcgcggcggcaacccgcagcgcccgctgagtcagctggagcatctcgggatcaaagtcgagtatttcgatccgcgcaatcttgatgaaattgcggatgatctggatcgcctcgcgccttacagcccgcaaccggcgctggcggaaaaagccgctgccgatatgcgccacgggattgacgccctgaaaacccgctacggcgataaaccggagaaactgatttttctccagttcggtcagaacccgatttttaccgcgtccggcaccaccctgcaaagtgaagtggtgaccctgtgccggggtaaaaacgtgtttgccgacagcccggtaccctggccgcaggtcaaccgcgagcaggtactgacccgcagaccggacatgatccttatctccggggataaccgcgaagtggagaatgtaaagcgcttctggtctccgcagcttgatgtgccggtgattacgattaatgccgactggttccagcgcggcacaccccggctgttaaacgctgcggaagaattatgtgagaaaataaataacacctgatatgaatatatcatgttaataatatgccgcttattatgcggcatattctctttttttattttcttatatttaattcagctttatttctcctgttattattacttattatttccgtgactattcttattccgtaaacccgagaagattccgatacccgtcagcgccggagcaggcgacaatgtcacagactgaataaaagaaacggactgtaacgatgattaaatacctcaaaggtgatttactgagatctgatgctcaggcgctggtaaatgccgttaattgtcagggcgttatgggaaaaggaattgcctatcagttcagactggattatccggtaaacgcacgcgcctatgaagccttatgcaaagaaaataaaataggcgccggtcagttatcagtaactgatgaacacggacgtaaaattattaatttcccgacccggaataaatgggattccccttccggttatgaatttatcgaaagtggcctgcgtgaactgaaagccctgatcaaaaaacaggggctgaaatccgtggcaattccggcactcggttgcggcagcggcgggctggagtggcgtcagggggataatctgatccagacacacctcggtgagttaagtgatacagaaataatgatctatccgccggtcaaatatattgatgacagcatcagcccgcatcatgtgctggtctggtggattgataactgtctgctgatcccgtcacgctacaatctttatattgccctgtatattctgcagcgcctgaacggcatgacgctgtttacattcggcggcaccatcagcacactctattccgatgatatcgatcgctatgtcaatgatctgcgcgaccggattgctcattatggtattgattttaatactgtgatcgacgtgcagattaaactgaaccgcgaacacccggaaaacccgctgccggtctttgatcactatctcaaccgggtcatggggtcgctcaatccgctgacctacagcgaccagtctctgctgctggcgatgatgattgacggattactgcagggtaaggcgattaaagagatcaccaccattctgcgtgagcgctatcaggcgcgggatattgattttgtgctgttccaggcgaaaaacggcggcctgctgaaagacaatatcttaggggatgtgattctgacccgctgataaaaaatccggacgctctcacgtccggattttttgtttcatactgcgtgttacgcgccgagtgagaagaacaccacacgaccgaccgcttcaccggcaaatacacagatggccgccagagccatcatcagtgtgccgttagtgatctgtgcatttttctgacacagcagacgaccggcaaagaacatccccagcccgatcagcaccacacggatgatattcaggttcagcagcccttccggcatggtacgcggtgtcatccctgcgtagaccggctcaccgatattaccgagcagagacaatgcgcccagcagcatcagcagcagcccggccacaccggcggcaagggaaatcttcaccacacgctgaatcagcacatcctcacgggcaaagcccagcgcggtcaccagcagcagacctgcgatcatcccgccggtcagcagcactgtgccgaagaatccggcataggtaaacagcccgccccacaggttaaacagggtattcgcatacagtgcggacatcgcatacatatataccagccccgccgccgcacttaacagcagcaggaaaccgttcaccttctgttttaacagcagcagcgcgacactgaagaacagcagcgccatataaatggcggtcgcccagacttcacggctcatccacgaggtcgagacgtgcagcatggtgtaaaacatatggaacggattccccatatggaacagggagccgagtaacccgacacagcccagcaggaaagaagcaaccagcgggacacgcacccatttcatcccggtgcgggcatccgtgcagccgaacagacggaaataacaaagcagcgtgatcaccagacagccgaccgaagcctgcataaataaggtgaatataacaagaggcagttcatgcatgataattctccttatcctttggtgccgacaaccaggttcggccgggtaatggatgagcttggcaaaccgccgatatcggcattggtgccgtattttttgcgcagttcgctgataaggccgaactcaatggcgcgcatcggacaggaatccacacacatcggattgccgccctgctcccgcagatccagacaggtatcacacttggtcatcatgccgatcgccggatcaaactgcggtgcttcatacggacaggcccaggtacagtaacggcagcccacacacttatcatgatccaccagcaccaccccgtcctcttcccgcttatgcatcgcggttgtcgggcaatggctgacgcactgcggatcgtcacaatggttacaggcaatggagagatgccagcggcgcgggcgcggatattccccggcctcgatatcatacacacggcggaaattacgcccgacttcgagatcgttcttatccttgcacgccacaacacaggttttgcacccgatgcaggcggcgacatttatataaaatccaacttggttatccatgtctgtgccccttatccgataatccgctgcggcagacgcgcatcgtcagttaattgctcaccgtgccatttttcgatattacacagcatcgtgttccacccggaggtgcccagtccggtcggtacctgaatggtcagggtgttatccgccccggccatatcaatcccggtggtttcatccacattggtccagctgccgtgcggcagtgcaaccacacccggtttcatggtctgggtcaccagcgccggacgcagaattttgccctgcggactggtcacaaggacggtttcgccctgtttaatatccagacgtctggcatcagaagcattaatgtagatcgggctcggccactgctcgcgcagccacggcacgttatccagggtactgtgtgaacggcgcagatagtgcgggttataaacctggaacggataatcccctttctcttttttactgaaatctttaaagctggcttcatagccgctcgctgacgggatgtattcggcgatcggcggtaattctgtccagccgcactctttcgctttctccaccagagtttcgcagtagatttcaaacttaccgctcggcgtcggacgcggattcgccgccggatcgcggataaagtcctcatacgcgatatagccgtaattatcatccggcgtgcgttctacctgatacttccctttggtcaggaattcattcagcgtgatgcgcccttcctgtggtgtgccggttacctgccactcatcaatatcggcctgtgtgatggtaaacagcggtgctttggtcacaccgtcttcggcaataatggttgcaccgttgagtttattgaagaactgctgtttttcggagatcgggaagatctcgtccacattgacacccaggcgcttacccagctctttggcgatccactgatcgcttttcgcttcatacagcggctgagtcacattcaccgcagcaatgatgacttcacggttactcgggttaagaatggttccctcgcgctcccattcggttgtcaccggcaggatcacatcggaatatttcgcgcaggtatgcgggacatacgctgcggtcgcgataaattccacaccgctgcggtaagcctcaattccctgcataatgttggcgcgggtctgtaaagtggcgttaaacgggtggaaaatcatctgaatattggcatccacatcccccacgccgcgctgacggaattttttctccagcagggcgcggttcagttcgttgtggttgattttcagagtgaccgggtttttcactgccggtaagccattcgcaccggccatcaccagacgggtaccgttgttcccggcggcatagtgacaacacgcaccagtcatgcggcccggacggcccatatgcccggtcataaatccgagtgttgagaatgcctgaacccatccctctccgttatgaatacgtgccggtgcccagccggttaacagcgccacacgctgtgtgccgccgatctgacgcgccagcgagcggatgtccgatgcggaaataccacaaatgtccgccgcccattccggagtggttggcttgccggtgtaggtgccgagcagataatccttaaagtttttcttcggatccgcccctgccggcatattgctctcatcaaaaccgacagtgcagcggcgcaggaattcccagtcgatcagcggattctccgggctgtccatctccagcagtgcatgcataatccccagcgccagcgcgtggtctgtccccgggttgatcggataccagtccgcatccatcagctctgcggtggcggtatagctcgggtcgatactgataaaacgtgccccggcttttttcgcctgataatagttataagtcgggctgcccgggctggaccacgccgggtttgcgccccacatcacaatcagctgcgagttgcgcatatcaaaacggtcattggtgccgaaggtgtagaacccttccagcaggcccagatgggccggggtttcaaaccatgcgccccaggaggtggtaccccagtcaccggtaaagcccccggcggcggagaacacactctggaaatccgtaccgttaccgccggtaacccagagggattcattgccgtattgcccggtgatacgtttggtttcggaggccacaatatccagtgcctcgtcccagctgatacgcacccactggtcacgtccgcgcagggttttgtccccggtgcccagtttttgcgtttcatcggatatttcaggcgatcggccccgaacacctgtttgcgctgggaacgcccgcgcagacacccgcgctgctgcgggaagtcaggggaatccgccaccacatcatcggttttttgtctgaccaccacaccatcggccaccagtgctttgttaacacagcgcccgccgcagttatgccagcaggcgacaggtttccactgccctttggcggcaggcgctgccgccgggggggtctgtgccggtgccggggtggccgcgtgaagttgtctgcttaacggcagtgccgccatggcggatgccgccgacgtccatttcagaaatgaacggcgggttacgccggttttctgtctgtctgacattgctcttacctcatcatcaggtttttaaattattattgtaagtttattaattcattgattttcttataatcactccggacaaagacttccagaagtgtgctgagctgacgataaaacgcggtctccgcgtgattattcagttcacggcaaaacggcgtgataaacgccagcagatgtgcctgcataaagtcagaggaaacggccagcggcgcagtgatgcgctcacacatcgcctgttcccggtcgagctcctgtgacgcctgttcactcagtttccagaggaaatcaagctcatagccgatatgatctgccgcctcatattctgtttccggcagatgaaaaccgttttgctgataaaaggttttcacattcagggtactttcctgaaacagcagtttgtcgcgggagacataaactgactcccacggcggcgcaggcggcgactccggcccgataaacaggcgcgtgaaatcccagtgcagagcctcaaaatcagaggcaccgcgtttaagcatgcgggtgttcagatcatcctgcatggcatcgagcgcactctgcatggcggggagtacatcatctgccggaaacagtgacagcccctcatcacgcagataaaccagcagttccgctgtcggttcgtccgtcagcagacggcgcaggacgtcataagcaaactgacgcgcatacagataatccggatcccggttatcactgttcacacatacctccgtggatatcgtcgggcgaaaattcagcgggcgtggtgaattccacccgcacttctttaatcaggggattgccctgctcatcggcttccgcaatatgggatgtcagcagaacaggcagttcaggggtgtctgtcaggcgcataatcgattcaggactgaattgtaaaaaaccgtgcaggagatcctcacggaacggaacacccgccttacgcagtgctgccgcgacggcagcacagtcctcaccgaacaccttggcgcttttgaaaaagtaatcacgggaagaaaacaggtaatacggctccgcgctgataaatgcattactctgatacacctggccggtgtgtttgttctccagcgagcagtaatgcacaccgacggaaagctgattttcaagggcatatttcagcacccgtagacacgccagttcgctgtctgccaccgccagaccgcctgcgtaccagtagttgtaatagacttcataagggggatttttcagggcaaagccccgttcctgataggcagggctgttggtcagcgggaaacagaattccagcagattgatgccgtccacgccgatagcatccagcttcagcagcaggtcatacatctgatcctcgctgcccgggatcaccggcatttccaccatcacatcggggaaaatctcccgtgccagcgctatccggctgagaaccttttcaattttctccggcggatcatcaattttgatactgaaacgtacctctttcagaccggcttccgccagtgccagcgcggtattgcgatccagcggatcaccggcggtgtacagccgggtatgaacgccgggcagtttcgcctgcactgtttcaaaaaagcggatactctcctgacgaaacaacaacggctcgccgccggtcagggcaatatgggtgagcggatacccttctgcggcaatcgcattcacctcaccaatggcatcccgcatctcatgctgaaaaccgtcgtaattttcctgattcggattgaagcagaaataacagtcgcggtgacatttcagggataaaaatgtggtgtaactgccctcgccggtgcggcactgcacacaggcggatgacagccagcggctgtggatgcttttaccgttgttggcaaaaaccgcacccagtgctttcacctcacggcgcagtgcgtccgtttcggcctgacgccggtacggcgattcaaaagacaatccgtactgcgcgatagcctgctgtgtctgtttttcaatatccagataacgcagcacataccgctgcaatacagcgttgttttgtacggccggggtctgttctgtcagcgggtaaatcatggaagattccttaacgtacgctgcggaaaatagtgcgccgtaaagtcgtattatttttacactttcagtgtaagtgaatggaatataaagatgttgagcaggatcaatattatttttcacgtcatgtaattaaacggatatgcttatctgtgcaattatatttatgcaggaaaacagaaacaaaaaaagagaaaacgttgttaaatcaccggaatttcaaaacataaaagcaggaaaaaacacacaaccggttgaaaataaaaaattgccggaatagcgccgaacacaaaacataaatctgcagaaatattattttctgcattattttgttacatttcaggaaaaccggcaaaagcggaacaggaatcactctcagttttccggcacataatactattgcggtataaatctgatttatacttacacgtttttccgttattttagtttgttaacatggcatgctgtttttttaagggtataaaatgaaacaatgtaatattcttctgtccccgctgctgttactgacagccggaacggtatttgcctcaccggcagcggacaataatatcgtaccctcacagagaatcgtctataaagacgatattgcctatcagcgtgccgatcaggcctttagcggatctgcggtaaaatattgtgtccgcaatgaaaataatcagaaaaccgtaacggataatgcagagcattattatgaatttcacgacggagagctgaatggcaaaaccattgattatgattgtcacagcggcttaattaccgaaatccggcattataaaggtaataagcaatatggctggactatccgttatgcctggccgggaatgccttatgctataacgtggtatgataacgactatctctctcccgtcccggaaaataaaaaactcaccccggatgattttccgccggtttattatcagaaatcagataacactattaatgttaatacactcacatctttggatgaactgtattatcagatagtaccagctccctttacgggtactacggctgaatactgtgttgtctatgatgagaacgataataaatccgaagataaagcaaaaataaaattaaccgctgaatataaaaacggccttaaagacggaaaagaaaccagctacgactgcggagacggaaaagtaagcggatatacagactaccggcagggcatgaaaaacggtattcagatagcctttaagacagacggcagtgtcagaagcaaaatacagtatcaggatgataaaaaacacggcgatgctgaatactataccgacaatatcctgactaaaaaagagcactacaagaacgatgaattagacggccggagtgttgaatataacaaatacggcgatattacttattttcgcgattataaagacggtctcagtaacggattttattttgtgaacaaacgcatgacaaaatacatgatgtcagagcgtaataaccggagacacggctggacttacgattatgatgatgacggtaatgtaaaccataaaaactgttctgtaccggataaaaataacgtcacatatgatgattgtgccggaatgccgctgccgccggaaaaaatcacaccggtaaaccgctgaaccggatgttatataatactgttacggcaggcgcgatatatcacttaatatcgtcgcctgtcagcagttggacatcacagggtttttccgtggtgaacctgaccgttaatccgttagcgccggtcatgccggtataggtatcgtccgggtcacacagattaataattttatatctgatgaagtcccgcagtttcccttctttggtcattaaccggaatgtttcgccgtagcggtagttatggtgaaccgggataagatcataatcgccataacggacatccccttccaccaggaaatgtgtgctgaacggataaccggtatatgccgcaatcagcatacttttattatcattatatacactgaactcatccggtttttccagtactttccggcctttaaaatccaccagaatataaccggccaccgagccatactgtacatcatcaacttcagatacatacactttggtggttttggtttccgcctgtgatatcaccggaaataacaatgcacaggtaaccgccatgccggtcaatatattccgtttcatttcctgctcctttcatcagccggtaacggggtttaccgttattatttatccgttataacacagataaaacagaataaaaaaacgggcgcgttgaagtggcgcccgttttttgtctgcggataaatcagatactgaaagaagaaccacagccacaggttgttttggcattcgggttggtgacgataaaccgcgagccttccagcccttcggtataatccacacaaccgccgaccagatattgcaggctcatcggatcaaccaccagcgccacgccttctttttcgatggtcatgtcgccgtcattgatggcatcatcaaacgtgaagccatactggaaaccgctgcaaccgccgccggtgatatacacacgcagacgcaggttcggattttcttcatccgcgattaagatttttacttttttagctgccgcatcagtaaattgcagaggcattgctgaatcatcgctcatttattactccagactggccgcgaccagtaaacacacgcagaagctgaccgcttccggacactactgctgattatccaccacctccggcaatcgttcaagtttcgtcacacagaaagcacagtgtccacactattaataaggatatagttatcatgaggataatgcgataagttggattcaccgccgctctcctttacaatagccgcaatttcccgctcaccgactgacaggagtcctgcatgagccgttctgaaaatctctatactgaagcacaacattttatcccgggtggtgtgaactcaccggttcgtgcctttaacggtgtcggcggtacgccgctgtttatcgagcgcgccaacggggcctatatttatgatgtcgacggcaaagcctatatcgactatgtcggctcctgggggccgatggtgctggggcataatcacccggccatccgcaccgccgtcatcaaagcagtggaaaaagggctgagtttcggtgctccgactgccgacgaagtggaaatggcgaaatttgtcaccgaactggtgccgtccatggatatggtgcgcatggtgaactccggtaccgaagccaccatgagtgcgattcgtctggcacgcggctacaccgcccgcgataaaatcatcaaatttgaaggctgctatcacggacacgcagactgtctgctggtcaaagccggttccggtgcactgaccatcggccagccgaactcaccgggtgtgccggcagattttgccaaacacacactgacctgcacctacaatgacctgagctctgtccgtgaggcatttgaaaaacatccgcacgatatcgcctgtatcattgtcgagccggtcgccgggaatatgaactgtataccgccgtcagcggatttcctgccgggcctgcgcgccctgtgtgatgagttcggtgcgctgctgattatcgatgaagtgatgaccggcttccgtgtcgccctcggcggtgctcaggcgcattatgatgttgagccggatctgacctgtctgggtaaaattatcggtggcgggatgccggtgggtgctttcggcggccgtggtgagatcatggaaaaactcgctccgaccggcccggtttatcaggcaggaacgctgtccggtaacccgatcgcgatggcggcaggtcttgcctgtttacatgaaatcgcccagccgggtgtgcatcagcgcctgaccgaactgacggatatgctggcagacggtctgtgcgaaaaagcccgtgaagcgggtattccgtttgtggttaaccatgtcggcgggatgttcggcctgttctttaccgatgcaccggcggtcacctgctatcaggatgtgatgaactgcgacgttgagcgctttaagaaattcttccatctgatgctgcaacagggcatttacctggcaccatccgcctttgaggccggatttatgtctgtcgcacacagcgacgaagatatccgcaaaaccattgatgcggccgcttacgctttctcagagctgtaatgcccgcataatctgtcacgcccggcatctgcccgggcgtttttgtttttcagcttgctttctgcttttttctgcttaaaattccctctgttagcccactctttttccgtattaccgcggctgctgaacccggtaattcaattctgaaagagagaaaaagatggataacacccgaaaccgcgcctggcgcagattcaaaaaccgtatcaataagtcccgtgatcagaaacatgatgcatcgttatatgattatccggcagaaaaatgctggaaaatgatgtacggacgcagtgaaaagatgatccgggcggctcagttaggcatggcatatccgcaggtcagtcaggcagttctgacgcgtaatgcctgtgatgagaaagaaaaagcatgaatatcctgtttatctgcagccgcaatcaatggcgcagcccgactgccgaacatcactggcggaatcatccgcagtggtctgtccgttcagccggtaccagccgcaatgcaaaacgccgggttaccccggcgttacttcagtgggctgatgtggtttttgtgatggagcaaaaacataaaaaccgcctgaaagcagagttcacccgcctgctggatcacaaaccccttcatgtccttgagatcccggatgattatcattacggtgatccggcgctgatcgccctgctggacgatctggtaccgccgtatctttccgctgactgaatcttaccggatcagaattcccgctgctctgccagccagccgttaaaatgaaccgagcactcatctttgtcagccagtccggaggcgataaagatattcttcttattatccctgttcacatacgtgatccgcaaaaccaggttatacggcggattaacagagaacagttttttataggattccggtgagcttttggatttatctgtcagggaatcataggtttcctgcgcaagctgagaaatcagcaattccccggccggttgagcagacagaatttctgttctggttttgctttcatcaatctgtttcatatcaatgtgaagcgtatgctccatcactatctgcatttcccggtcaaccgagcggccgggtttactgcattcaccgacaatatccggtgcggcaaacaacggcgcactgaccagtgataacagcagcggcgataaatatttcagtttcattcgacaatcaactccgtatcaccactttccgcataaaactgatgcacgccgttcagtgaaaatgcccgtgttgcaacatcgtatttccatgccattttgaatattccttatccgttaaaagcaatcatcatgataaaacttttacattttcgaaattataagaataatagcacacgaaagataaattaacagtgacatacggttaaccgggaatccggctcagaaagaaatacgtaatacaacagataaaaaaatacgcctccggagaaagaggcgtataagattacgagcaatgtaatcaaaccgtataactgtgaatattatgcttttataaatgattgcacggtggcaagcgccagccgggtcagtgcggaataaaacggactgtgtccgtgtgtatccagccgctgcgcataacgcggcagccagttcatcaggtgctgactgagcagtgtgttcaccgccgcgctccgcatttcagatgccagtaccgccgcctgaaataaaatcagcccgatatggtcagccggttccggatacggggtattcagtttcagccgctcctgttttaagaatgcactcagggcaagggtcgaatccccctgcagtaatccctctgcatccagatacactgagccccagggcggagccggtaacgctcccggcccggcaaacagagactgccatgcggatttcagtgcctccgtgccctccgcagccgtgcggctcagttgtgaacacagtgtattgtccacctcacacggccactgctgtgcaaatcccggcagggtaaacaggcgcatagcggcccggttactgtcatcatccggcgggaacagataacagatccccagcacgttaaacgcggccgcatagtgagctgttttactcattacatcccccgtcagacatgaatgtaatagaacacataacgcaacataaactctgccgcgatggtcagcagacagccggtgataaacccggcgcagaccggtaaaccactgtgtgcttttttctgtgcccgcaccagagatataccgcagagagccacaccaatcaccgccgcaccccagacaccaatccgcagcccggcaatactgtcatacgcttcaatcggtgacagcgggaatgtgactgatttgtgtgtcagctgtgtacgggtcaggtaatccgcataaaacggctgatacagcaggcgcccgatcagacttaccgccatcactccccacagcagccacagctgtgataatgataatgtgtctgcgggcagtgtaatcccggcccggtgtccggctttccggatcaccatcaccaccagcacaaacagggcggcaccgagtgtcagtgttgtgccgtaaaacatcagataggtgttgatatcattccaggtcagaatcgaggtgtaacggtaaatcgatgccatacaaaaaatatcagccagcccgatagccattgcgccgccgtataacagaaaagagaattttcctgtcttccacagccagagaaaactgacaccgagcgcaccgacaaacgcggccgttactaccacttcacggctgagccaggcactgaacacattattaacggcattcggtgcattgagcggcacgccgaggtgggtaattgacgcgaccgagccagcccccgcaatggtgcagataataaaaatcgtcagcatcataaagcgcttaaaactgtctgccgggaggcagcggctgagatgcacggcaaacaccccgctcacaacgcacagccccgccgccgcattcatcatgtaagtgaaaattaaaagtgaccactcattcatttttcttttctctcactgttcatgtcatcaaaatttgcgccctgatgcggattgatcaccagattcggatgcgtgattgacggatccggcaaacctgtcacgtaatcgagtgagccgtatttcgcccgcagctcttcgattggcccgaactgaatcgccccgagcggacaggtgctgacacataccggctgttcacctttctgctgaagatcaatacagaaatcacatttcgacatctgtttcgtttccggattcatctgcggtgcgccgtacggacacgaccacgcacaggcaccgcagccgacacatttatcggtattgaccatcacaatgccgtccccttcgcgcttatgcattgcggttgtcgggcagttgcgcacgcagatcggatctttacagtggttacaggagatggagagcgtgtaggcgaacacgttattaatcagcgcaccgtttttattgcggctgtagccgccgccggtcatttcatacacgcggcggaagcggcggccgacatcaagattatttttgtccttgcacgccacctgacacgccttgcagccggagcagcgggcggaatcaatatagaaacctaactgtttgtcactgactgccggataaacaatgaatttgctcatgctttttccacctcaactaatagtgtctggtgcgcgttgccatgggcgagcgcggtactgcgtgacgaggtgagcacgttggcacatccgccctgatcaatgccgttgctgtccggctgccaccaggcaccggcctgtaatgccaccacacccggcataatgcgcggtgtgatttttaccgggatcatggtgataccgcgatcgttatgcactttcactttttcaccgtcactgacgccgcgatcagccgcatccgccgggttgatccacagctcctggcgctgcacttcctgcagccacgggttggcaaactgggtggagttcgcgcggttgcgccctttccaggtgatcagctgtaacgggtatttcgcggtcagactgtcttccggcccttctgttgccggaacataatgagacagcgccgggatctccggattgtgcatgtcatacaggcgtttggagaaaatctcgattttgccggacggggtcgggaacgggttattttccggatcctgaatgttctgctcaaacgcgacattctgcgtatgcggacgatgcgttaataaatgacggcgtttaaccagcagctcagcaaatgagggaatgttatcttccgggcgcttctgtgccgcgtcattgacgagaaactctatccagtcgcgatctgtttcatgaccttcggtgaaagcatcacggacacccagtttctctgccacttcgcacagccagtcataatcagtacggcgttcaaactccggctcaatggctttttcagacaggatcagataatcgccgtaactccaggtgccgccgatattccagcgttccagaaaactggtttccggcagcagcaggtcagcatatttcgcactcggggtgagatagaggtcactgcagacgataaattcgactttcgattcatcctccagcacgcttgcagcatgaagaatatcggtgttctggttggtcatgtagttacccgccatcgagaaaatcattttgatttcggtgccgagtttgtctgcatttttcagtccgttctccggcgtcaccaggtttttgtcctcacacgcctgcacccagttggtgatgttgattttggctttgaccgggttatcaaacagctttggtccggcgatggttttacgcagttccggactcagcgccatgccgtaacccgctgcccagccgccgcgcacaccgacattaccggtaatcgtcgccagcagcgtggctccgcgcgcactgcgctcaccgcagatatgacgctgcggtccccagccctgcatcagcaccgccggtttggttgtggcatattcacgcgccagctgacggatagtgtcccccgggactttggtgattttctccgcccattccggggttttggccatgccgtctttgcggccggtcagatacgccaccagcgattcattatccgccacgccttccggcatctgatcttcactgaaacccagagtgtatttatcaataaatgtctgatcgtgcagattttctgtcacgatgacatacatcatcgcatccatcatcgcgttgtcggtggtcggcagcagcgggatccactgatccgccagcgaagaggcggtatcggaatagcgcggatcaacaacgataaatttggtgccgttctttttcatcttctggaaatagtggttactgtgcccgaaaattgtttcgttcggattatgtccccacaggatcaccagcggcgtattttccagggtatcgagtgtgctgccgctggccgccgtgccgtaggtatacggcgtggccgccatggtgttgccgttactgacggaatgatagttttccagaaagccgccggtcaggttaaacaggcggcgcagcatattggcgccggaaaaaatcccgccggtcaccccggtactcagactgacaaagcgcgatgccggaccgtatttgtcactgatgcgctgccattcggcggcaatcagactggtcgcttcttcccagctgatgcgttcaaaacgaccctcaccgcgcttaccgacccgcttcatcgggtatttcaggcgatcaggatgataaataaatttccggtagccgcgtccgcgcacgcaggcccgcatgatcggcatctcttcattcagttccgcatccggccgggttgtgatgcggatagcttttccgtctttgatatgagcgcggatatcacatttcccgccgcagtcaaaactactgcaggtcggtacaatgcgcacgccgtcatccgtctgatgaaccggaatatgtgccggatcggccggcgcggatgcaatactttcggatgccagaaacggcaccgcagataatacagaactgacctgtataaagcggcggcggcttatttcgccgggagcgccggatttttcattatcatggccggattgatgactcataatggatttaccccgggtgagaaacagagtgcggtatttaaaacatcaggaaataataaatattatttaattttaaatgcccggaaataacttcacgccaccggtaatcgcttaataaccggaaataattaaaatctgtataaacagaatggcggcagcaaaatagtaatggattaatatattgccgccatgcgcaaatcagacaacgacatttgaattccggcctgtttccggttactgttaactgaacgttttatgtttgttaccgtaataatacagatgtggcatccgcgtctgttattgtcacaaaagccctgttttgcggtggcgggatctgatataacacccgccggtttttactttcagtcagctacggagcgcggcactcatgagaaatattccgttaaaaagcgtggataatatcgcgcgggatgtcattgcgctcggcaccgattatctgcccgataccctgctggaataccacgcccaccgccgggcacagtttttatatccggccaccgggctgattgaagtcagtaccgcagacggtgagtgggtgatcccgccatcctgcggggtgtggatcccggaacaggtcgcccatgaaacccggatgctgaatgtcagcacgcgcagtctgtatatcgaaccggcggcaaagccgcgccacgccgtcagttgtgaggttgtgagtgtctccccgctgctgcgccagttactgctggaggcggtggatatcccggcggaatatgatattcaggggcgtgacggtgtgctgatgcagctgatcctctgcgagctggcgcgtatgcccccgctgccgtttttcgcgccgatcccgcgtgatgagaagctcggtcgtctgtgccgtgagtttatgcgcaaaccggttatcacttcacagccgggggagtgggcagagcagctgcacaaaagcgagcgctctttcagccgttttttccgcacccagaccgggatgtcattttcagaatggcggcagcaggcgtgtcttctgaactcgctgtctcatattctgtccggaaaatcgattaccgaagtggcgtatgagctgggttacaacagtgcgggggcattctcgattatgtttaaaaaacagatggggcaatccccttcccattttaaaaatgacgattcggatatccgccatttttaaattgttttttaacaaatataatcttattatgtgccgccggtgaaatttgacttatttttcttttttctccggaggcttatttcttgaattgatctgaatcaatattcttcatttttcctaccactttgtgattatttacaaaacactaaaaactccaattaataattattaaacatcaaagttcactttcattgatttcaggcaatataaattcaacctttgctgatattctcctcacgattttttacaaataaataaaaaagaggatgcgatgaatttcagccgcagacagttctttaaggtttgtgccggcggtctcgccggaacaacagccgccgctttaggctttatgccgtcagtagcaatgtctaatgtccgggaatacaaattactccgttcaaaagagacccgtaacacctgtacctactgctccgtcggatgcggattactgatttacagcatgggtgatggtgccatgaatgccaaatcagcgattttccacgtcgagggtgaccctgatcatccggtcaaccgcggggcgttatgcccgaaaggtgccggtctgctcgattatattcacagtgaaagccgtctgcgttatccgcagtaccgcgcgccgggttcagataaatggcagcgtatcagttgggatgacgcttttgagcgtatcgcccgtctgatgaaagccgaccgtgatgccaacttcattgagaaaaacagcgaaggcaccacggtaaaccgctggctgaccaccgggatgctctgcgcctctgctgccagcaacgaaaccgggatgttaacccagaagtttacccgttccctcgggatgctggcagtcgataaccaggcgcgtgtctgacannnnnnnnnnnnnnnnnnnnnnnnnncaaaaacgccaacgtcgttgtggtgatgggcgggaatgctgcggaagcacatcctgtcggtttccgctgggcgatggaagcgaaaaacaacaatgatgccacactgatcgttatcgatccgcgctttacgcggaccgcttccgtggcggatcactacatccctatccgttccgggaccgacattacgttcctttccggcgtgatcctgtacctgatggaaaacggaaaattccacgacgagtacgtgcgccattacaccaatgcaccgttactggtgcgtgaggattacacattcaaagacggtttattcagcggctacgatgctgaaaaacgccgttacgacaaaaccacctggaattaccagttcggtgaagatggctatgcgctgcgtgacgacaccctgcagaacccgcagtgtgtgtggaataagctgaaagaacacgtcagccgttatacgccggagatggtggaaaaaatctgcggcacgccacaggcggatttcctcaaagtctgtgagattctggcctccaccagcccggccaaccgtgcggcaaccttcctgtatgccctcggctggacgcagcataccgtcggcgcgcagaacatccgtaccatggcaatgatccagttgctgctcggtaacatgggtgtggcaggcggcggcgtgaacgccctgcgcggtcactccaacattcagggtctgacagacctgggcctgctctccaccagcctgccgggttatctgaccctgccgtctgagaaacagactgatatcgacagctatctgaaagccaatacgccgaaagccacgctgccgggccaggtcaactactggagcaactatccgaagttcttcgtcagcctgatgaaatccttctacggcgatgaagcaaccaaagagaaccagtggggctatgactggctgccgaaatgggatcaggcttatgacgtgctgaagtatttcgacatgatgaacaaaggcgaaatcaacggttatatctgtcagggctttaacccggtcgcgtccttcccggacaaaaacaaagtggtcagttgcctgagcaaactgaaatacctggtaaccgttgatccgctgagcactgaaaccgcaagtttctggcagaaccacggcgatatgaatgatgtggatccggcatccattcagaccgaagtgttccgtctgccgtccacctgtttcgcggaagaagacggctcgattgctaactccggccgctggttacagtggcactggaaagcagcggatgccccgggggaagcccgccccgatggtcagatccttgccggtattctgtggaaaatgcgcgaactgtatcagcaggaaggcggtcagggtgttgatcagctgatgaaaatgtcctgggattacaagcagccgttcaatccggaatccgacgaagttgccaaagagaacaacggcgtggcccttgaagatctgtatgacgccaacggcaatttacaggcgaaaaaaggtgagctgctcagttcctttgcgctgctgcgtgatgacggttcaactgcgtcctcctgctggatctacaccggctgctggacagaacagggcaaccagatggcgaaacgggataacagtgacccgtccggcatcggtaacaccctcggctgggcctgggcatggccgctgaaccgccgtgttatttataaccgcgcctcagccgatccgcagggtaaaccgtgggataaaaaccgcgtgcttatcgagtggaacggtaagaagtgggtcggtaacgatatccctgacttcaacgcctctgcaccggaagccggcaccgggccgtttatcatgcagccggagggtttaggccgtctgtttgccatcgataaaatggcggaaggaccgttccctgaacactatgagccgtttgaaacgccgattggtaccaacccgctgcatccgggggtgatatccaacccggccgcccgtatctttgaggacgacaaaaatcgtctgggcagtcacacggagttcccgtatgtgggcacaacctatcgcctgaccgagcatttccatacctggaccaaacatgcgcggctcaatgctatcgcacagccggaacagtttgtggaaatcagtgaaaccctgggcgcagccaaagggatcagcagcggcgataaagtgagagtcagcagtaaacgcggctttatccgcgcggttgctgtggtcacgccgcgtctgcagacactgatggtggacggtaagccggtcgaaactgtcgggatccctatccactggggttttgagggtgccgcccaaaagggctttatcaccaacacactgacaccgggagtcggtgacgccaactcgcaaacgcctgaattcaaagcgttcttagtcaacatcgagaaggcgtaaggaggaattatgtccatgcaatctcaagacattatcaaacgttctgcgaccaacagcataacgccgcctcctcaggcccgtgacgacaagtttgaagtcgccaagctgatcgatgtgtccacctgtatcggctgtaaagcctgtcaggtggcctgttccgaatggaatgacatccgtgatgaggtcgggttctgtaccggggtttatgataacccgactgatctcagcgccaaatcctggactgtcatgcggttcagcgagaccaaagagaacggcaaactggagtggctgatccgcaaggacggctgcatgcactgttcggatccgggctgtctgaaagcctgtccgtctgccggtgcaattattcagtatgccaacggtatcgttgatttccagtcagaacactgcatcggctgcggctactgtattgcgggttgcccgttcaatattccgcgtctgaatccgaaagataaccgggtgtacaaatgcacactctgtgttgaccgggtcagcgtgggccaggagcctgcctgtgtgaaaacctgtccgaccggtgctatccatttcggtaccaaaaaagacatgctggaagtggcggatgagcgcgtgcagaagctgaaaaaacgcggctttgccaacgccggggtctacaatccggacggtgtcggcggcacacatgtgatgtatgtgctgcagcacgcggataatccggagctctatcacgggctgccgaaagatccgcagattgatacaccgattgatctctggaaaggggtactgaaaccgctgtcagctatcgggtttatcgccacctttgccggactggtattccactatgtggggatcggcccgaacaaagagacggacgatgaagaagaggaggaaactcaccatgagtaagaaaagcaaaatgatcgtccgcacgaaatttattgatcgtgcctgtcactggacggtggtgatctgctttttcctggtctccttatccggtatcgcgctgttcttcccgacactgcaatggctgacggaaaccttcgggacaccggcaatggggcgtattctgcacccgttctttggtgtgctgattttcgtcgtgctgatgtttatgtttttccgcttcgttaagcacaacatcccggaaagagaagatctgccgtggattaaaaacattatcgaagtgctgaaaggcaatgagcatcatgtggcgcgtgtcggtaaatacaacgccggacagaaaatgatgttctggagcattatgagcatgatcttcgtcctgcttgccaccgggatcatcatctggcgtccgtactttgcgcactacttcccgatgtggatgatccgctggagtctgctgatccacgcaacggcggctatcatcctgatccacgccatcctgatccatatgtatatggccttctgggtgaaaggatccatcaaaggcatggtagaaggtaaagtcagccgccgctgggcgaagaaacatcacccgcgctggtatgaagaagtggaagccgaagaagctgctgaggaagcgaagcagaaacagtaatcgtcacctgcttttaactgtgaactgcgccgcaaacgttcaatgcaacgaatgcggcgcagtttttttatggtttaatttttgtccgggataagacataccacacagtaaaacggataaatcagcagaatgaataggtatcatgtatcaaacagtgaagggaaatttgctgccggttcaggtgatgatgttttggaaaacaagcttcagttgtctgaaagcaatgatattaatgatgccgaattagtgctgctggaaaagctttataagattgttttcagtactgcatttcctgccggaaaaattaccgtaccactaataaaacaatggcaccgtcagtggctggggaatatctatgactgggccgggcaaatccggactgttaatatcagcaaagataacttcatcttcgcgcctgcaggcagaattgcggggttgctttcacaattcgaaaaagaatttctgagcaggtacacgccctgtacaggaatgaccagagaacaactaactgaagccatcgcagtcgtacacactgagtttattctgattcatccgtttcgtgaaggaaatggccgtttgtcccgccttatcgctgatgttatggcagttcagagtgggttaccgcctctggattacagctgctggaaacaacatccggcacattatattgctgctatccacgcagcattaaatctgaattatgaaccaatgaaatattgggttaatcaggcactcagcaaaaactaaacagccagtctgaggtgggcatatttttcacgtttttctttcagagcctcagccagtttctgaggctcctgtccggtttcaaccgctgtagatgttacaacagcccggattaactgttcactatcaggcattatcagcgtctgtggcgttttcttactgtttttcatttttcctccggacctatatcgcatacttgatcataatgccattacacctaatccgcaatggtcactaaaaaaacaaaacccgccttgcggcgggttttcagtgcttctcacagaacaggagattactgttcaaacatctctttcagccagccgggggcttcttcgccctgctgctgagccggggcctgctggccgcatagcgcctgtgcgtccgttgtccagaccggtaatgtccgggtgacacccacgccattgcagacaaagctgccgtccgcattgaccgacatctctgcaatatcttccggcggtgtgaggttcagcgccagcggcggctgattgtccagataacggccatagagcaccagggcaccggagccgccgtacaggccggacgggctgttatcatccagtcccatccaggagacggtgacttctttgccgtcgataccgacaaaccagctgtcgcgcatcaggttggtggtcccggttttcccggccagatggtatttaccgaatttcgatcccagacgacgggccgcggtaccgcgttccaccacctgctgcatcccgtacagtgtcatataagctgcctgcggagccacagcgcgctgtgcctgcgggaagctctgataaatcactgtgccgtcttccgcaatcaccgagcgcagtgcggatagtgtcgcgcggtta

SEQ ID NO: 36 - DNA, 38452 bp, unknown
  Altogen 322075 strain
gtagcgaaagtgatgggttaattacggatgtaataatcctaaaaagggcatcatttgatgccctttttctgcgttgttttatgaagaacctatctcatcactagttgatcatcaactactggtgagataggctctcacgcaacgaatggtgagtatctcgaagaatacgaaactcatgctggattatgacgccaagtcagatacaattgcatctgtccctaattttggtctgatttgttttgcaacagcgaggcagtccggctgacttttttatttcatggttacaggttggtttatgagtgcgaatagcgaagctcaacaaaacggccgtggtgctgacattgccaaatggttagtggtcgcagttctgctgatcgctgctatcggcggtaactactacttccgcgaatttaatctcgcgctgcgtgcgctggcagttgttgtcgtcatcgcattagccggtggtattgcactgtggacaacgaaaggcaaagcgacactgacttttgcccgcgaagcacgggttgaaatgcgtaaagtgatctggcctacacgtcaggaaacactgcatacaacactgatcgttgcggcagtcacagcggttatgtcgttagtgttatggggccttgatggtatccttgtccgtcttgtttcctatataacatccttctgaggttctaaagatgtcggattctcctaaaaaacgttggtatgtcatccaggctttctccggattcgagagccgggttgcgcagtctctgcgtgaacatatcaaaatcaacgggatggaagattcatttggcgaagtcatggtgccaacggaagaagtcgtcgagatccgcagcggtcagcgccgcaaaagtgagcgcaaattcttcccgggctatgtcctggttcagatggcgatgaacgatgcatcctggcatctggtgcgtaacgtaccgcgtgtaatgggattcatcggcggaacatccgatcgtcctgcaccgatcagcgataaagaagttgatgcgattatgaaccgcctgcagcaggtgggtgataagccgcgtccgaaaacgctgttcgagccgggcgaaatggtccgtgtttccgatggtccgtttgcagactttaacggtgttgttgaagaagtcgactacgagaagagccgcctgaaggtatcagtctctatttttggtcgtgcaacaccggtcgaactggatttcagtcaggtcgaaaaaccgtaacggttttttttccgggcttgcaaagggcgggaaatttatctacaatttcgcgccttttgtttttcaggggttcgcgttttcacgcgggcctgtattcataggggagccgggataaccggcgctattacccacattgaggattttttaaatggctaagaaagtacaagcctatatcaaactgcaggttgcagctggtatggcaaacccaagtccaccggttggtcctgcactgggtcagcagggtgtgaacatcatggaattctgtaaagcgtttaacgccaaaacagacagcatggaaaaaggtttaccaatcccggttgttatcaccgtttatgctgaccgttctttcactttcatcactaaaactccgccagcggcagttttactgaagaaagctgcaggtctgaaatctggttccggcaaaccgaacaaagagaaagtaggtaaaattacttctgctcaggttcgtgagattgctgagactaaagcagcggatatgactggtgccgatgtagaagctatgatgcgttctatcgaaggtactgctcgttccatgggcctggtagtggagggttaatcgatggctaaactgaccaagcgcatgcgcaatatccgtgaaaaagttgatgctaccaaactgtacgacatcaatgaagccgtagccctgctgaaagaattagcgactgctaaattcgttgaaagcgttgacgttgccgttaacctgggtatcgatgcacgtaaatctgaccaaaacgttcgcggtgcaactgtactgccaaacggtaccggtcgttctgtccgcgtagctgtgttcgcacagggcgctaacgctgaagctgctaaagctgcaggcgcagaactggttggtatggaagacctggctgacaaaatcaaagccggcgaaatggacttcgacgttgttatcgcatctccggatgcaatgcgcgttgttggccaattaggtcagatcttaggcccgcgcggcctgatgccaaacccgaaagtgggtactgtaactcctaacgttgctgaagctgtgaacaacgctaaagcgggtcaggttcgttaccgtaacgacaaaaacgggatcatccacaccactatcggtaaagtagatttcgacactgataaactgaaagaaaacctggaagctctgctggttgcgctgaaaaaagcaaaaccatcttcagcgaaaggcgtgtacatcaagaaaatcagcctgtctaccaccatgggtgcgggtgttgcaatcgaccagtctggtctgactgctgctgcttaatatctgcggatagtaagcgctttacattggggtcaggtttctgtaaaatctgacgcccaatgtttgctgtatttgatttagtgaaattatcacgcaatcaggcacagccagaatttcggttggagcccggccttttccgggccccgtccaagaccgcaggtgtaagtgattacttaattttcctgcgtagacggtgacagagccacaagaattttattcgagtattctgctcaccgtgttttagcgctctccaccttccggtgctgagtgaagtgagttccggggttgtattacccggctaaaccaggagcaagaagctaatggcattaaatcttcaagacaaacaagcgattgttgctgaagtcagcgaagttgccaaaggtgcgctgtctgcagttgtcgcggattcccgtggtgtgactgtagataaaatgaccggtctgcgtaaagcatgtcgtgaagctggcgttactgtacgtgtagtacgtaacaccctgctgcgtcgtgctgttgaaggtacctcttctgagtgcctgaaagacgtattcgtcggtcctaccttgattgcattttctcatgaacatccgggcgctgctgctcgtctgttcaaagaattcgcgaaagcgaaccctgcattcgagattaaagccgcagcctttgaaggtgagttaattgcagcgaaagatatcgatcgcttagcaacactcccgacttacgaagaagcaatcgcgcgcctgatggcaaccatgaaagaagcctctgcaggcaaactggttcgcactctggcagcgttacgcgatcagaaagaagcagcttaattgccctttcttttcttcgttgctttttaacgtataaacttattctgaattttaggaacatatcgtatgtctatcactaaagaacaaatcctggacgcagttgctgaaatgtctgtaatggacgttgttgaactgatcaccatgatggaagaaaaattcggcgtttctgctgctgctgctgtagcagttgctgcgggtcctgctgaagctgctgaagagaaaactgagttcgacgttattctgaaagctgcaggcgctaacaaagttgcagtaatcaaagctgttcgcggcgcaactggtctgggcctgaaagaagctaaagatttagttgaaagcgcacctgctgcactgaaagaaggtgtgagcaaagatgaagctgaaactctgaaaaaatctctggaagaagctggcgcggaagttgaagttaaataagccactttttgcagtagcagcctgaaaatggctgatggctggtgacttattggtcaccagcctttttgcgctaatgcgcatgcgtgtgtttccggggtaacagttgtgttatctgacacccgcaaactctccgaatactttttgctattgacgacttaatatactgtgtttatgactgcgattcgctcgggtagctcggtagtcagcagcgcaatgaaatgatttaagagtaatagcaatgggtattaacagaaaatgttcaattttctgtccaaattagatagttgtagcgactgtccgtccgatacgggcaggccgggtcactgatcaagcgagctgaggaaccctatggtttactcctataccgagaagaaacgtattcgtaaggattttggtaaacgtccgcaagtgctggatgtaccttatctcctttctatccagctggattcattccagaaattcattgaactcgatccggacggtcagaacggcctggaagccgcgttccgttccgttttcccgattcagagctacagtggcaatgctgaactgcaatatgtcagcttccgtctgggtgagccggtatttgacgttaaagaatgtcagatccgcggcgtaaccttttccgcaccactgcgcgtaaaactgcgtctggttgtttacgagcgtgaagcaccggaaggcacagttaaagatattaaagaacaggaagtttacatgggcgagattccgctcatgaccgaaaacggaacgttcgttatcaacggtactgagcgtgttatcgtttctcagttacaccgcagcccgggcgtgttctttgacagtgacaaaggtaaaacacactcttccggtaaagtgctgtataacgcacgtatcattccttaccgtggttcatggctggatttcgagttcgatccgaaagacaacttatttgtccgtattgaccgccgccgtaaattaccggcatcgatcattctgcgtgcgatgaatttcagcaccgaagacattctgaacctgttcttcgaaaaaaccacctttgaaatccgcaataataaactgaccatgaccctcattcctgagcgtctgcgtggtgaaactgcttccttcgatatcgaagcgaacggtaaagtttatattgagaaaggtcgtcgtatcactgcccgtcatatccgccagttggaaaaagacgaagtcagccagattgaagttcctgttgaatatatcgcaggtaaagtggttgcgcgtgattacatcgatgaagcgaccggcgaattaatctgtgcggcaaacatggaaatgtcactggatctgctggcgcgtctgagccagtccggtcacaaaaccattgaaaccctgttcaccaacgacctggatcacggcgcctacatgtcagaaaccctgcgtgtggatccgaccaacgatcgtttaagcgcgctggtagaaatctaccgcatgatgcgccctggtgagccgccaacccgcgaagctgctgaaaacctgttcgagaacctgttcttctctgaagatcgttatgatctgtctgcggtcggccgcatgaagttcaaccgttcactgggtcgtgatgactctgacggtaccgggatcctgagccagcaggacattactgatgtcatgaagaaactgatcgacatccgtaacggccgcggtgaagtggatgatatcgaccacttaggtaaccgtcgtatccgttctgtcggtgaaatggcagagaaccagttccgtgtgggtctggtccgtgttgagcgtgcagtgaaagagcgtctgtctctgggtgatctggataacctgatgcctcaggatatgatcaacgccaagccgatttctgctgcggttaaagagttctttggttccagccagctgtcccagtttatggaccagaacaacccgctgtcagaaattacgcacaaacgccgtatctcagcattaggcccgggtggtctgacccgtgagcgtgccggcttcgaagtccgagacgttcacccgactcactacggccgcgtatgtccaatcgagacccctgaaggtccgaacatcggtctgatcaactccttatctgtttatgcacagactaacgaatatggtttcctggaaaccccgtaccgtttagtgcgtgacgatgttgttaccgatgaaattcattacctgtctgcaatcgaagaaggtaacttcatcattgcacaggcaaacaccgtattagatgacgacggtcacttcgttgatgaactgatcacctgccgtaacaaaggtgaatccagcttattcagccgtgatcaggttcagtacatggacgtttccacccagcaggtggtttctgtcggtgcatccctgatcccgttcctggaacacgatgacgccaaccgtgcattgatgggtgcgaacatgcaacgtcaggcggttccgactctgcgcgctgacaagccgctggttggtaccggtatggaacgtgcagtagcagttgactccggtgttacagccgtagccaaacgcggtggtactgttcagtacgttgacgcatcacgtatcgttatcaaggtaaatgaagatgaaatgtatgccggcgaagcgggcatcgacatctacagcctgaccaaatatacccgttctaaccagaacacctgtatcaaccagaccccttgcgtatcgctgggcgagccggttgaacgcggtgacgtgctggctgatggtccgtcaactgacctcggcgaactggcactgggtcagaacatgcgcgtggcatttatgccatggaacggttacaacttcgaagactccatcctcgtatccgagcgtgttgttcaggaagaccgtttcaccactatccacatccaggaactggcttgtgtgtcccgtgacaccaaactggggccggaagagatcaccgccgacatccctaacgtgggtgaagctgctctctccaaactggatgaatccggtatcgtgtatatcggtgcggaagtgaaaggcggcgacattctggtcggtaaagtgacaccgaaaggtgaaacacagttaaccccggaagagaaactgctgcgtgctatcttcggtgaaaaagcgtcagacgtgaaagattcatctctgcgcgtaccgaacggtgtttccggtactgttatcgacgtccaggtctttacccgcgatggcgtggaaaaagacaagcgtgctctcgaaatcgaagagatgcagttgcgtgacgcgaagaaagacctgaccgaagagctccagattctggaagccggtctgttcagccgtatccgttccgttctgatcaacggcggtatggaagctgacaaactggataaactgccgcgcgagcgctggttagaactggctctgactgatgaagagaaacagaatcagttagaacagctggcagagcagtatgacgaactgaaatctgagttcgccaagaaactggaagcgaaacgccgcaaaatcacccagggcgatgatctggcaccgggcgtgctgaaaatcgttaaagtgtatctggccgttaaacgtcagatccagcctggtgataaaatggcgggtcgtcacggtaacaaaggggttatctcaaaaattaaccctatcgaagatatgccatacgatgaaaaaggtaaccctgttgacatcgtactgaacccgctgggcgtaccatcgcgtatgaacatcggtcagattctggaaacccacctgggtatggctgcgaaaggcatcggtgacaaaatcaaccagatgatcaaagagcagcaggaagtcgcaaaattacgtgaattcatccagaaagcctatgacctgggtaacgacccgcgtcagaaagtggatctgaacaccttcagtgatgaagaagttctgcgtctggcggacaacctgaaaaaaggtatgccgacagcaacaccagtattcgatggtgcaaaagagcaggaaatcaaagcattactgactctgggtggcttaccgacttccggtcagatcacactgtttgatggtcgtaccggcgagcagttcgagcgtcaggttaccgtcggctatatgtacatgctgaaactgaaccacctggttgatgacaagatgcatgcgcgttctaccggttcttacagcctggttactcagcagccgctgggtggtaaggctcagttcggtggtcagcgcttcggggagatggaagtgtgggcactggaagcatacggtgccgcttacaccctccaggagatgctgactgtgaaatcggatgacgttaacggtcgtacgaagatgtacaaaaacatcgtcgacggcagtcatcagatggagccgggaatgccggaatctttcaacgtattgctgaaagaaatccgttccctcggtatcaatatcgagctggaagacgagtaattaccgttgtggctgcccgtggtacacgggcagcaccagtaaatctggtttaagggacaaacagacgaccgtttgtctcacaggtctaactccgacaggagccatttcgtgaaagacttattaaagtttctgaaagcgcaaaccaagaccgaagagtttgatgcgatcaaaattggtctggcctcacctgacatgattcgttcatggtcatttggtgaagtgaaaaagccggaaaccattaactaccgtacgttcaaacctgagcgtgacgggcttttctgtgcgcgtatcttcgggccggtaaaagattacgaatgtttgtgcggtaagtacaaacgtctgaaacaccgtggtgtgatttgtgagaagtgtggtgttgaagtgactcagactaaagtgcgccgtgagcgcatgggtcacatcgaactggcatcaccgaccgcacacatctggttcctgaaatcactgccgtcccgtatcggcctgctgctggatatgccgctgcgtgatatcgaacgtgttctgtactttgaatcttatgttgttgttgaaggcgggatgaccagccttgagcgcagccagatcctgacagaagaacagtatctcgacgctctggaagagttcggtgatgaattcgacgcgaaaatgggtgcggaagccatccaggcattgctgaaagcaatggatctggaacaggaagtcgaaaacctgcgcgaagaactgaatgaaaccaattcagaaaccaaacgtaagaaactgaccaagcgcatcaagctgctggaagccttcattcagtccggtaacaaacctgagtggatgatcctgacagtgctgccggtgttaccaccggatctgcgtccgttagttccgctcgacggcggtcgctttgcgacttcagatctgaacgatctgtaccgtcgtgtgatcaaccgtaacaaccgtctgaaacgcctgctggatctggctgcacctgacatcatcgtacgtaacgaaaaacgtatgctgcaggaagccgtggatgcgctgctggataacggccgtcgtggtcgtgcaattaccggctctaacaagcgtccgctgaaatctctggcagacatgatcaaaggtaaacagggtcgtttccgtcagaacctgctcggtaagcgtgttgactattccggtcgttctgtaatcaccgtaggtccatacctgcgtctgcatcagtgcggtctgcctaagaaaatggcactggaactcttcaaaccgttcatctacggcaagctggaactgcgtggtctcgcaaccaccattaaagcagccaagaaaatggttgagcgcgaagaagcggtcgtatgggatatcctggatgaagttatccgtgagcacccggttctcctgaaccgtgcaccaacacttcaccgtctgggtattcaggcgtttgaaccaatccttatcgaaggtaaagctatccagctgcacccgctcgtttgtgcggcatataacgccgacttcgatggtgaccagatggcggttcacgtccctctgaccctggaagcgcagcttgaagcccgtgccctgatgatgtctaccaacaacatcctgtcaccggcaagcggcgatccgattatcgtaccttctcaggacgttgttctgggcctgtactacatgacccgtgactgtgttaacgccaaaggcgaaggcatggtactgaacggttcaactgaagctgagcgtgtataccgcgccggtcatgcgtccctgcatgcccgtgtgaaagtccgtatcactgaagaagtgaaagacggcgaaggtaatatcaccaagcgtaccagcatgattgataccactgtcggccgtgccatcttatggcgtatcgttccgcgtggtctgccttactcactggttaaccagccgctgggtaaaaaagcaatctccaaaatgctgaacacctgttaccgtattctgggtctgaagccgaccgttatcttcgctgaccagatcatgtacaccggttttgcctacgctgcccgttcaggtgcatctgttggtatcgatgacatggttattccggagaaaaaagccgggatcatcgcggaagcggaagcggaagtggcagaaatccaggagcagttccagtctggtctggttaccgccggcgaacgttataacaaagttatcgatatctgggccgcggccaacgaacgtgttgccaaggcgatgatggaaaacctgtctgttgaaaccgtggttaaccgcgacggtgaagaagaacagcaggtttctttcaacagtatctttatgatggccgactccggtgcgcgtggttctgctgcacagattcgtcagctggccggtatgcgtggtctgatggcgaaaccggatggttccatcatcgaaacgccaatcaccgcaaacttccgtgaaggtcttgacgtactccagtacttcatctcaacccacggtgcacgtaaaggtctggcggataccgcactgaaaacagcaaactccggttacctgacccgtcgtctggttgacgtggcacaagacctcgtcatcactgaagatgactgtggtacgcacgaaggtatcgtcatgaccccggttatcgagggtggtgatgttaaagaacctctgcgcgaccgcgtattaggccgtgtggctgctgaagatattctgaagccgggtactgcggatattcttatcccgcgtaacaccctgctgcacgaaaaacagtgtgacctgttagaagaaaactcagtcgacagcgtgaaagtccgctctgtggttagttgcgaaactgacttcggtgtgtgtgcgaaatgctacggccgtgacctggcgcgtggtcacatcatcaacgccggtgaggcggtgggtgttatcgcggcacagtcaatcggtgaaccgggtacacagctgacgatgcgtacgttccacatcggtggtgcggcatcccgtgctgctgcggaatccagcattcaggtccgtaacaagggtacactaaaactgttcaacgcgaagttcatcatgaactctgcgggcaagctggttatcacgtcccgtaacactgaactgcgtctgatcgacgaattcggtcgtaccaaagagagctataaagtaccttacggtgcccagctctccaaaggtgacggtgaagccgtcaacggcggtgaaactgtcgctaactgggatccgcataccatgccggttgtcagtgaagtgtccggtatcatccgctttaccgacatgcacgacggtcagaccattacccgtcagactgatgaattaaccggtctgtcctcactggttgttctggattctgcagaacgtaccaccagtgcgaaagaaatgcgtccggcactgaaaattgtcgatgcacagggtaacgatgttctgatcccgaacactgatatgcctgccgcgtacttcttaccgggtaaagcgattgttcagttggatgacggcgtggcaatcaccgccggtgacacgctggcacgtatcccgcaggaatctgtcggtaccaaggatattaccggtggtctgccgcgcgttgcggatctgttcgaagcgcgtcgtccgaaagagcctgctatcctggctgaaatcagcggtatcatctcgttcggtaaagagactaaaggtaaacgtcgtctggtgatcacaccaatcgacggcagcgatccttacgaagagatgattccgaaatggcgtcagctcaacgtgttcgaaggtgaaatggttgaacgtggtgacgtcgtatctgatggtccggaatcaccgcacgatatcctgcgtctgcgcggcgtgaatgccgttgcacgttatatcgcgaacgaagtccaggaagtttaccgcttacagggcgttaagattaacgataaacacatcgaagttatcgttcgtcagatgctgcgtaaagtcaccatcacctctgcgggaagctctgagttcctcgaaggtgagcaggttgaatatgcacgcgtgaaagtggcaaaccgtctgctggagcaggaaggcaaaatccctgcaaccttcgaacgtgatctgctgggtatcaccaaagcgtctctggcaacagagtcctttatctctgcggcatcgttccaggagaccacacgcgttctgaccgaagcggccgttgcgggtaaacgcgacgaactgcgcggtctgaaagagaacgtcattgtgggtcgcctgatcccggccggtaccggtttcgcgtaccaccaggatcgtatccgccgccgtcacctggcagaaactgccgaggcagcaccacagcaggtcagcgctgatgaagcaacagctaacttagctgagcttctgaacgccggcttcggtggcagcaaagagtaagtgatacagcaatgtaactgactgaatagccctccttttttaaggagggcttttttgtgcagtacagcaggtaaacgggcatattatgcgcaacgtattgtttatttttatgattttattttctgtcgccggtgtcagccgggcggcagaagtgccttctgattctcaggaatggttactgaaagatgaaccgccggtactgattcaggtaaaagaaccgcaggtgatttttgccccggttgccggtgtgatgcagggggttgcggaactgaacccgtcacacggtttttatatttatccgatgaagggcgaataccgtgagttacagtttggcaatgatcgcggttttatcggcagcgaacagctgtcagataagaaacctaaaatcgtgccgccgctggatacactgaatgaactcaataatccgatttatgattatctgataaccatcagtaataccaatgtgtttggtacgccggatgaatctaaatccccggttgccactctgtttggtgatctgcgttatccggtgctggccaaaatggtcagggaaaaccgggaaggtgaaaaaattgtctggctgactatccgcctggcggacagactggcgtacatccgtttatcggatgtggagttggataaagggatcccgatcctgacgtatcaccatatcctgaaagacagtgaaaacaggaacttccgtcatacctcgaccaccacatccgttgaggcctttaaggcgcagatggattatctgaagcaggccggttaccggacgatctcccttgatgacgtggccggttatctggcgaaggaaaataacctgccgggcaaagtggtggcgctgacgttcgacgatggcctgaaatcggtttaccgctatgcttatccgatcctgaagcagaatgatcagaaagccacactgtttgtgatttcctcacgggtgaaatcaaaaccgcagaaatgggcaccggacggattgcagtttatgtgctggccggagctgatgcagtcacgggatgtatttgatattcagtcacatacccactttctgcaccgtctggataaccgcaaaaacccgattattttcagccgtaaggaacacacgatcctgctggactaccagcgttcgcagcgcgttctggcaaaactgaaccctgaacagcattacctggcatatcctttcggggcatataatcaggatgcgatggatgcagcacagcaggccggtatgacgatggccgtcaccaccattcaggggaaagtccgcctcggcgataatccgtatgcgctgaaacgcctgtatgcactgcgtaccgacccgattgagaaatttgccaccatgattggcaacagtggtccggaagtggtgaataaggatattgttgtcgacagataatcccgtttttatataacaactcacggcctgataataacgattatcaggccatttttttgtgtgtacattatgaaatcagaaattgcagttcataaggggcggattcataactgaccaggttatcttcaaattcattggcgataaccatccgtggtttttcttttccgtggaaataacgtttcaccatttcagcatcgatattttcactgagataatgacagatacagcaaagataaaacccggccggtaaacacaccaggttaggagaatcaaaatccggtttctctttcaggtaaatcaggtatttcgacgggtagaaggtttgctcaataatgttttgataatccagcacataggcatactgccgcagatagtcgagggactgattttccggccgggctttcatttcagccagccgcagttccatttttgaaatcgggcgatctgccggataacagggaacaaacagacaccagcgttccggtaattcggtagtataaaaagccccgttacgcggtttattatcagtgaaggtaaaataatccagataccagtccagtgtttcaatggtcttttttaattctgccatctgctgtaatttgcgggatttttcctgaattaaatattcggttaatttatttttatcaccactttccataatggttttaatatcactcaggctcatattcattttctgaagatatttaattctgtcgatataatgaaattgttcgaatgtataataacggtatccgttttcattatccgtataaccgggtttgagaatggattttttatcataaaaacgcaatgtctgcgttgaaacgcctaatagcgcggcagtttccccgatagtaaaatatttcttcatgattgctgcccgtaaaataattacttttatttaaattatcagatttaaaattaacatactattttccgggaaaataattttgtgattatcttctcataacctgaattacggatttaaccttattccagctataaggtttagggtgtgcgcattgttatttattgttaaaaaagcaggataaaaaatgaaagaacgcacacagctattgtattcaggggaaatgaatttaccgggtcatattcatccggatgcgcccgctatttttccggccaccgcctatgccatgcaggatacgcagcactattttgctgtcagcagcggcaatggcgaatatcagtataaccgtaccgcaaacccgaaccgcgacagcttatctgcggcaatttcactgatggaagacggcgaagtttctgctgttatggcctccgggatggcggcaatctcagcgacattgctgagcctgctcagacagggagaccatcttgtcgtgaatgaggctatttacggcgaaaccatcgaactgattgatttaattctggttccgctgggggtaacagtaacctatgcggattttctgtcaccggagtcggtacaggccgccatccggccggaaacggtgatgctgtataccgaaattatcagtaacccgctgattaaagtggtcgatatcgatgccattgccgctatcagccgggcaaatgattgcctgctggtggtggataataccttttcaaccccgtttgtcatcaagcccttacagcacggcgcggatatcgtgatccacagcctgaccaaatttttcggcggccacagtgatttaaccgccggttcggtgacctgctcacagtcactgatgcagaaaattgagctgaaagctcgtctgctggggggatgcagtgatccttatacggcctggctctgtctgcgcagcatccggacaatggaaatgcggttatcgcgccagatggaaaatgcacagcgtattgcagaagcactcagcggtgacccgcgtgtggctcaggtgaattatccgggcctggcgtcacatcctcagcatgatttagcgaaatccctgtttctgcagggctgcggcccgatgctcagtttccgtgtcgctgatgaccagacaaaagtcgatgcttttatccgccgtttaaatcttattacttatctgggcacgctgggcgggttccgtacctctctggcgcatccggcaaccgcattccgcactgaatttacaccgcagcaactgattgatttcggtatgcacgaagggcttatccgtatttctgccggatgcgaagctgccgaagatttaattgctgatattactcaggcacttgatgtgtttaattaaaccggatactcactatggacacgattcttaatattattaatcagttttcagattttatctggacttatccgatgccggtgttattagtcagtcttggtatctggctgaccattaaattccggtttaaataccagctgaattttcgttttaatattaaaaatacctacggcggattatttaagaaaaaaaatgccggtgaacagattcagggggcgggctcggtatccagttttgccgccgcctgtaccgcgctggcgaataccgtgggtatcggcagtatcggcggggtggcaaatgcgattacgatgggcgggccgggcgcgatattctggctctggttttctgcttttttcgggattgcgaccaaagcctgtgaaattattctcggccagcgttaccgcgtcaaatatgaaaaatcgatggatgagtatgtctgtgaccgctcatttgtgatggaacatgcactgggctggaaaaaaggtgcggttgcattgtcggtatgctgttttatgctcggaccgtggacctgtctggtgcagagtgaatctgcaacgtcctctatcgaagaagcctttaatgtcgacagttacctgacattgctggtgatggttatttttatcgccagtgtcattatcggcggattaaaaggtatttcctccaaaatggaaagtgtggtgccgaaactggcgatcacgtatctgaccgttgccgttattctgctggtgatgaattatgatcagatcctgcctgcatttgcgctgatctttaaatcggccttttcaccggctgccggtgtcggcggatttgccggggcaaccgtgatggaagccatccgtttcgggatcgccagggggatttattccaatgacgccggaaccggctacggtattgtggcacatgcggcggcaacaaccgatcacccgatccgtcagtccagctggggtttcggcgaggttttcctgaccattattatctgtaccgtcaccgcactggctattctgaccaccaatgtctgggtggattacgccggtattacctcatcacgcctgaccacgctggcatttaaagtgacatacggtgatgcgggcagctggtttatggcgatatttatcaccctgctggcctgtaccacgaccatcggtatgtattttacctgtgagaaagcggttaactttttcttcggggacaccagagccaataaaatcgcgaagaatctgtaccgggtttattacctggcgccgattgtgttattcactaaccttcaggccgatattttgtgggcgctgaccgatattctgagtgcggtctatgtgctgatcaccatgacattaatactgagccggcggaaagagattttccggttatttaatgatttctgggatcgctatattccggcgaaaaatgccggacaggatgtgccgccggtgacttactgtaagcggatagaataaaaaaatcaggccggtatttaccggcctttcttaccttatcttcccagatatttatcccagtccttccagaccggctggagaccggcagcgagcagggcatccgcgacctgctgcggcgagcggttgtcatgcgggctgaactgctccagttccggatcatcctcttcggcatagccgccgggctgagtgcgggaaccggcactgacctggtttatcgccaccggcaccatatgatcacggaaatacggtgattcgcgggtggagagtgacagctcaatatccggtgcgaacaggcggaatgcacagataagctgcaccagctccgcttcattcatcagggattccggctcaataccgcctgcacacggacgcagacgcgggaaagagatggaataacgggttttccagtagcgctggcgcagatagtgcagatgctccgcgaccatgtagcagtccgtccgccactgaccggacaggccgatcagcgcgccgagcccgatcttgctgatcccggcctgaccaagacgatccggggtttgcagccgccagtgaaaatcctgttttttccctttcagatggtgccgctgataggtgctctcatggtaggtttcctgatacaccatcaccccgtccagtcccagcgtgcgcagttcggcgtattcctctgtcgccatcggctgcacttccatcatcatagtgctgaaataatcgcggatcagcgggaaggtttcgcggaagtaatccatccccactttgcgctgatgttcgccggtgaccagcagcaggctgtcaaagccgagggcttttattgccttacattcgctatggatttctgccggtgtcagggtcttgcgcttaatgtggttgctcatggagaagccgcagtaagtacagtcgttggcacacaggttagagagatagagcgggacatacatcccgacgacatggccgaaacgctgccgggtcagtgtctgtgctttctgcgccataatttcgagatacggccgggccgccggggagatcagtgccataaaatccgcggtggtcagcgtgtccgcactcagcgcccgttcgacatcccgcgtggttttgctgttgagctgtaaggtgagatcatcccagtccagctgctgccagcggtcgctgaaagttttttcactcattacagtgctcccaggaatgaggtcagcggactggaagcggaagcctgttgctgcttcggcgccagttctgcttcccgcgccagcagcccggcctcaatggcctgacggaaggcttttgccatggtgaccggtgagcgggcaacggccatcgcggtattgaccagcacggcatccgcgcccagttctatcgcctcgagggcgtggcttggtgcgccgatcccggcatcaatcactaccggaaccgttgcctgctcaataataatgcgcagcatatcgcgggtctgtaatccctgattggagccgataggtgcacccagcggcataacagcggcacatccggcttcctgcaaccggcggcataataccggatccgcactgcaataaggcaggacaacaaacccctctttcaccagtatttccgccgctgccagggtttcaaccgggtccggcagcaggtaacgggcatcggggtggatctccagtttgatccagttggtgccgagtgcctcacgcgccagttgtgcggcaaacaccgcttcccgggcattgtttgcgccggaagtattcggcagcagtttaataccgagctcacggagcggggcgaggatatcatcgtgcccctgagaaagatcgatacgcttcatcgccatggtgactaactggctgccggaggcggcaatcgcctcctgcatcacccggctgctggtgtatttcccggtgccggtaaataagtgggatgtaaatgtggtatctgcaatcgtcagcatcattaacctcctgcgatagcctgaaaaagtaaaatctgatcgccgtcgcggacaacgtgttctgaccagcagccacggacaacaatggtctggtttaccgcgacagcaatccccgccacgggacggccgagaaatgccagcagttcactgacggtaatgggagaatcaatatccatcacctcgtcattcaccgttatgcgcatgcggctgcctcctgacacaccgggcagtctgctgcccgccggagctgtaatgtgctccagctttgctgtctgccgtcgaaaaggcgtaattttccgttcagcggggaagacaatccggccagcagtttgatcgcttccagcgcctggagcgtgccgatcaccccgacaaccgggccgagcacaccggcagtgcggcagttgcgctccggaatgacatcatccggatagaggcagccgtaacagccgtgttcaaacggcggctgcagtaccagaagctgtccgctgaaaccaaccgcactgccgctgaccagggttttttgctgcgttacgcaggcggcgttgatggcatggcggggggccatgttgtcggtacaatcgaggacaatatctgctgtttgtacaatatgttgcagcgtttcccgggtctgacgttcggtgatcacattgagcgtcagggccgggttcagcgcccgcagacgtgccgctgccgtacgggctttattgtccggcacatcggcttcggtatataaaatctggcgctggaggttggagagatgcacctcatcatcatcaatcagggtcagctcaccgacaccggcggcggccagatacagcgccgccggagaacccagcccgccgaggccggtgatcaccgcatgagactgtttgagtttcagctgaccttccgggccgatatcctccagcagcagctggcggctgtagcgcataaaatcgtgatcattcagcatggtttacctcctgatattcagcggtttccccggtcagtgtcatcagctgccgggtggcagcctgccagtcagcggctttggtgatggcgctgaccaccgcaatactgccgaccccggtggcggccacggcaggggcgcgttcaagggaaataccgccgatggcgaccagcgggaaatccggcgtggccgcgacctggcgggctaagttttccagtccctgcggggaagagggcatgattttggtttgtgtcgggaaaatatgccccagcgcgatataggacggacgcagcgctttggcacgctgcaattccgtatcatcgtgggtggagatcccgaggcgcagtccggcctgctgaatcgcccgcaagtcagcaatatccagatcttcctggccgagatgcacaccataagcgctgtgctttatggcagcccgccagtaatcattgataaacagccgcgcctgatattttttccccagcgcaacagcggtgcggatctgctcatccacctgtgcatcggttttgtctttgatgcgcagctggattgtccgcacgccggatgccagcagccgctcaatccacatcagtgaatccaccaccggatacagccctaatttgtgttccgtccgggcaaacggcgcgtcaggcagattcatcgatacgctcctctgcactgtgatacagctcgctgcctttggcgcggaaagcgtcagacatctcttccatcccggcggcgtagtcgcggacttcctgtgagattttcattgagcagaatttcggcccgcacattgaacagaaatgtgcgactttgccggatgcctgcggcagggtttcatcgtggtaagtccgggcggtttccggatccagcgccagattgaactgatcttcccagcggaattcaaaacgcgcttttgacatcgcgttgtcgcggatttgggctcccggatgtcccttggcgagatcggcggcatgcgcggcgattttataggtgataagcccttgtttaacatcttctttattcggtaatccgagatgctctttcggggtcacataacagagcatggcacagccgaaccagccgatcagtgccgcgccgataccggatgtgaaatggtcatagcccggcgcaatatcggtggtcagcggccccagggtgtagaacggcgcttcatgacagtgttccagttcttcggtcatgtttttgcggatcatctgcatcggcacatggcccggaccttcaatcatcacctgcacatcatattcccacgcgattttggtcagctcgccgagagtatgcagttcagcgaactgggcttcgtcgttggcatcctgaatagagcccggacgcagaccatcaccgagcgacagcgccacatcatatgccgcgcagatttcacagatgtcacggaagtgctgatagaggaagttttcctgatgatgggacagacaccatttcgccataatcgagccgccgcgtgacacaatgccggtcaggcgttttgcggtcatcggcacatagcgcagcaggacaccggcgtgaatggtgaagtaatccaccccttgttccgcctgctccagcagggtatcgcggaacatttcccaggtcagatcttcggccacaccgttcactttctcgagtgcctgatacaccggcacggtaccgataggtaccgggctgttacgcaggatccactcgcgggtttcgtgaatatagcggccggtggagagatccatcaccgtatccgcgccccagcgggtggaccagaccagtttctccacttcttcctcaatggaggaggtaacagaggagttgccgatattggcattcacttttaccaggaaattgcggccgataatcatcggttcggattccgggtggttaatattggacgggataatggcgcgtccggcagcgacttcatcgcggacaaactccggggtgatgttatccggcagattggcaccgaaatgctgtcccggatgctgttgcagcaggacttcgccgcggatacgttcacgccccatattttcgcggatggcgataaactccatctccggggtgacaatccctttccgggcataatgcagttgtgtcacccgttttccggctttggctttcagcggtgccgggcggttcgggtagcgcagatggtcaaggccgttatcggccaggcggtcacgggtgaaatcagagctcaggtgtgtcaccgcttcggtatcatcccgctctgcaacccattgttcacgcagacgggcaagaccggcgcggacatccagtttcacctgcgggtcgccgtacggcccggctgtatcataaaccggtaccggctcattttcttcatactgcgggttggctttatcaccgccgatcagtgtcggggacagggcaatttcccgcatcggtacgcggatatccgggcgtgagccggtgagataaatacgggaggagttcgggaaattcactcctttcagggtgctgatatattcctctgccgcgtcgcgctgctcacggcgggtacgggctttggacggggatgcggtttccgcacccggggagagatcagtggtatcaatacgttgttcacgggacatagcaaattccttacagtgaaaccggcaacgccggaagaaaaagtgagaaattgcttgtctggaggtgcgtcaggagtaatgcgtgataaccggctgtacccaaaatccgcattgcggcggctgaaaacagtggttaaaaaaggaaagattactcttgttcccttcgcgggtactaacccgatcaggttccgcggatcccgaattaacggtctcagcccgatttatcacggggataaatgctgggcactccgacaagaaagatttcagtataagaagctgcccggaaactacaacctttttataacatcatttgttcacctgctgcgttcccgatcatcttccctgatattcagcggttacaccgcagcggataactataaaaaaaattaaattaaaactgataatttccggtcagttgccgatgttttctgtcggcgtgccttattacggcatattaagaaaaaatatttggttatttattggccttattgactgctttctgcatcaggaaaaaaaatgaatcttaaaaatacgacgattcgtgtcaggttatctgtcacatttggtgttctgatcgctattctggcgctggtttccggaatggcagttatgaacctgtataaagacaaagagatgttcacgaattacgttaacgggacatatgcacttcaggttcaggcgtatgaagtccgccatgcgacggaagagcgggcgatcatgctgcgggatatgatcaatgcgactgataagaaagataaaacagaagaactgaaccgttttaaagaagaagacgggaaagtcagtaaaagaacgcagacactgctggatatggtcaatgagttcggcatggatccgcagggacgggcgttgcttgataagatgatagcggatgaaaaacactatgccgccgtgacccgggaagtgcttgaactggatcagcagggacggcatgaagaggcgattgcgaaaatgatggatgccgaatatgcggcatcggatgcctatatcctgtcattccgtgccagccgggatcacggtactgaaaccggtaatcagcttattcaggaatttaatacgaattatgagcgtcagagcaacattattctggtgttcgcgctgctggcattaacgctggcgattgtctccggggtgatgattatccggaatctgacacgctctctgggcgccgaacccgcccaactgaaagaagtggctgaacgggtggcctccggtgatctgtcgccgtccgatgaaactcacccggttccggacggtagtgtgctgagtaccctgaaagcaatgcagagaaatctggccggtattgtcggcacggtgcgtaataacagtgacagcattgtgaccggcacaatgcagataaccagcggtaatgctgatctgagccagcgtactgaatcccaggccagcagtctgcagcagaccgcagcatcaatggagcagttatctgccacggtgaaaagcagtgcggagattgcggcaaaagcgaatatgatggctgcggaagcgtccgaaaccgcccgtcacggtggtgagaaagtggatctggttattcatgccatgcaggatatctcaaactcttcacggacaatcactgacattatcggtgtgattgattccatcgcattccagaccaatatccttgcactgaacgcggccgtggaagccgcacgtgccggtgaacacggacgcggttttgctgtggtatccggcgaagtccggacactggcacagcggagtgcacaggctgccggtgaaataaaaaatctgattaatgccagtgttgagcaggtggatgcaggcagtaaactggtggcagaagccggtgagtcaatgcaggtgattgtcactcagacacagggtgtcagccagatgattgacgagctgacactggcggcgaatgagcagtctcagggcatttctcaggtcgggattgccgtacagcagattgatgaagtcacacagcagaatgctgcgctggtggttgaaaatgcggcggcagcggaaagcctgcatcagcaggcgggtcagctcatgcaggttatgacacagttcagactggggagcagcgccgcctgatccggctgatatccgctgccgtacctccggcagcgggtatcatatttatcagtgacgaggaggaagatcagctgtttattgtgtccagtgaccacgtcagctgcatccatccctgtttttctgcttctgccttcaataccgggtcggcgttgactgtcagcacatccgtggcatagcggcacaggggtaaatcgttggcggaatcggtataaaaaatcgtacgttccggtaaaaactggcgaatatccagaaagttagccagtttttccactttcccttcccggaaggtggtgatcccctgcaatgcaccggtgtagtgatcatcccggacttccagttcgataccaaacgccagattcacacccagcatcttcgccaccggtttgacaataaaatcggcggtggcagaaatgatgatcaccggcacgccgtgttctttataaaacgcgagggttttgaccgcatccgggtagaccagcgggcgcactttgctttcggtaaaatcagccacccactcatcaatctgtgcaacggtggcattacccaaccccttaaggctgaaggccatatacgcggccatatccagcttgccggcgctgtaatccgccatcatctgtttatctgcggtaagaaaggccgggtcagtgataatacctttttcccacaggtagtctgtccataacaggctgctgtctgcagcgattaaggtgtgatcgaggtcgaaaaccgctaatgttgacatgacgttcctttaattaactgacggggcaagggcgcggatttcatttttattgaacatcagctccagctgagttccctgttcaaacagccgctctgaggagcggttcagcagatccacggtcagtgcgcccagtccggtatccacctgataacggataatattgcccagtaactgactgtcacggattgtacctgaaaccgggtgagaaatgtgctccccgtactgtcttccggcctcacgcacataaatggattccgggcggatcgccacaataccgctgagattcagaccgagcaggctgttggcgttgtgcgcgctgaccagattgtaatgtcccataaaacgcgcgacaaactcattggcgggctgggtgtagaggttttcggcagtatcgctctgcacgatttcacctttgttcatcaggaagatacggtcagacatcagcatcgcttcttcctggtcgtgggtgacaaaaatggtggtcaggttcagttcccgctggatctgacggatttgctgacgcagatgtttgcggatctgcgcatccagcgcggagagcggttcatccagcagcaggatgcgcggtttcatcaccagtgcccgtgccagtgccacacgcgggcgctggccgccggaaagctgatgcggcagatgctgctcttttcctttcagacccaccagctcaatcacctctgcaacggctttgcgctgttcattttccgggactttctgcattttcaggccgaaagcaatgttgcgttcggtggtcatattcggaaacagcgcatagctctgaaacaccatgccgatttcccgctgctgtggcggagatgaagtaatatcctgtttattcacataaattctgccgtcattgacaggctccagcccggcaagacaacgcagcagggtggatttaccgcagccgctcgggccaagcagggtgataaattcccctttgctgacagaaaaattcagaccggaaaagaccggggtggcagcaaaggattttgtcaggttttcagcaattacatagctcatcagtgattcctcagcggcttaagcgtgtcgcgatcagggtcaggatcagggtgaaaataaagtagctcgctaccagtgcggaggtgaagtggccgctggtctggcgcatgttatagagatagatttgcagggtttcgtaacgggtgccgaccagaatgttggcaaacacaaactcaccgaacaggaaggaaaaggcgatcagcagtgacaccagcagccctttgcggatattcggcaccaccaccagcagaaacgccttaaaagtgcctgcgccgagcagatgggcggcatccagcagatctttcagcggcacgccgttcaggctgttggccagtgcccggtacataaacggcagggtgatggtgaaataggtgccgatcaggatccacggcgtaccggcaatcggcagcggcccgtcagcaaacagctgtagtaagccgacggaggagaccaccggcggcacggcgaacggcagaataatcaggatctccatcagccctttcagccgcgggaagtaataaaatacagcaaacaccagcggcaggatcaccagggtgctgatagcgagggtgacaaaacagataaacagtgagcggccgaacgcggcaaggaaacgcggatcctgccacagcttcagataccactgtaatgtcaggccgtccggcagtaccgtggcaccccagcgggtggagaaggaatacagcagggtcgcgataatcggtaacagcagcaggatcacaatcagactgagcatgattttgtgataacgcgccatggacggcggattaagtgtgagatcagcacttggcatggtaactccgtttcagcagccagtgatagacagcagtgatgaatccgaggataaccatcagcaggacagagagtgccgccgccatattcggctccaggaacaggtcgccggacaccaggctggcgatacggatggtcaccatattgtagttcccggtggtcagcgcataagtggaggcataagccccggcggcattggcaaacagaatgataaaggtaccgagaagcgccggcgaaagcaccggcagcgcgacatagcgccagtaggctaaacgaccggctcccatggttttggcggcatcctcccactccggtttcagggcatcaaacgccggatagagcagcaggatccccagcgggatctgaaaatagaggtaaatcagcatcagcccggcggcgctgtagagattgaaatcctcaatcacgccccaggctttcagttgcagggtaatggcgccgttaacgccgagaatgataatgaaagcaaacgccagcggcacaccgctgaaattgccggtcatattggtgaaagcgatcagccagcggcgcggacgcggcggggcatgctgtaaggaggcggcgaacagtgcggcgaggatcagcccgccgactgacgataccccggaaatccacagggtattttcaaaggactgaatataaaaagggctgctgaagatttcggtaaaattgcccaatgaccaggcatcttcatacacgaagctattgataatcacccataacatcggcgcaagctggaaaagtgcgaacagcagcgcggcagggagcagtaacagcatcggtttcagcggcagacggcgtgacagggggcggggatgttgcttacttttcatcgcggtcagctccggcagaatatcagccatgttgcgtctcccgcagcaggcgcggtacagcggctttgttgtgtccgctcagaccgagtaaccggcagatggtgccgcacagctgtgtctgttgcaccggaagatcggcctcatgagagaaagcgtcaccggcaacaaacagcgggacggtgcgttcttcatccagaatcccgccgtgtgagcggtcattattcatgccgtgatcactggtcaccagcacctgataacccgcttccagccacgcaggcagatacgcggagagcaggccgtctgcacggcgggcgctgttgcggtattgctgtgaatccccgccggatttatgaccggcatcgtcaatattcatcgggtgaataagcaggaaatcgggatggtattgacggcgtaaatattccgcatcgaggaataaatgatcatccggatagtgatccacctgataaaaacagccgtgttgtatcgcaagcgaatcatcgtgagtgaaacggtcacggacggcatcaaacggggcgcggttatacagctcactgacccagtgataagcggcggcagcggtggtttttccggctttttgtgcgagggagaaaatactgtcgttgtgtgacaggcgcaccacctgattgtgcaccacgccgctgtcaaccgggcgcacaccggtcagaatacattcataaagcgggcgggagagcgagggcagttcacagctcaggcggtacagagtggcgtccccggattcagctaacccctgcataaagcccatgcagtcatgggctgtgcggtagtttaagccatccagaacaaccaggataactgggttattcattgtcattccgttaattcatgttgatgataacgttctgctgccacagtttcggcaactggcgggaggttttttcccagccgtcaaaatcggtaatcggttttgctttgctgtactgggattccggcagcagtttggctttgatatcgtccggcagggtcaggtgtgcggcgcggatagggcgggcatatccttcggccaggttgagctgtcctttatcactgaagataaactcacgggccagtttggcagcgttcgggttcttcgcgtatttattgatgatggtggtgtaaccggaggtgacagagccgtcagacgggatcaccacggtaaagcgtttggcatcaatctggtcgcggtagttaagggcgttgaaatcccacattaccgccacttccacttcccctttttccaggttggccacgctcgggtcattcagggataaacgtttctgtttggcgagatcagcaaacaactcaatcgccggctgaatattggtttcattaccgccgagggcaaaggccgcagacagcacgccgctgttagcctgtgccgcgataccgacatcaccgattgtcacgcggtagttaccgttgcgcaggtcagcccagcttttcggctgttctttgacaaggtcattattgatgatgaatgcaatggtgccggtataggccagcgcccagttaccgtctttatcttttgcccagtccgggatctgatcccaggtagttggtttataaggctgcaccacatctttctgaacggcgacagggccgaaggcggcaccgacatccccgatatctgcggtggcattacttttttcagcggcaaacttggcaatttcctgagcagagctcatatcggtatcctgatggcggataccgtagagtttttcaagatcagaccaggtgcctttccagttggcccaggtatccggcatcccgacactgtaaaccacgccctcttttttggcggcggcaatcagttcttcaggaatggtgttttgtccggcagagaatgcagagaaagaggcggaaacagcaacggcggtcagcaatattttggcagcaggaaaacgtgtcataaaaccctcgtcagttaactgattcagtatcagtggtgaggctagggtatgacgcgtttgtgacaggcaactgacacccgtgtgacacttttctgacagccgggtgacagggaaatacatgccccgttatgctgagtattctccccgcaaacggagtatgatttaatccattattatttcattaacatgatgtctctattatgcagcagattttaacgggcaatgaaaccggctactgggttatcagcgcggataaccgcgtctggctgccggaaggacaactgccggagggcagtgcggcacaatggatgctgaccgggaaaccggcggtgcgtatcggggagtggcagggactgccggtctggctgatccgcgaaaaaatgcgttccgatatgtgttcgccgcgcattattgccgcagagaatgatgacctcttcaaaatggccgggcgcggcgtgcaactggcggagttctaccgctcgcaccgttattgcggctactgcggtgcggcgatgaaatacagtgaaagtgagtgggcgtgtctgtgtgacagctgccgcgaacgttactacccgcagatagcgccgtgtattattgtcggcatccgccgtcatgactctattttgctggcacagcaccgccgccacaaaagcgcgccgctgtttaccgtgctcgccgggtttgtcgaagtcggcgaaaccctggaagaagctgttgcccgtgaggtgatggaagaaagccggattgagattcagaatatccgttatgtctcctcgcagccgtggccgttcccgcactcgctgatgatgggattcctggcggattatgcggatggtgaaattcatcacgatccgtcagagctgctcagtgcagactggtaccgctatgataatctgccggttattccgccgccggataccattgcccgccgtctgattgaagatacggttgcactgtgccgtcaggatgacgaagacgcgtaacaccgccctgaccccgggcggcaggcgtgctacaatgggttttattcaggacgtcaatacgttacgcggccaacaactttttggagtctgtcatgagtgaactgaaaaacgaccgctatctgcgggcattactgcgtcagccggtggatgtcacccccgtgtggatgatgcgccaggccgggcgttatctgcctgaatataaagccacccgcgaacaggcgggggattttatggcgctgtgcaaaaacaccgaactggcctgtgaagtgactctgcagccgctgcgtcgttttccgctggatgcggccattctcttttccgatattctcaccattcctgatgcgatgggtctcgggctctattttgaaaccggcgaagggccgcgctttgtgcatccgatccagaatgcccgcgatgttgaaaaactgccggtgccggatccggaacaggagctcggttatgtcatgaatgccgtgcgcgccatccgcaaagccctgaacggcgatgtgccgctgattggtttctccggcagcccgtggacactggcaacttatatggtggaaggcggcagcagcaaagcctttaccaaaatcaaaaagatgatgtatgccgaaccgcagaccctgcacctgctgctggataaactggcggacagcgtgatcctctatctcaatgcgcagattaaagccggtgcgcagtccgtgatgatctttgatacctggggcggcgtgctgaccgggcgtgattaccgtgagttttcactcaattacatgcataagattgtcgatggtctgatccgcgaaaatgacggccgccgtgtaccggtcactctgttcaccaaaggcggcggacagtggctggaagcgatggcggaaaccggctgtgatgcgctggggctggactggaccacagatatcgcggatgcccgccgccgggtcggcagtaaagtggcgttacagggcaatatggatccgtccatgctctatgcatcacctgcccgtattgaagcggaagtggcatctatcctggctggctttggtcagggtgaaggtcatgtattcaacctcggacacggcatccaccaggatgttccgcctgagcatgccggcgcattcgttgaatctgttcaccgcctgtcagccaaatatcatcagggctgatcactgacagaccacggaggtcaccatgacagccatcgacacccgcgccctgaaagccaggcagacggaactggcacaactggtcagtctgcaggatgtgccgcttaatccccgctatatcgcgggggtggatatcggctttgaggacgggggaaacgtcacccgggctgccgtggtgatcctcacctggcctgagctggaggtggcggagtatcagaccgcccgtattcccacacaactgccctatattccggggctgctctccttccgtgaaatccccgccgcacttgccgcatgggagaaactgaccttaaaaccggatctggtgctggtggacggccagggccgtgcccatccgcgccgtctcggcgttgccgggcatctcggggtgctgctggatttacccgccattggtgtggccaaaagccggttatgcggcacgtttgaaccgctggcggaagaggccggtgcacagtcgctgctgacagacaaaggtgagccgctcggctgggtctggcgcagcaaaaaccggtgcaatccgctgttcatttcgcccggtcatcatatgggtattgacaccgcactgacctgggtaaaagccctgacgcgcggttatcgcctgcctgaaccgacccgctgggctgatggtattgcctcaaatcgaacattttttgtccggttgaaacagaaatttcccgattttccacgtaaagatgtggatatcacggattttcaggtaaactgcggctcacatcagagtaacgagtaaagcggaatgttaaagaacccgatccacttacggctgggaaaactggaaagctggcagcatctcaccttcacggcctgtctgtgcgagagaatgtacccgaattatgccgttttttgtcagcagaccgggtttactgatccgtcgctttaccggcgtattctggatctcatctgggaagttctgactgtcaaagacgcaaaagtgaactttgataaccagctggaaaagctggaagacattatccctgatggagacgactatgatatctacggtgtgtatccggcgattgatgcctgcgcggcactcagtgagcttatccatacccgcctgagcggggaaacactggagcatgctattgcggtcagtgagatttcagtcggcactgtcgcggtactggaaatgacacaagccggacgcgaaatgtccgacgacgaattaaatgaattgcccgctgttgaagaagagtgggacattcagtgggaaatttaccgcttattggccgcctgcgaagagcgcgatattgagttgataaaaggcttgaaatccgatctccgggatgcggggatcagcaatattggcgttagtttaggcgattaaatcaaaaaacgtgatttaagcctataaatgccggtgttaaaggcttcacaattgccccgtctctggtctacagtggggggcgaaaagaagtggctatcggggcgcgtgtatcagggctgtcaaaaggcacatccgacgcactcgatgctttgcaaacgataaacacactgtaaggatattttatgaataagactcaattgattgatgctatcgcagaaaaagcagagctgtctaaagcacaagctaaagcagcgctggaatcaactctggcggccatcactgactctctgaaagaaggcgatgctgtacaattagttggcttcggtacttttaaagttaaccatcgtgcagagcgtactggccgtaacccgcagaccggtaaagaaatcaaaattgcagcagcaaacgtgcctgctttcactgccggtaaagcactgaaagattcagtaaaataattgcgttgcaaaaacagattgatagagggggatttcgtccccttttgttgatcagacaggggctgcttgcactgggctttggctcattgctcagcgcctgctctgttcagcctgaccttccccccttcagcgcgtccggttatatcgcggacgacggcgctgtcagaatgtggcgtctcaacgccgacaaccaaccccgtgtcctgatgagtgttttcagtccctaccgcagcggacaacagaccgtcgtcaccgtttatgaataccgcagaggccagctctggcagatccgcgcagaatatctgggcgataacggcttttctgaacagatacggctggatcacgagggcaataccatctttatgcagcgtgataaagacgggcataaatccccgctgaccgcagacgaaatcacccggatgacctttgtggcggacagacagctgacacttaacagcgcactggtgatcggtgatatccggctgaaacaggggcagtggcgtgacagctatgtcacggattgtcagggtaataaatcctacattgaatttgatgcggaaacagaacagttcctggcgaagcgtcagcgcagcagcgcatcacctatctacattgcatggctggattcaccggaaggacgggaaattctgctggcggcaaatgataacttctgtaaatgggaacctacggaagattcactgtaaatctcccgcagggtattaacgcggtttacttattcagacgggcaacagcacggtagccgatatcactgcggcaaaatgcatcatcccagtgaatatgtttcagtgcggcataagcctgtttctgcgcctgagcaatatcctcacccagtgccgtcacacacaacacccggccgccgtcagtcacaaccgcaccttctttcagtgctgttccggcctggaaaactttgcagtctgcttcctgaacatccagtccgctgatcacatcacctttacggtaatcacccggataaccaccggctgccatcaccacaccaagcgccggacgcggatcccacagcgaggtttttcccgccagttttccctgtgcaccggcaaggcagagttcaaccaggtctgactgtaaccgcatcataatcggctgggtttccggatcaccaaagcgacagttaaattcaatcactttcggctcgccgtgttcatcaatcatcagcccggcatataaaaagccctgataggtgtgccctcccgccgccataccttcaacggtcgggtaaatcactttttccatcacccgctgatgaacggtatcagtcaccaccggtgccggggagtacgcacccataccgccggtgttcggcccggtatcattgtcaccgacccgtttgtgatcctggctggtcgccatcggaaccacatttttaccgtccaccatgacaataaaactggcttcctcgccggtcaggaactcttcaatcacaatgcggtgcccggcatcgccgaaagcattaccggccagcatgtcatgtaccgcgtcctgtgcttctttcagggtcatggcgacgatcacgcctttaccggctgccaggccgtcagctttgatcaccaccggcgcgccggttttgtccagataagccagtgccggttcaatttcagtaaagttctgatagtctgccgtcgggatatggtgacgcgccagaaaatctttggtgaatgctttggagccttccagttgcgcggcacctttggtagggccgaagatagtcagaccggctgcattgaatgcatccaccacacccatcaccagcggtgcttccgggccgacaatggtcaggccgatattattggcgcgggcaaaggccaccaggccgtcaatatctgtcgcactgatatccacattggtcaggtttggttcctgtgcggtaccggcgttaccgggcgcgacataaacattggctgccagcggggattgtgcggctttccaggccagcgcgtgttcgcgtccgccattaccgataatcaggatattcataagtcagctccgggtattaatgacggaaatggcgcatgccggtgaaaatcatcgcgatattgtgttcatctgctgctgcaatgacttcgtcatcacggatagagccgcccggctggatcacgcaggtaataccgacagcggctgctgcatcaataccatcacggaacgggaagaacgcatcggatgccatggcacatcccgccacttccagcccttcgtcaccggctttgatgccggcaattttggcggagtaaacacggctcatctgaccggcacccacgccgatggtcatattattctttgcataaacaatggcattggacttaacaaacttcgccactttccagcagaacagggcatctttcagttcctgctctgtcggctgacgtttgctgaccactttcaggtcgttatcgccgaccattccgagatcgcgatcctgcaccagcaggccgccgttcacccgtttgaaatcaagggcggcaaccggatgctgccactgaccgcaggtcagcacgcggacattctgttttgctgcaagaaccggcagcgcatcttccgcgacggacggagcaataatcacttccacaaactgacgttcaataatttcagccgccgttttggcatccagttcgcggttaaaggcgataataccgccgaatgcggaggtcgggtcagttctgaaggcattgtcataggcggtcagtaaggtatcggcaacggccacaccgcacgggttggcgtgcttgacgatcacacaggctggtttatcaaactgcttcacacattcgagggcggcatcagtatcagcaatattattataagagagggctttgccctgtaactgcacagcagtactgatggaggcttcctgaatattctcttctatatagaaggcggcattctgatggctgttttcgccgtagcgcatatcctgctttttaatgaagttgagattcagggtacgcgggaactgaccggaaggctgagtggtatcgccgaagtacggttttactttctgaccaaaatagttggcgatcatgctgtcataagccgctgtatgctcaaaggctttgatggcgagatcaaaacgggtatcgaaactcaggctgttttgtccggcatccatctcggcaatgatattgctgtagtcactgctttttaccacaatcgccacatctttatggttcttggcggcggagcgcaccatggtcggcccgccgatatcaatattttcaaccgcgtcttccaatgtgcagccgggttttgccacggtttccgcaaacggatagagattcacaaccaccatatcaatagcggaaatctgatgcttcgccataatctcatcatcggtgccgcggcggccgaggatcccgccgtgtactttcggatgcagggttttgacacgtccgtccatcatttccgggaaaccggtgtaatcggagacttcagtcaccggcagaccggcgtcagccagcaggcgggcagtaccgccggttgataacaattcaacaccacgggcggaaagagcctgagcaaattcagtgatgccggttttgtcagagacactgagcagggcgcgacggatagggcgaagctgttgcatgagtttggatcccttgaattcaacgaataaatgacaataggttgcaggtgaaatcggtgtatctcataagatttcaaaacccggagtaaaaagcaacggtacacgaatgcagcagattgtaacgcaaacgtttgcgtgttgcttgtgaattttgtgattttttaccatctgtggataactttgtgtgtaacccggtataaacgggggttttgctggggaatgcagcaaacagtcagaaaatcgaaaattaacacttgtcttctgaaatcgactccctataatgcacctccactgacacggaacaacgcgctaacacgcggtccggcaggaaaaaagagaacggcagataagaaattattgcttgactcgaaggggctggaaa

(The sequence listing continues in the following parts.)
